United States Patent Application Publication US 2022/0064737 A1 - sequence listing, part 3

SEQ ID NO: 32768 - DNA, 1736 bp, Homo sapiens
  chr8:105600489-105602225
  hyper
cgcccggattcggcagagcccttgcccccgaggtggagtggggagaagtcagcgggaagccttttcagggaatcgagtaggacaagggctggcgcggtgggaatctcgccggtgagagaacttcctaaccccgggttgagggggcggggggaaggaccgtcccggcagcggcgggggcgagctcctctgctttctcacagtcaagcatctttgtgtgtggattgtgccaggctacgggtcctggagcaactggccgcgggggccctcgaacccaggtcgggaagtccgcccgccaccccctcgctccgccggggccctcccggccgggccccccagcccctctccaccacccgagggtctggaggtggacgagtggagaaaagcatctccgtgtggggacacccgttccgccacatccaccccctcaccggtctttgtcccgccggtagccagggtctccgcgggagtctccaggggaacccccgtcctggaggcctcggggcccgggtcgcctcagctttgttcggtcagcggggcgcggggacgcggacacttaccgtacaccccagcgaggaaaagcaagagcaacgcagacctccaccgcggagactcttttgtgctccagcgacaggccataaccacagcagatggagagagagaggaggagacggaggaggagggaggagaagctggaggtagacgacgccgacgccgccgccgccgccgccgccgccgccgagccaccggctgctccctgcgctctccgcggctgcgggagggggaagggaggggccgccgccgcccgcgcgcgctccctcctccctcctccctccggctcgcctgctcccaccccgggcggtgcgagagccccacgcggggcggccctcctgggggcaagggcaaggagctcgcgcgccagcgcgagacgagagggtggcggacgccggactccggcctcgcgccgctcgggctagccggcgccgccactcgccagactgagcgcgcgcccatccgtgcgatcggcaatcccctggcccgcctgcctcggttccctccccgcgctccgctggactttccaagtttcgggccgatttccacgcgacgggagcccaaggagcaaggcagcgccaatcgatgacagagcgtgcgaacgccggctgctggatgcccaggggctggagcgcggggtgtgtggaggagcacggtcgctgtccgagggctgggctctggcccagcgggtggggggagggggggtgggataccagctgggaggctgaaggtggttccgtgttgggggaggcgtggatggtctgaagctgacaacttgggagttccttcctctatccggtacccccaagtctccacttgctgtcggcgcggagcttcgagtgggggtgggctcaagttagtgcggccaacctggcagctggtcggtcaaggggcagtgtggactcccacgctcaaggtgcccggaatgagtcgggcaaggcttgtgcagagcccctccagtctggcgtggaagcgccaagaggtcatttgacatctcacgctgggtcgggtgcagctgggccaggatgttcggcagggctggagccgactttcagggtagatatattgaaaggaggattcgcccatcacgctgcagtttccctaaagctcttttctcactcccagcaaatgggagtcctcctttacttagatccccagaacacttttctaagtacgtctgtagtgac

SEQ ID NO: 32769 - DNA, 1394 bp, Homo sapiens
  chr8:106330407-106331801
  binary
cgttgacgcggtgacaactgcagaaggtggccctcctccaagccgtccccacgcctcccctccaactcccacccacccctgcccccatcccccaccaccgcctggatcccccgcacttcgcccgaccaaggccggggccgtagtttgcatccggactggatttggatgcagccaatcctcctttggctgatggaatagtctcccctccccacagccccggcgcgcccctccctcgcgcgcctcgccgcctcccgccgcagaacaggagctgcgcggcccggagcggcggcggcggcgccggagtatccgtcccgcacgccggggcgaggggcgagcgagcgcgctcctcctcccgcgccctgcgcccccgcgctccccctctcctcgctgctcgctctcccgtccctccctccttctcttccttctttccgtgttatttttctcttctctttccccttttctctctccctgaccgttcgcttgtacattcccattctccccccgtcgctctcctctccccctcccctcctcactgtcacactctctgtgcccccgtctctcttctctcatttgcttgctcatctccgaacgtgaatccgcggctcccggaggagcccagcgcccggagcacctggagtccggccggcggcgggccgagcctggccagcggcggcggcggcggcggcggcggcgggagccgagggagcggcagccgcgaccgcgggcaccgcgggagccccagcggcagcagccgccgccgagatgtcccggcgaaagcaaagcaaaccccggcagatcaaacgtaagtttgcgcgcggggccgggagttggtgggattattgcccaggagcggggtgcgcgggacgggaaagcggtgggtgggtggcggggctaggggagatccgctcccggtcccctagatgtctcaaactttgcctgagcagtcgaagggacaactagacagtcatagacagacagacggccagcccgagcctcgggcaggagagaggctgcgaggagcagcccatgcttgccccgctcagccctcgcgctcccgggctgcttttttaattccgacccgcgcacgctgcgagtccccggcgctgtcgtccagccggaggggcagtcccgctcctttagacgcttattattgttgttgtcattgctttgtgcgattgacgtgggactactcttgggaaccacttttagtaaccagggtagaaacttctcagaaaagctgggcggtcgagacctcggggcgagggaggtaacttccccacgcggtggaaaatcagagcgtcagggtcccgatcctgggcggtgccagagccacaccaaacccgaagcgaaacaaaaagtaggtgtaaaagttcgcgcctctgcggcgggcggcc

SEQ ID NO: 32770 - DNA, 924 bp, Homo sapiens
  chr8:109093657-109094581
  hyper
cggcgacaaattctaattgcgcaaaagtccaaagtgccgaatgaaatagacagctctcaccaggtccctgggaaggggctgctgcgcgcccttcctgcgcgggtaattcgatgtgcgtgtggtgagtggtttatgtttaaatccacccagaaaattgaatcgtgtctagccgcccttcttctaaaatgcagttggattagttgcatctccagcggactccgagacagaaatacgcactaaatctgcaggaaagcgagttccccgaaacctttctggaggcttccacccgccttctccgctacgcacaagtgatggagagggagggagcagttaaaaagccgcaagtgaatttcattgagaacagaagcctccaccggtgtggctgcttttgcaaagcaaatggagagagcgaagtggggcctgttttaaaaacaaacctctggaggcgaggactccccagaaaaccagcgcgggaattgctgcttaattcagaaagttcccatctcgtcgcagtttccagaaaaaagagatctatgttggcctttttctggaaagggaggtcctccccctcgacttggtacccctcccaagctccggaatacagacacacgcttgggtacacccacacaccacacacacactatgctaggtcaagtccgaagagatctgaggccgggtttggggcgcacgtggatggggaagataaaacaaatgagctacagggaagatggttaggaggacagagagaagaacaacgacgacaaaaaaaaaatgcatgtcagataagaaatacgtcctaaagagacaagtttagatgaggaggtggggcggcgaacatgagtgcggaccgcacgacttagccctgagcgcccgattggcgcccggctcgccgagctcccagcgcgtctcgctccggctccccgc

SEQ ID NO: 32771 - DNA, 686 bp, Homo sapiens
  chr8:11550022-11550708
  binary
cgtgaaactatgctcatgcggatctagattgaatctgatccttcgggccgcggcggctccgcctgggagggcgtggcccccgcgctggggcgggaaccggcttctggggacccgcggcctctgcgcctcagccgacctccaccgcgggtgcgtgcgggggtgcgggggtgaggggtgcggggctgctccgtcgggaggctgggagggagagcaggcgccgggacccacgcgagggcgcggacggacggggggcgggaagcgaggctgccgaggggaggaagcggggccggcgcagcgggcgccaggccgggcagaggcgggggcggccggccgggggctgaccccgagcgccgccgagtttgcgccgcccgccgccccgcgctcgcctccagccgcctggggttccgcggcggccgtcagcgcgcacctcatcaataaggcctgccaggcgccggccccgcggccatccatcacccgggctgcacccccggccgcgcaccgaggcttctgccagcgcctgcggggcctctgcgtggagtgggccggcagcgtttttctacccggcaacaaatacatggctttattccacttcttaatcccagtgtctgttaacgatgtggtgttcatttgttcctaaagagctgtaaggaagcttagaaatgattcggcaagctgggcgcggtggc

SEQ ID NO: 32772 - DNA, 853 bp, Homo sapiens
  chr8:120220368-120221221
  hyper
cgatcaggggtatgggggtgcgcatggagacgcccgcggagcgctggcgctggccagcggagcaggaggtgaggtcggcggagctgggaggaccgcgcctggcggctgcaatagccgcacctgtgcacgtgatcgcgagcggctcgggcgccagggcggagcggcgctcacctgggcccacgtgacggggcggggctcgaggagccccacggccacgcctcctcccgcgcggcgcgcccggagcccgcggagctgagcggcggcggcggcggcggcaggagcccgggaggcggaggcgggaggcggcggcggcgcgcggagacgcagcagcggcagcggcagcatgtcggccggcggagcgtcagtcccgccgcccccgaaccccgccgtgtccttcccgccgccccggggtcaccctgcccgccggccccgacatcctgcggacctactcgggcgccttcgtctgcctggagattgtaagtggggccgccggagcgagggtcgcgcggggagcgaggacaggcggcggcatccttgtcccccgggctgtcttcctctgcgtccgcccccggcctccttcccttcgacgtggctttgtcctgcgctccctcccggggtcctctcggtgccccgcgccgccgcccgggccctccctcctagcacctgttacgcgggcacctgctcccccgcgggcgacggaaattgcctggggagggcgagtaggcggcccggcagggccgaacattggggacgtggaggaaagaaaggtgttggggctcagaggcgcctttagaaacccagggcatggccaggggccgcgcttggccggagcgagctcctggctctcggcctc

SEQ ID NO: 32773 - DNA, 971 bp, Homo sapiens; identical to SEQ ID NO: 29447
  chr8:127569937-127570908
  binary

SEQ ID NO: 32774 - DNA, 1003 bp, Homo sapiens
  chr8:12808858-12809861
  hyper
cgcgctaaagccaagcgtcgtcgtcacccaaggtactgcgctgatgcgctgcgggccgaccaggtgctcccgccggggcgtcttctcctacgcaggaagggccacgccgagagaggcaggcaacaagggcacggctggaggccggaaggtcaccccgtccccggcggggcgggcgcggcccagcctcacttcccgggcacgttcgggcggggcgattgcagggaacggggcggggaggcgacagtccccggctccgccgcgcgccagcccgccttcgctgcccggaggcgccgcaggcctgggttcccggacagctgagcccgagcgccgcctcccgaaaggtgaaggcggcccggggaggcggggacggtgacgggggcgggggccgcgggcggtctcccgacggctgtcgcggggccagcccaaagcccccgatccccggtagctgcgcttcccgcgcggggcgccggagtagggcgggccaagctggcctgcggccgcggcgggaagaagggctagcgaagcacccccgaccgggcccaggcgccggacgccggggggcgcctcgctgcaacttctctttggaagccccgacacgagccccggcccgcgcgcgcgctcccccacggccacgcgcgcaccctgccgcccgcacccccgcgcgccctccgtctattttttcctcttcctttcatcctcacactctaaaataggtcaaggggtggaagttacacctggtgcagccctcggctctgatgcaaaagcagcttttgcccctggctgcgggacagcgctgtgactactcgcaacgggagagctgctgccagtcgccacaccgtgcggaaagcgccggcgaccggagcactgacaatggtctgcataggggagcggagagaagcttctgttgcgccctagatccgctgcctcggcgcccgcccgcagggaggagggggcgcgacaggtcgtctagcgcgtgccccggagcccgcgcccgggtctggcc

SEQ ID NO: 32775 - DNA, 1418 bp, Homo sapiens
  chr8:132051918-132053336
  binary
cggtgaagaagcccagcaggatgcccttgagcgggtccatgggggccgaggccaggctcaagtgtaggaccaagagagtgagtttggtcagcacgtccagcacgttcatcaccacttccgatttgcgcctttggcccaagaaatagcgctggtagaggcgttccaaatcccgagatttgaaggagttgcgcagggtggggaaaatgacccctcggtagctatagcccccattaagaaagaaatccgagttgctaggggcacagtcaaggtgcaggaagcccaggtcgcccccgcctccgctgccgctggcactgccgctcccgctgcgttccgggaagactttggtgccgcaggtgctgtgcgctcgctctcccgggcccagcgagtagaggggcagcgccgagtcgcctgacagctgcggcgcgtggtggttggggccgccgcccgcagggtccgaggctttgcccgagcctccactcccgctgccgctgcctccccggtgcccgtgaatgaagcgctgctccgtgatgtgtcgcaccgccgtctgccacagcagccgctgcggccgggaggcgctcctgccgtcgccggccgggggcgtcgggtggatggtgtagagttcctcgctgcctgtaaggcagcgcacatcggagagctccatggctctgggccgcagggaaggaggcccagaaccttggggaggcagccggaggaggggttcctaaagactcaaaggcggcctggtaggagcttggcaaggatcctttttatcctaggctgccccgttgcaggagccctgcgctagggctccctgtaggtcgggtcatactgtgcccaggggcaaagggcacctggaagatcgcggcggacctcggcgtccttgcgtgctgctctcccgccagccggcgcagcttgggtacgcagcggcagtggctatttgtcctcaggagccgcagcgctgtgagccacgcagccccttcctgggctcaggctccttggttgattctaggctcagcgttttggcgcagcctttgctctccaagagacgcctaagcgcctgggcgccgtgcttctgctgcgcgtcgggcgggtcctggctgctgcactgggctttggacgcccactgctccgcggctgcagggggcctggccggcggtgaccggcggcagcgatgggtgcgaagttagcagatgtggctggaatcatcgcccttcggagaactccattgcgccgggatggggagcaggggcggagctgggggcgggggcaaagaaggaggaggagggggtcacggtgaggtggcggggcgccccgcgacagggttggagaggtggtagcctcggcgctaacaattcaccaaatagttaatttggaggaaggggtatgctgaggctccctcctaggctctttcctagttc

SEQ ID NO: 32776 - DNA, 993 bp, Homo sapiens
  chr8:132053354-132054347
  hyper
cgcagcgctggctctggccagaagcatccctcccggagggggtgtggggactctcgctccagggtcccagcctgagctataagacgaggtcaacgctttcagctgtgctttcgaagggtcgcagcacacagttctcatcccctttatttcgttctttggagtccatttggctcggagctaggaggatcaggagaggcgggggaaggaaaaagtggtgagggctccaaagccaagagctccgagaacgaagagaagccgccggtgcggatatctgaggctgagaaccgaagcttggcggatgaggcgaaggtttggaggagaagggaggcccgaggccgcgtggaagtcgacagagacgcctctggatctagggaagcgccgccgcgtgccaccctggagctctgaaacgcaccgcgggcgccaggcgactgggagaaatttggagacctgtcagagtggtcagacacccgcggtgacttaaacccgcccccgcgccaagccacgcccccggaaccgggccgggggtggcggagggacctgccatccagatctggccaggacgccccaggtcttgtaggcagaggcacgcgcgggccggcgtgggagaggaccactgagggctagggccggcgggcgcccccggccttccctgggcgcactgcgatccagcgttccagctggccgcgccagccggttcctccgctgttcttttttaggcattggctcttgtcctctgcaggtgcggagccaggactcgtaggccgctttgcgcacggactcggagagcccagcgcgacggaatacagggtttccttttcgcccttcctacccgtgcgtcttttggcaaagccaactttcgggctaaacgcaaaatcccccaagaggccgcaatcatagaggcagtcagtttcctacaggagcctctttactacctcgatccgaagggggtggagggtacgggacatcaaaatggggacgtcccctgcctgcctc

SEQ ID NO: 32777 - DNA, 990 bp, Homo sapiens
  chr8:136469252-136470242
  binary
cggtcccgctgctattcctcagagcgcgactggggcgaactggggcgcccttcccagctccagctcggcccttgtcccctcttcccaggatcactcgctgggtgaccttgggcgagccacttgacttctctgagccccagtttcccagtccgtgcatctgaaaggctgtaatagcgtcgtggggctccccactcggccctcagggccaaaggtgggcgccggacacgcgggaggggcccttggacgcaccccctctcgcaaacgcccggttagtcccggcggactcgcagtggagagcggccccaggaggcggcgggcggcggggcggtgggcgccagtgcgcaggcgcggcgcggcagggcggggcggcgggcgcggggcggggcggggcggagccgggcggggcggggccggcggcaggcgctgggcgctcggcgcggtggctcagagtgcgcggggcggcgcgcggcgtgcaggtcgcagctgtggctcgggtgctggcaggtgctggcgggactggcggggatcgccgtggactgcctcaggggcgccgcagcccgctcggcccgagggcccgcctaaccgcgccgcccgcgcccgctcctcctcggcccgcgcccggagcgcgggggccgccggcgctgggtactcggcggccaccggggatcggggctgagcggtcggttcccgcccccgtgccgccgccgccgccttccggccgaccgcccggcttggccgctgctgccgcgtctggcccccgggtccccgccgctgggggcgcgggcggggtcgggggttgccgggcgccgccccccgtgcgcctggagtccacatcccgggcccggcggccggcgagcatggaggagaagtacctgcccgagctgatggcggagaaggactccctggacccctccttcacgcacgccctgcgcctggtgaaccaaggtgaggcgccggccgttaactgccggccggcggcggttgggggcc

SEQ ID NO: 32778 - DNA, 987 bp, Homo sapiens
  chr8:140714896-140715883
  binary
cgcctccccggactcctcccggggcgcgggagcccagcggcgcgcccagcccttacctatggtggtgatgaccgtgatcgcaaagtagaaggagccggcgaatttccactggacgccggcgcggtgcggttccgactgcaggatcaccagctccagctgccggtagtcctcgctgctgatgttgtacttccccttgatccggatctcctcggctttgagtttctcctcctcgcgcatctcgtggtccgactcgagggcgtcgaacacggcggcgcccaccagcaggtaggtgaaggtgcagacgatgagggacagagtccgcacgttctgcctcttcatggccgccagcaaggagccggcgcggggggcatgtcccgcaggctcacagccgcgcgcgtcccactgcagcgcccggcggccgccgccgcctcctcctccgccgccgccgccgccgcctccaagttgtaagcggcggcggcagcagcagcagcagcagcggggaggcggggggcggggaggctggggggggccccctccgctggggccgccacagccaccgccaccgcgaggcggctggcggggcaggggcggcgcgggcccgggctcagccgagaaggcggacaggcacaggaggctgctcgagcgccggggccaggcgtccgggaaccccgacaccctgcgccagacccggccgaagcagcccgccccactgcgcagggccatgcagggcggccccgctgggtaccgcgcgggccttgctgccctccgcaccccgccccccgctcccgcgggaaacgcagggacgggaaccggagccagaaagcggccggagggcggccgcggggcccggtacccctgtgggtccagctcgcgggtggcggtgcccagcaaggagcctgcaggtccgcgcgcccagcggaacctgcttccccttttacccctcctcgccccctctcggtggtggggaggaaaagtttgcgaagtggc

SEQ ID NO: 32779 - DNA, 429 bp, Homo sapiens
  chr8:143695478-143695907
  hyper
cggccagcaggtgccggtgcgtccgccgcacgtgctccagcatctcggcccggcacttcccgatctgcaggatcacgttgggcttggccacctgcccgccccgcggcccggggtaggcgtggagcccgccgctggtccggtggtccagctccatctgtgcgcaggtgctccggcaggcggcaaactcctcggggcggacagagggtggtccggcgctggggtccggcggcctgggtcccgtgcggagctgcggggagcgcctgtctgtcgctgcgggccggcggcggggccggcggagcacgcccggggaggcaggtccggctcggctgctgcggagggaggacgccgcgcccgagctctgcgctgagtcctggccgccggctctttatgcagccagcgaggcccgtgggcggccggctcgccgagccc

SEQ ID NO: 32780 - DNA, 347 bp, Homo sapiens
  chr8:143859063-143859410
  hyper
cggaccgccggctcgccgggcaagcgctgggaccccgaggccagtccaggcatctggatctccgacacagaggcagccacgcagtgattccctggcgaccctcagactcacgtgttcagcccggacactccgcaggctatcttcaccgcgtcccgcggcagcccagccttccccgcagccgcctccgcccactcgcccgcgccgcgtcgtttgtcggccggcaccagccttgcggccccagctccgccctcctgcagcccaggcccagcagctccggaactggcgccctttggcgcacccgcctcgctgcccatggcctccgcctgcctcccctgcgctcagctccc

SEQ ID NO: 32781 - DNA, 1309 bp, Homo sapiens
  chr8:144240980-144242289
  binary
cgcgggccccctactcaccgggcgccgagcacagcaggacggccagcagcgccaggccgaggcccttcatggctgcaggcagcatgctccgggtgggcctgggggcggcgcgggggcttggggcgcgggtcctctggggcgcaagcctggaggggagaagcatcggtcaggagaccccaaagaccctctcctttcccagcctcaggatgcaaccttctccccggaatccaaggccggggtccgcccggagctcgcagagccccacccccagccccttctccagagcgtccgccgtcacagcatccccgccgggagacgtctggcctctggggcgaggtgacagctcgagacgcctccgccccgcgccggcacctgtgtgggggagcggatggggggcgtcctcttctccccggggagctgcaggtgcgtccggacaggaatgagcggcaggggcgggagcgggtgggacctgccactggggggaggggcgcgtgccaggtccccacccccacccctgggctggggggccgggaaccccgggccgagtcccctcccttggccttccgcgcgcgcctcggcgctcaccgcggatggggcgtggagcgcgggcctcggggtcggggggctcactcacatcccgggggtgtccgcactccgggctcgggcggcgtgcgcggcgcggggagctgtgcccttcggtctccctgcggaccggaatccgggcgcagcctcgtctttcggggaacgcagccgcagacgcggaccccgcgcgaggggcggggcggagccggggcgggggccgcgcggggggcgggggcggctgggagacgcgcggggcggggggcgcccggggctcgcggcccccacgcaggtagctggcccgggccctccgcgcccccttgctggcgcgcgcgctccctcgggttcccgctccctccctcgcggcgccccctgctcctccccagcctccgcggccccctacccaggcgtgggcaggatcccttccccctctgcttggctgagatccccttggaatttctcggaagaacgtttactgcgaaaggaagcaaaatgcacaaagacgcagagagggggaggtacccggcgcggcgccacgcgcaggtccgggttcgcagacccctggggtcagactcccgccctggggccccgccctccccctcctccccgcccctccccaacctcatacccgtttccccgtttccccgtttccagtggctccaggccgttctcctcccctgagcatccatgaagacccccaccagaagccgcagccccaggggcttctgtc

SEQ ID NO: 32782 - DNA, 904 bp, Homo sapiens
  chr8:17354241-17355145
  hyper
cggggggaccaaaaccccacttagaactctgcttagaagattcggaaatgcccttgaggtttggtcctcccaggagagcacgaagtttatcctcgcgcgcagcctctcttccccggcccgcgcccaccggcctagcccggggctagcgcccgcccacgtgtgctcggctccaggcaaaccccgctgagcagcggccgcacaccgcccaccccggggattggtcagcgcggccggggcccggcgggaggcgggctcggggtcgcgttccgggagcgcggaggaggcggtgccgcccggccccgcgccccgcccccgccccgggtggctacacagaggggcgcccacgtgcccagccctccttctgcagcgcggccggcgggcgctcctcttcgcgggaccagcgaggcggcggccgctgctccagcgtcccccagccgcgggcccccgacgcgctgcagccggcagcccaccgccgccttcttggcgcgaccccaacccagccccagtaagttgctaggtctccagccccgccgagaggccgcgggcgaggggcagcccggacgctggggccggcggggaaggagcggggcgagggcgccctggggccggcggggaactagagggtcgagggctcccggggacgagtccagctgcgcgcagctgccctgaggccgcgctccagcgagtcttcgtcagggagtcggggccgtgggctggggctgaagccgtggaccttcgtcctcggggctgcgccccggaatgcgcctcgcctcgtccggtccctgtgcagccggctctgcccggggacttcggggaccgctggaactgggagaggggctggcacggcgacttcgcggggacccttcagtcactatttccagaggagctcggcgcacccctctcc

SEQ ID NO: 32783 - DNA, 323 bp, Homo sapiens
  chr8:1771715-1772038
  hyper
cggcgcaccctccccaaggggcgcagctctgagccgggagcaggctctgcggggaggatccagatgttgggggcggggagggcactcggtctgcccagcgacccctcccgaagtgagcgcggcccggggtccgcggggcaggagatgatccgggggcgggagcctctgccgcgcgccccctcccacgcgtgcgcagcctgggccgggcgttgggcagcgggagggggcgcgggcggccacgtggcctcgaaggaatgcgcgggcgcgagggcagggcgctgccgagaaaccggcaggctctgcggccaatgggcgcccggaac

SEQ ID NO: 32784 - DNA, 892 bp, Homo sapiens
  chr8:19614022-19614914
  hyper
cgacggaaacaaacaactttgcctccgcttcctacagctttcctctcctccccgcccttctagcccccatcccaccccaagatcatgccctcgaacagcttctgcccaccgatcgcacgtcccctgggcatgttcgggcagcggtgaccctcagccacatcccccactagcccggtcccgggcaggcgagcgcgctgcccaccggccaccctcgtcacgccccctccaccctctccatcccagccacaataatacaataaccgcagtcatcgcgcggcacgtggaaaggctacttttcagtgggttttgcagaaagcaatcagacagcggaaggccacgagaaacgctggtgaagccaaaccgaccccgggagcgcagcggccccggaccctccctggaagctccctccgcgtccccgcgcgcccacctggaggcgccgcgccctccgcctgccaagccggtccccggcccctgcccgtgccctgggcccccggcgggcagcggcggagggaggccaggcgcggcaccgtcctccgcagctgcacgagccaccccgaggtcgcggggtgggcgggcgcgagctaggcgcgcggggctgtggggatctgccggcgccactgacgcccccgcgcggcacaccgcgcccggctggcccgggaggggacccgactcacccgaagcgccctgctagctgcccggcccggctccggccgctgccgccgtcgctgaactttccctcctgcgcggccgccgcggactcggctccacctcccgctccggcagccgcggagcctccagggaccccgggggcggggagcagcggcggcggcggcggctcgggcgggcgggcgcaacagcggccaagcctggcgccccgccgcagggtaggtcc

SEQ ID NO: 32785 - DNA, 859 bp, Homo sapiens
  chr8:19796843-19797702
  binary
cgacttgctcagcgccaaaccgcggctccagccctctccagcctccggctcagccggctcatcagtcggtccgcgccttgcagctcctccagagggacgcgccccgagatggagagcaaagccctgctcgtgctgactctggccgtgtggctccagagtctgaccgcctcccgcggaggggtggccgccgccgaccgtaagttttgcgcgcaaactcccctccacctgcagacccggcgggtggccactgccacccgaactgaggatgagaagaaggaagttggaaggggcggtggatgcgcccagggactctcccagcctgggctctagccccgaaacggtccccggagtgggatccaggaggggccgggagggaatctcctcccgatcgtgaagcggcggcgcccagttcccgctttttctctctgccgggttcccgcgctatcccttccactctggctgggaccgcgttcccgggctcgcaggctccgccggggaggttccggggtgtgggggccgggacggcggaggcggggagtaagggcccggctggcggtgacctgcagtcacctctctgccggaggggccctggaatgaaaggcgcgcgggccaaggtgacctcgccttggttggcactgcggctcagcccccgcccggggactcgcgggccgactgtggccccttctggggaagccggggcgcggggaggcgttccgggcatctcagccgcacggggtacgctcgccctcggcggggcccctcgctccgctgtgggagtggcagtgggtgtcggggtggagaaagtacgcgtggcgcggagtcctggggacgcggcgtcccacccgctctggggagcccc

SEQ ID NO: 32786 - DNA, 823 bp, Homo sapiens
  chr8:24812767-24813590
  hyper
cgccggtgcagcagcacggagcacactcccagactacagtggcgcccgcactcacgcccttcaagtgccccacccctcccacacagtggccaaggagccaagccctatccctaagagctgcgtgcagccgcaccacccctggtctccactttctgggcgcaccaactcccccccttgctcgagtcccccgcccccctgtgtttctggccgtgccgcacctgcatagcgctgatgtcggcgttctgcttgtcctccagctcctgcagctgcttctccagcgcttcattcatgccccggcatgcttcgatttccagggtcttggccttgagcagacgacggctctcggacacctcgtccttggcggcgcgcacggcgtcggtgttcttggcggcgctctcggtcagcacggtgaagcggctcttgaaccattcctcagcgttctgcatgttcttggcggccagcttctcgtactgcgcgcggatgtccttgagcgcggcggaaaggtcgggcttggtcacgtccatctccacggagatctgcgcgtactggatctgcgcctgcagttcggcgatctcctcttcgtgcactttcttcagaaaagagatttcgtccatcaagctgtcgatgcgcttctcgagctcggcgcgagcgagcgccgcctcgtcggcgcctttgcgcgcttccatcagccggccctcggcgtcctcgcggctcagcacctcctcttcatagcgcgcctgcaggttgcgcagggtctcctccagcccttcgcgctcgccctggagcgcctgcttctcgttggtggcatcttccgccgccaggc

SEQ ID NO: 32787 - DNA, 812 bp, Homo sapiens
  chr8:24857417-24858229
  hyper
cgacaactaaataacgagaaacagctacacgtctccagggcctttcttctggaaaaacttttctggtcccctcttccctgaactggtgcaggcgtgcaaagaaagctccgtgccacgcccggcagcctccattctttggtagaacgcagcgcagcaatagccgccaagtcccctcctgggtacagtacagctccacagcgcccctgctggtggcttgggaagggcgcgcaagcagagaaagcaagtgtcagagccgggactggcctcccagggcatcgcctacagcttgtgctctgagagtcggggtcatcatagctgcgctcttcgatggacactaaatgcgggacatctgttttacactcaccctccctccccgcgtggcaggagacctacactctcccgctatgcgcgctccgcggcagctgccgctgcaccattcattctctcctgcagaagttcaatattgctgcaaatatcgagaaaaaaaaaaaaagcgctgagagggggagggagggagggaggaagggagggacagcgagccagcggccactgcaaaggggcgaagggcagtcccgcggtcagtaagggccactgaactttctgcccaccggtcatccggagctgaggactgggacatggtggggtgcgtcggcgagggtcccctgaccctgcacaaacccaggggtgtggtgtggatgacccgggaagccgcacccagagctggcggtatgtcaggccatagagaaaaagggatgttcctaggctaaaggagacatcggggctggggatgacatcccaaaactcccagcgcc

SEQ ID NO: 32788 - DNA, 1706 bp, Homo sapiens
  chr8:25041563-25043269
  hyper
cggtctgatacttctgaggagcccacctcccttgcaccagctctccggtgataaaagttctgctttccaggctctaagcggtggccccgggagattcagtctgccctgagtccggcttctcccgctcgcggcgcgggttcaagctccagggggtgaaggcagaagtcaactgctcattcattcaacaaatatttattgcgcgcccgcttagtgccaggcaccggaggtgccccgagcaagaagccgctctcgctgatccgtttccgctccccaagtgtccggcgcgcgccgtgggagcgcagcccgcatccctcgcccaccggccgcccggcctgggcgtgcccggctcctccagcgcagccctctgtcgggagccggacccccgggacccagcctccggggtatcagccgggtggggagggcgggagaaaggcaaagtgccgccagcgtcaaagtcccgccggcccaggaagccgctccagggaagcgcgcgaggcggagccgcagtcggcccccgcccggcagagcgcagagagcggcgcgggcgggagaggccgggcgcccgcggctcggaggcggccccggcgggcggagggtgcggccggcgggagggactggggcggcgccaggaggggcgcgcactgctgcgctgcagcccggcccagcaggtgaccgcgggcggcgcgggcacgggcacgggcgcgggcggcgcggcgaggaggcggcccgcggagtccagcgaagtttggcggaacatggcggaagcgtctggggcacgcaggagcgcggggcggcggcggccggagcccgaggagctgtagcagccttagtcgccgccgccgcggggcgaggtcgccgccatggcccgctggatcccgaccaagaggcagaagtacggggttggtgagtgcgcgccccaccttgtcccggcccgacccacgcggccaagttcgcggacagcggccctgccaggtttgcgcagagcccggcggaggaccctggccgggggctcggcccggctgcgcagctctgggagccggggacggtaggagtcctctccagggagcgccgatggggaagtcgcccagggtttggggactccgagtgcttccaagtgcagctgagcttcgggaccgtaatcccgctcttgcatcccaatctccggcacttcacaccagggaaatgtcaacgcgaggggggcgcgcctgctgctcttttggggccgcagctctgtggctcgccccggtgcgcccagcgtgggtttcacctgggagtaggtgaccagcccgggtcggcacatggactggtgctcattgtcccagtgctttctgccccccgctttcgtaggttcttctcagacgccccttaagtgaggagttgagggtggaaagccgccctgccccctttcctccagagactgggatcttgatgacagttgtgagctggatggaaactagagtcgtggcgtggaagtgatggaagggacaggaagttgtggcacgggaagggggtggctggcccctggggctgtttgtgcgcactcatcccctaacggagcctgtctggagagggtgtaaggctgccttccggatcctgagtttcatcctggagacgagaagaggacattttattaaggaaactgtgccagaccccgtgctgggcacttggcattcagaacagcggtgctggagagccccgggttgtgc

SEQ ID NO: 32789 - DNA, 959 bp, Homo sapiens
  chr8:25900912-25901871
  binary
cgggaaggaaggaaagcgagggaggcgtctttaaggagcccagctaaggaaatgcgcggcacagttggctctgcggtgctgccttatttcccttagctcgcaggcgggccagtcccgaagcgctgcggaaagccgcggccgccgcgctgtgcggtctgccggagggaaatccgcgctccccgggccacaggagggagggaaccgccgccggcccaagtcccggagcgataaaacttctgctttctccgctccaagggtagaggccggttcgctctacccgggacacctggccagtttgggaaagggatcatttctccgtgtgatgttggcacttaaatgtgggtggccaggagggcagcaggggaagcgagggtagtggaagaagttcatcggctctttgggggtagaagggctgcctctctcgcagacaaggacctggaggccacaaatcccaactcagtagtggtgatgagagagtgggaccgtaatgtcttcgtagggtggcaccccggacatggtatttactatcccagcacgcagacgcctaaacacaaagtcaacttcagggatccgcaaaaccagaggctggcgatccctgagccagtctagctgctggtggccttttctcgcctctttcttcttccgcaactctttctactgtgactcagtattttctcttcttttaaatctcttcttttctccagttccctagctccgttcgtctggctcactgttttatctttgagccgggaccctccagcctgtcccccctcccagagctcccggccgcctcgtcttcccgggcagccgctccggcttttcccgctcccctcgccgccgccaccctctggccgccggcctcccaggctccaggaatcgcccagcaagatgcgggaggtaggcgctcgcaggcggcgtggcgaagccaagagtggccaggaagccggctttcctcccgc

SEQ ID NO: 32790 - DNA, 801 bp, Homo sapiens
  chr8:25902848-25903649
  hyper
cgagaggaggcggtggctgcgagcgccacggagcccggctgcagccgcgcgcgggccccatgaatgggttactacggccctggctgcgggaggcggagctgcggcccgataaggagcctcatttgcatggacgcgcgggattggccggcgcctggcaagccgggccgacgtcctccggcggcgcgcgccacgctctgcgttgccgggactccgggaggtgaaaggggacagaaagctgcgggcgtcgagtcctagcacgaaccccgtgtgcttgcgcaggattggggggcccccacaccctgcactgacttagggtagcaggtctctgcgggctggggacgcaggggttcggcctggctgcgggaagcctccctggatcctgcctctagatgtaggcttttgtagcctgccgggaggcacgttcgttcccggggttcggatctgtgtgcatgcttgtgagcgtggccacatgtgcttatgttttgcgcaaacgtcccccagagcacccagctccctgaatggctccccaggtctcctggagttccatggtgatatcagatgttgtgtgcggcttgcacgttgctgagagtggagaacatatgaaagaaggcgggggatggggtggggcggacaagcgaggggcaagtgctgctcaaatacagtgctggggaaaacggtccaggacctaaggaaaacacccgcgggcgggcgggcgcgagcggcagtcgcacccgtgtggaggagaggttgctgacagatcgaggcgggctgagtgcgcgagcggccggggagtattcccgc

SEQ ID NO: 32791 - DNA, 798 bp, Homo sapiens
  chr8:25903657-25904455
  hyper
cggttccctccccacctctccgttcccgaagcccccggtagtgggcggggagggacgggggagtcgtggaaacttcgcccaccgcgcgcggtcgccgcggtgctggccgcgggctggtggccggcaggcggtggcagcagcctcaccgaacagctgaaaccctagacggttttttaactgcgcggggctgctcgcggtgcctattaaacatcctcctggctgggtgtcattttcttgcttctccttttgtattctgatctgcgcatagatctgctgctgctgaaatctagaacaccagcgcgaaaacagatttgaagacaatgaatgcaaatctgtgctcaaagaccatctgccgtggaggagacaatcagctgttcgtagttcgagcgattgcgccccagtctcccggtctcattacggggagggcatttgcgagcgcctggactgcgttcagggcactttctcccctcttgggtctcagatttgagagaccagatcccttaggtgtaggtgagcgctcgcaaatgaactgctagagtttgccgctagaggacacagcgccttgcaactggtttgcctaggctgacaggaagcttgcacttcaagaaaactcggctctctcgagaaagggaccggtgcgcgcctccacctccccaagggacaaaccgcggcaccacgctgcgtgcgcgggattgcgactaggaagtgctggtccgaactgcggagattcgcttgaaaacggatagggggttagggagtttgcggggcgggtgcacggaccgtctctgcacaggcccc

SEQ ID NO: 32792 - DNA, 985 bp, Homo sapiens
  chr8:26723721-26724706
  hyper
cgcaccggtctgtccaccagccaagctggcttgagagccaggtcccgagcgaagccgggagggacccgaagacagaaagcgacccaggtctgtccacgacgcctttccaagcctcactgttggccacccgaggggctccagctgccagccgtagcgggactggcgggggacggggtggggaggacgtccctctgcagagggagctttgcaagtgacagtcactgcggattttgcaggcgtaaacattaagccggcatgccagcgggcaggggccgccttcgattttctgggctgggggccaccatctgcgtaagaaacctgggtttccacaactgcgaacctaccgcagggactcggcaggacagcgcggcgtgaggaagtgcccaccttgccttctggggttgggccctgaggtgggacctcgggcaaagactcttgttaaaatcgcaagttggagacctcacaggtggtattaaaaacgtgccactgcagaaacccttttcctcctacctcgagggtgataaacacagggttaaaaagacacttgttcagtagaaggcaacttcgcagaagatgtaagggaatcgggggtggggtagaggggccggtataaaacctggtggaaaaagcgggaggcgctgggaaaagtgggggttccgtctcaccagacggcgggggaggtctgccctcacccactcggccctgcgggacgccggccccggcgcactcacctgaagcgccgctgctgagccaccagctcgcgcgcgggggatgtggacccggcttcggtcccgggagctgcctgcctgctcttctctggaggcggagaggggaccgtgtctccgaggcaccaaatccttgtccttttgcacccgctgactcacccctccaccactgatgtctttaagctcctgaaccgctgtcactttacctgcattttttaaaaagagtcaaaataagaaaagaaaaaaaaatgcagataacc

SEQ ID NO: 32793 - DNA, 1797 bp, Homo sapiens
  chr8:32405171-32406968
  hyper
cgcaacctagcatctttaaggttcgcttagcccttcctgtgcacctggaaggaagccttatcttaaactcccttccacctagagtttattttcgcctgcgtgcgacagggcttttgtacttaagtgagttaaggaatgaaccccgaactcttctgggaaagccaccaacgttccccccgcacccctcccagggttcctgaccacggagactctgcttggggcacaggtgtgggagtcgcaaacttttctctgcgccgtccttttccgcgtggaatgggacggagcagccctcccaggcgctgcctggctgcggaggggagcgggcagcgagagcctcgggtctccgcctgggttcccgggtctccggggcgctggcctcggtctccgcgcagcgtccagcgacccctgtcgggggttcccggcagccgcgccgccaccccccgcccggccagcgcgggaggaaaaggggctgcgcccgggagcgccgagcccaggctcctcccggtggcgtgtccgcgcctcggggtgggggtgtggtggggaagagggagggggcgaggccaggggagggtgcgaaggaggcgcctgcctccaacctgcgggcgggaggtgggtggctgcggggcaattgaaaaagagccggcgaggagttccccgaaacttgttggaactccgggctcgcgcggaggccaggagctgagcggcggcggctgccggacgatgggagcgtgagcaggacggtgataacctctccccgatcgggttgcgagggcgccgggcagaggccaggacgcgagccgccagcggtgggacccatcgacgacttcccggggcgacaggagcagccccgagagccagggcgagcgcccgttccaggtggccggaccgcccgccgcgtccgcgccgcgctccctgcaggcaacgggagacgcccccgcgcagcgcgagcgcctcagcgcggccgctcgctctccccctcgagggacaaacttttcccaaacccgatccgagcccttggaccaaactcgcctgcgccgagagccgtccgcgtagagcgctccgtctccggcgagatgtccgagcgcaaagaaggcagaggcaaagggaagggcaagaagaaggagcgaggctccggcaagaagccggagtccgcggcgggcagccagagcccaggtgggtgcgcagcgcggcccgggccccacgatcctcctcctgctcctcctactcctcctcctcctcggatgccgtggcctctccctccccctctccctcgcccgtcctcttcgccctgcgctctgagcgcccgttgagtcgcgcggtgcttcccctcctgggggccgccgctcacctgggcgccgagtcctaccgggcgcctacgcccagagctcagggcaagggacagcagtcccggccgcaccctcccagagtcccgggagcgcttcgctccctggcacggcccctccccagcgccttagcggctgagcccagcccgggagtgggacctgggctataggagtcgaggctgcgtgcgcgcgtgccccgcgccataagcgctttgcacgggggccgtgtgccctctagcgggaaacgctggaatgggccgcctggagggagagccggtcccctcggtgtgcctggcagcgcagaagtgggtggtcgagcaagaggccgcgtgggaagttagcttcggcgttttggggcacagggcaagcgatgtagagtgcgcgccggttcatcttgattcagtcctgtgctacggagactcaagagcagcggcagggattcctaaaggtcagc

SEQ ID NO: 32794 - DNA, 1274 bp, Homo sapiens; identical to SEQ ID NO: 29469
  chr8:37552902-37554176
  binary

SEQ ID NO: 32795 - DNA, 1666 bp, Homo sapiens
  chr8:41165698-41167364
  binary
cgctttgggtttttgttttttcctcccgtctcagaggttaaaaacttcgatagggactcggagtcctcctagaggagagggaagctcccctgttatttaaagcgcaaggctttgtttcaggtatgggaaaggcgaagttggatcccaggaagagcggctccggggaccacagcgagtccctgcgaggccaaggcgcagagctgccgctcccgggccagccccgccgtgcacctgggtcgcgaggggcgctgagcgatacctgggacagaccagacgcgcttaggaatcacgtgcacagcatgcgagcaacctcgggccctcagtccccagcaccgggacccagcggcgggcgggcgtagggtggcgcgggttctcctgcagctccggccgggggatggagggggcggctcgcgcacgtgggaggaggcagccttaccttggggcttggaggcttcggtggcattgggcggcgtcatggcgatgcagacgtccccctcggggaacttgtcacacttaagcatctcgggccagtagaagccgaagaactgcatgaccggctcgcacgagtcgcgcacggcctcgcagagccagcgacacgggtagatgggccggtccaggcagacgggcgcgaagagcgagcagaggaagacctgggtgccggcgtggcagttcttgttgagcaggggcacccagctgctggcctgctgcttcacctccgccatggtctcgtgctccagcaggttgggcagcaccatcttcttgtagcccacgttgtggcacagccgcaggtccgcggggatgtccacgcactgaggtggcttggtgtagaagcgcccgctctggtacgggccgatgtccgactggaagctcacgtagtcgtactcgctggccgagcccacggccagaagcgccgcgcccagcgccagcagcacgcccagggctgccccgcggcggcccccctcgctgcgcccgatgcccatgccggctctgcgccctgttctccgcgacgtcggggctgcctccgccgcctccccgcgcgcgtcctgccgcaaacttccagggacctccggggacaaaaggcgcagtccccagcgttgcccggctccgcggccgcaagctgctgcccggtccccccggccagtggcggccctcggcctgcggtcggaggcggcgcgggcggggaggcggcgctgcgggctgggtgcgccccggctcccggaggtgcggcgagcaggaaggcgcggggcggcgggcgcgcggcactgactccggaggctgcagggctggagtgcgcggggctcctacggccgagccctcggagccgccccgcgcagccaatcagctcccggcggggcgagccgcactcgttaccacgtccgtcaccggcgcgggagccaatcgcctccctcgcgagcgggttcggtttactagaaccagacgcggctcaacaccccttaaaaaacaaaaccaaaaatacataaataaaagggggaggaggaaagagacaaggggagaaaaagaaggggaatggatcacggcgtggggtggagagagaccagggcggacgctgtaattaactcgcattggcttgcagagaagcggggagcctggatcatacttgcaaacccatgaaattatgaagactttttttttttgagacagtttc

SEQ ID NO: 32796 - DNA, 722 bp, Homo sapiens
  chr8:49292881-49293603
  hyper
cggggctgggctccggcatgggcgcaaaaacaccagtgcggaggagttctcgggaccccccggggctgcggggccttgcggggacagccccaggcccggagctgcagaaacacccagaccccgcgcctcccggaaccacgcgtctctgtgcacagacattcctgggggcaggctcctgtcctttaacacagtctcaaaggagtcttcaaaaacaaaaagtttacaagcactgatagggaaaacagaaggatgataacaccaagagggactttcccgggagaggacggcttccagggactgagaaaggatgggcaagtgggcggggcccggcgccgtgcgggcagggctggcgccgggagtccccagactcccccgcagtgggaagcacctctcccattcacgccgggcaggacacctggccgggcgggggaggcagcgcaagggccggccggggagtacgggactcgagccggggacctgaggcaggagccaagcatcgtcgcagggcaaccagcagaacggagagggaggcgcgggggcgaaggctggcgggagccgcgctgagggcaggagcccggagccccctagggcagcgccgatccgcccgccccgtcccgccgagctgggcctccgtctgtggcctgcgcagccagggtcgccaagccgcctggaatggctcaggcttccaaaaggagcaggcgccaaaaagagctttgcccgcc

SEQ ID NO: 32797 - DNA, 538 bp, Homo sapiens
  chr8:495481-496019
  binary
cgtggccacgtccgctcgggtcaccaaggcaacggccgggagcgcagtgcgcatgcgcgccgctggcgctcaggccgcggcaaggctgaggggaaggtggagggggcacagtccgcggagcggcgcctgtaccccagcgcttcagggcatccctcggggcctgggcgccgggcatccgggactcatcccctccggcgcccgaggtcgcgggatagtgggggcgccgggaggaagcctcgcccagccctggtgggcggtggggccgctggggcctggggcgccgcgggctcggcccggactgacggcggtggggggcggggatggggccgtggtgccgggccgcgcagaacccttgggacccccgcggcgcccaggttggggctcagggcccggagaacgttttcccgcgtggctatggctttgtcagaatcaggagcgggagaggcgcccacagattcctgagggcagaaccgcctggttcccaggccgaaaggagccggcgaggcgacccccgatcccgggacggagccgcgggaac

SEQ ID NO: 32798 - DNA, 491 bp, Homo sapiens
  chr8:49782687-49783178
  hyper
cgcccccggctaaacacccccttggcgtccgcctgggggtccccatgaaagtccccgcacgccctccccggccccgccctcctcagagcgtgggccccgcgcgccgccaccgcccggccgggaggcgcggggctccctagaaggctcgggcatgtcggagggagccgcggtgcagagacttgccacgcggctgcccgggcggcgcgcgctggagcagctttgtttcctctgctcccgacgggcatcctgccctgcggaacacccacccgagccctgcgcgggaggggcggccgggaggcgcgcgggcatgcggaggggaaacagggctgcagcttcaagcccaggcaggacgcccttagtcaccttatcggaaagtgggcagcgccgcgtctccggttagtcagagccccaggtaaataaagagctcggtgtctgcggggctctggcctcagtggctcgctctgtcactccgctttccaatacacgcaccc

SEQ ID NO: 32799 - DNA, 900 bp, Homo sapiens
  chr8:53477423-53478323
  hyper
cggatttctttacttaactctcaaccgtggtaaatctaattcgcttacgacctctttccgagagctgggaatctgcagagatgctctgttttctgctgtactaatctcaggcttcccaaagcgagtgcctcgcccagctcctaggggaatccacggagccccaggcgcagggcaaaggatggggcgggatggggacatcgtacctgcgctccgggagccgctgggagtccggccggccccggccgcggggaggaaaagcaacggcttgggctccttatccgtgacgcgcgctcccctgcgcccccggggcctcccgtgggctccgtgcggggacaaagccagcgccagcaggaagagtgcgggcaaaggggcgccgggcttaaggggccgcatgttcgcaagccgggaggagagagcgggagactccgggaggatcccgacgcaggtccggagggtgcgcggcccaagagaaggccagcgggaccacagcgcggctacgcggccggccgcagtcttcaccgcgcgcctgcccttgtctacgtcccgggggtcggctggagctgcactgggactcggtcctcagtgtgccgaagcctaagcgctgcggggcgcggggcgggaacgggaggcggtgcctggggccacggggtcgtcccccaggatgagggcgtgtcccagcgcgcgggaccctcggaagtccgcgctgggccgggcgggcaccagcctcggactcagcgggtctcagggctccctgcgcaacgcctgcctcggatccggaccccgggctcgctctctggtcgccgtccccgggaggacccagtagggtaactgccgcgtcgccccggcggttctccctgggctctgtctcccgccgcctccaccccccgagcctcggggtcc

SEQ ID NO: 32800 - DNA, 785 bp, Homo sapiens
  chr8:53853387-53854172
  binary
cgccttcctggacgccagcttccgcaggaacctccgccagctgataacttgccgcgcggcagcctgactcccccagcgtccggctccgcaactgcccgccactcctggccagcgagggaggagccggcgccagagtgcgggaccagacaggccgcctaggcctcctggggaaaccgactcgcgccccatacccgacctagcagatcggaagcgctgcgactgtgcccgcaggttgaccttgccaagccctccaggtgatgcgcggccatgccgggtgaggagaactgaggctgagatcgccacactgagggctccctaaagccgaggtggaggaagaggagggtagaggaggagggcggtattgctgggaaccgccccctccctgccctgctccctgctgccccacccgagccctggcagtctggaacctggctggagtcggaactctccgcgccttcgaagggaggcccgaggacgctgccggcgcccccaggcgtcggctccgcgcggcccctgctgtagctggcgcacagccccggcgggtccccttgtcctccgcgcgctctgggaagacggtcaggcgcgcgcgtttggcgcccacccctgtgagacccgcttggcctggcgccgcgggcggggaccgctgccgaggccgccagcgcctcttcaactggggaaaacacaacaactcgggatgccccatcggagtgtgtatacacctgtgtgtgtgtgtgtgtggtgtgcgcgcgtttgcggaggcatgaaatgcggggaaagaggctggc

SEQ ID NO: 32801 - DNA, 1285 bp, Homo sapiens
  chr8:54163303-54164588
  binary
cgcccagcccccagcgctgcgctgtccccgcgctcaccggatgatcacgaacatgaccagcgagttgcccaccaagcccacgacgaacactacggagtagaccgccgtgatgatgaccgggatggccggggagatgtgcgcgggctccagctgcgcgtcctccgagccggcgctgccgttgctgtcgggctcggcccagccgggaaaccaggcgctgctgttggggggcaggcaggcgctcggggcgcaggtagggcccggctccccgcggaagatctggatcggggagtccatggtggggcgattgcagcaggaaggcgaggacaggcggcacctgcggcgctgcgggagcgaaagaaccggctggacgcggagaggcaaactttgcccgcgccctggccagcggcgctggggacccggagcctgcggactcccacccgggccgcaagtcgccgggggcaggacagggagaacggacttctcgctgcctttccggccagcaggcgcgccgctgggtgccagagaggggcgaagagcgctcgctccttctcccccagcccctgaggtgcctccctcaccaattctaggcaccggcccctggtggaactgtccccagactgcctgagtccccagggtcaagcccccttcccacctcccagcacggagctctacctagaactgcacctcgaaagcccaaagcttacctatggttcccagagacaggcgaaggcgaggttttttacgggacgccctggtaggtgctgaaccgcgcgctcacgagtcccgctcagctcttggcatcacctgctctcggaccccggccccgctctccgcccgagggctgctgttccgccgagcgcagcccccgcctctcagcgcacgtctcccactactggcggcggctctgcggggcggggcggggcgggaccggcgggacgcagccgggacgcggctgggcgctgggggcctgcgggcggagagctcgtctggtgcgcccgccccaggccggcaggtccctgccccgccccgcccgcccggagtcagcccccagctccccagcctcccagccccgcgtcccctccagccccgcaggctcgcccggcccactaactgcccgagcggcacaccgcctggtccccggccatgcagccttccccaagacctgagactgagccatttagatttagtaaaaaggaggagcatgcctatttagtgcaagtatgcacctggattttcatattgtgtctagaacttcttatctgcatagttcgcagtcaggaactac

SEQ ID NO: 32802 - DNA, 725 bp, Homo sapiens
  chr8:55366902-55367627
  binary
cgggcagcctggagttttcccagggtttgcggcgcgcactcccctcccccgcccccacagacttgctctccagcgccaacccggatctgcctaggtgcccacgggtccttcccgatcgacttgagtgtccttcctccagcccctgctttcccagcatcgaaaacacaaaagcctgccggaaatcacccagcctttgcctggtcactcaggggcccacggataagcgtggctctgattcctccaggtcagccccacggttcgccacctacccgagttaatttctgcgcccgctgaccaaaggccccaactggcaacgggcacagcttcttggtgcgctagtcgcttccttgcccagcctttagagcctcgggtccggcccaaggacccggggacgtgagcgcaattagtagccaggagccctgcgaccctggaccgtgcagtgctaacgcacccgaacggctatgcgagcggtgtactcggctcttacttgtgaaagttgtttcccccaaccccctgcgtaaatctcttgtgttgagaaaagcaaggcttgcaggaagccactccggatgtttgctgctttacatgtggcatctgtggctggctctgataacgtcccggggcaccacgtattaaagtgaagagactgaaatagaaggctccacacaccgcgcgcgggtcagcgacgtcgccgccctccacactgccccccgaaatataagacaagc

SEQ ID NO: 32803 - DNA, 971 bp, Homo sapiens
  chr8:55370128-55371099
  hyper
cggcttctgcaaaaagatgtgctttaaagagaatagaatggacgctcggtatgttcatctaaacgaccttgggcaagtacgtcgattccaaggtacaatcagccctcccagacggcttttcgagtctccctaaccccggtgggagaggacgcggcgccagagcccagctccggctagttttcccgggggcaggtgtagccttgggcgcggggccgggggaggggcaaggggcgggcgtggggttggactgggacgtgggactcggaccacggcctgggcgtgggcctaacgacgcgggaccggcccgccctcgccgctccattggccacatctgtgcagaaaaggccccgcggcccaggggcgcccgcagtgtcactaggccggctgggggccctgggtacgctgtagaccagaccgcgacaggccagaacacgggcggcggcttcgggccgggagacccgcgcagccctcggggcatctcagtgcctcactccccaccccctcccccgggtcgggggaggcggcgcgtccggcggagggttgaggggagcggggcaggcctggagcgccatgagcagcccggatgcgggatacgccagtgacgaccagagccagacccagagcgcgctgcccgcggtgatggccgggctgggcccctgcccctgggccgagtcgctgagccccatcggggacatgaaggtgaagggcgaggcgccggcgaacagcggagcaccggccggggccgcgggccgagccaagggcgagtcccgtatccggcggccgatgaacgctttcatggtgtgggctaaggacgagcgcaagcggctggcgcagcagaatccagacctgcacaacgccgagttgagcaagatgctgggtgagtccgagtcgcagacccaggcggccgggcgcgctggcgcgaatcgctaggccgatttcttaaaccccaaactgttctttgcgagcctgac

SEQ ID NO: 32804 - DNA, 977 bp, Homo sapiens
  chr8:55371121-55372098
  binary
cggccacgtcctttcttaaggctctgggttcccttcccgcttcccgccctccgaccctccaaagcagctttccgccttgctctccggctcccggattccccaggtggccgggggcgcgggtccaacggctctgggaaggcgacttcccggcacctccgggcggcgcgagagcacccttggccctgaactgggccggttgtgtccatccctcgaccccttccctagttaggtgtccttttctgtttttcgaacgaccgggtgatgggtgagcggaaagccgcttccaggagaccaaaagaaaggggtgcctttagaggacgggtgttccccaagggctcggactcaggagtcccagatctccctctttaacttcaccccggttgcgcaattcaaagtctgaggggggaggtgcgtccaggtggggccaggtggggcctggagcgggagcgcagccgataagccctgcgcccctctcccccttccttccactgtgcaggcaagtcgtggaaggcgctgacgctggcggagaagcggcccttcgtggaggaggcagagcggctgcgcgtgcagcacatgcaggaccaccccaactacaagtaccggccgcggcggcgcaagcaggtgaagcggctgaagcgggtggagggcggcttcctgcacggcctggctgagccgcaggcggccgcgctgggccccgagggcggccgcgtggccatggacggcctgggcctccagttccccgagcagggcttccccgccggcccgccgctgctgcctccgcacatgggcggccactaccgcgactgccagagtctgggcgcgcctccgctcgacggctacccgttgcccacgcccgacacgtccccgctggacggcgtggaccccgacccggctttcttcgccgccccgatgcccggggactgcccggcggccggcacctacagctacgcgcaggtctcggactacgctggcccccc

SEQ ID NO: 32805 - DNA, 1252 bp, Homo sapiens
  chr8:58906804-58908056
  hyper
cgtgcggacataggtgggagtgggggatagggaggaaatggaggcgccgaccgagtggaatggggggtgggtcagggatggggtgggatgggcatcagtagcggggtggagatgttgagagagaggcagggcttggagtggaggtgcgagaagggtggggacccggaaggtggggtgggggcgggatggaggcggggcggggtgtacgaggggcgtgtacactggctcagggacacgcgctctcggccacagcaactggctccaagttccctccctcactctccggcgaagcctgcctgagccctcccactcggtgcagaccgaaccatcgcggccgccgccagccgggcccttcgcggccgcgcgtcctgggcccgttccgccagccccgtctgctctctacccgcggccccgcggcggcgaccgtgaacactcggcggcccctacagcccgctctcggcccttcgtccctcgcgggccccgactctccctccttgcagtcccccggagcctggctcccggctcgggccgcaccgccagggactggggtgagcggcccaggtaagactgggccgtgggggccgggagagagactgctgggcgggggttgggattcgggttcagtggtcgcgccgcgccccgactgcggacaatgcgggagctgcgcgcggccaggcggcgcggagctaagccggctctgcgcctgcagcttccccgcccggcccgggtctccgttgagcccggcctcactggcccaggcggaccccgtccggctttctgggctgccgggggaggcgcagcgccgctgcctgccccgcgccccctctgcgctcggcttggctgcacgtcccgggctcggctaggaggctgggcacggggccggggctggagccggggttggagccagggcggggggaagctggccgcgctgcggagcggaggtgggctccgaaagcgcgccgccggttgctgctggaggagtgggactacgaaggatggggactccgctcggccaccgctcctgaatggtctctaatctcggtgttaaatactttatgagagtatcaataccacctaatcctttgctgagaattactgctagaaatgtagattctgaggttccgaaagtttgtttttggttaccccctccagctcctcccgtggcctcaattgtctctattttctttgaaagcatacagatttgaaatagaattaaattctccttggctcactcgtgtctccatcacccagc

SEQ ID NO: 32806 - DNA, 653 bp, Homo sapiens
  chr8:62200462-62201115
  hyper
cggaggcatttaggacccaggggaaagctaggctccgtatagaaggacagagaatcgggcgcacacgcctcctaccaaaatcacagccccttgtggagcccgagctctcattcacagctttctagagaaatctgagcccgaacctgccagaataggggatctcacccacccagttcagcagcgaggacacctgcagaaatacattcccaaagcaaggctgggcggccgtgtgaaggtatttgttaccttttttctcccctctgtatttgccgagcctccccgcctttcccccgctctttcgatgccatggctgcggcgtttcagcacttcggtatgtggacagctcccatctgcaatccctctgcactccatccctcccgcaccgcaccccgctccccgccgcctccgcggtccatcctcctcccggcgcccgctcagcctgcgcccccttacacatcagcacccccatctccaccatcaccgtcatcatagccaccatcaccagcgcggtaactatagtcacacaactgtgtcttgccacttagacaaagcccgaggtccgcagggcagagggaaagagctcaagttgacaggcataggaaggaaagttcaggtgaacaaacccctgaaaacaaagagagacgcctgtttgc

SEQ ID NO: 32807 - DNA, 857 bp, Homo sapiens
  chr8:65492354-65493211
  binary
cggaaagtcccatccccaaatccagaccagtcatcctacgaacaggggtggagtataattctcgcccggaagggtaatttagcacaagctgagacagcagtggcgagggaagggcagtggggggtggggtgcggtgggtgggggcgtctgctttccacaggactcccaggcttcgccgccgatctacaatttgctgaaggagcaaagaacatcctcggctctaagtagggcttttagtgtgctcattgatgagtgaaagtcgccacacatgtcaagctaaaggcagttgttgggttactaacaggacccagcgccttgcaaacatatgcgctaagctgtgtatacagatggcaggcagaataatggagcaggcgccttttataaagctctagctgctgcctgtcttcagacctgggaaatgaaactattcagacttgcggccagatagcgcctgcgattgtttgttaccgttttaatcctattaattaaaacgttaacctgattgggtagaaagcgctgtcccaacaggcgagtcttcttcataataacctactcagagataatgatgtaaaagactcccccgtctgtggcggcggctgtttgatgggtccggaaatctcttgaaggtgaatccaagcaagataaacggtgcggagaggaggcgcggggctgggctcagagcggcggcggcggcggctccactccctccgcgcccaccctcccaccatgcggggccgcggcccatggtgagccccagcagccagcaccatcggctggagacgaagaagaagaagaagaggaggcggcgagcgcgggggaaggcgaaaaagaaaaagaaagaaggggagagggctccc

SEQ ID NO: 32808 - DNA, 986 bp, Homo sapiens
  chr8:687561-688547
  binary
cgcgccggccgccccccagtgcgccggtgcctccctgggcgccgagtgcgcaggcgccggccgtgaagaccgaccgtgcgccgggctcgagcgcggtctgagcgcgcggcgcctgcggcggcgaacggacggacggaccgcggacggacgtactgaccccaacccgcgagccccgggagccgtcggtctgaggaggggccgcttcgccatgtcgccccgcacctgctgagcccggagcgtccgaggatgtccgcgctgaggaaggtgcgagccgccgggggctgccgggagccgggcgcggggctccgagagccgtcgaggcggggagggcgcggtgtgtcggacccgcggggacgccccgagggcgtcagggttgggggcgggggcgagcgggggtcgtgccgcccgccggggccggagcgctggggaccccagggacagcctgtgctcgggggtcgcgcgttgcgctcctcgccgggctccgcgcatccctggccgcgctcgggggtgccgggaccctgggctccgggggtgcgggagcgcacggggccgcggaggtgtgaaattctccgctctgcctgcccggggtggagggggcaaagcctggggggtgccggcgcgccaggggctacgcgcctagctccggtggggcagctgcgagcgagtgggggcggcgggcagcagactgcatccccctccccccaagcccgggtggaaacgccgacggggactgggaatgaatgaagggtgccgggctgggctgcgcgcacgggggctcgcgggggcgggggcgaccaggatggggcccttgtgccgggcagcagcggctgccgagaccaggcggagtggagggtgcgcgcagcgagggggtggccgccgcccggctctccaagtgcgagcgaggagctcggggtcttttttaggggtggttgctaagcgaggcgctacccagcgcagggttttgtaactaagcctcccccggcagc

SEQ ID NO: 32809 - DNA, 958 bp, Homo sapiens
  chr8:72459564-72460522
  binary
cgtcccccgacgtcccaatcagttaccacctccccgaaggaaaacaaaccggcccttgacacatccctccacgtgcagcgcccgacgccacgggccttgggcggctgcacctctcccctgccggccacggctcaaggccccattattgcgcgcacccagctcccttccaggtgactttcgcgtacctggcggcggcgccctaggcctcggaggctgcccgggcgggctggggctcgggcggcgctcgctgagagtcgcggcgcccctcagccgcttcccgggcgccgatcgccgccctcctgccccggggtggggcccaggggcatcagcagccgcgggctctcggccgccgcctgggaactcagggtcagatttagtttcacaacaacgtctcctcgtcacggcaacccaactggaggcagaagccggcggggcggccgagcggggcggggcgggagcgcggccgccgcgagccacggtggggagcgggcgcgggggaccctggcgggccccgggcagcgcggctgcacttacttgtgtcacaactgcggcgacggggggctgaggaaccggttcttccaaaagcaaaccgaaaatgggtaacagagaggccggggcagcgctaagaggggttctgcctcggtgtttagggcaaaaaacccggctccggcttccagaaattcgagccagcggtggctttttctttctttcctctctaaacgctcctgtgcctccgggtcgaggggcgcccttcgcgcggctccgagtgcacagcgacaccagggctggcgctggagaggggagccctcttcccagcacccctcgggtctcccccgtacccccacccacagcccctttcctgggcccgacgcccctccgctctgcagccggagcctgggcctggtgcccactgccccgcggggtgtctcggacgcctggcccctgcagcgttttctac

SEQ ID NO: 32810 - DNA, 801 bp, Homo sapiens
  chr8:74005054-74005855
  hyper
cggccggcgccccactctcggcctgaccacccacctgggcacgccctgtcgtagtcgaagcagcagtccccggtgaagcgacaggcttggtcgcagaaacacgtcccgtagaccctgtccagcctccagccgcgggcgaagcaggcggggtcccggccgggacagcagcgcccggcctcggcgcagccggcctgggccccgggccacagccgcgacagcgcgcacagcgccatccacagggtcctcatggccagggctccggcggcgcctgcgacgcgacagacccccggggcaagcgctctgatcctcggctggccgcggcccgggagctgcccgagcggccggcgaggcacagccgggccctgccctgcgcccggcccccgccctccgcgccgcccctccccagccctggcggcgcgcccgtcgaggcccgggcgggtggcggggctgccctgcccaggtggggagggcgctgcagttcccgggacgggcccgcaatcgacggtccgggcgccacccactccccgctgccagctcgcgccccagctccagcccggggacctccggggcgcgggagcggaaaagcaggtgctggcggggcgggggtcggggtggggtgccggggcgtagccaggagcccggcgggggaggccacatttcctggctctaaactgtacttctaacgcctggggacacattaacgagcgggcattttcactctaaagccatgagaccaagagcactcgatgggcaccaaacgtgtctcagcagcactctgcgcgggccaccccgccttcgccc

SEQ ID NO: 32811 - DNA, 1371 bp, Homo sapiens
  chr8:77594109-77595480
  hyper
cgctgagggagggagggggcactgagggacctgattttccactttctttaggggggctgcgtttttccggatttaacttttggattaagtggcggaggatcatctacgtttgcttgggcagttttctctccttttccctgtcttttcgggttttgccttccccgcgagccccgggcattctagtggctgggggaagctgtcagctccgcaacggcgcgggcactgccaggggtctccgctcgccccgcgcccctgcaccccgatcgggatgactggtcctccgcactcatcctctgaaagtttggacgttggtcggtggggctgggagcccctctctccctgctctttccctgctttaccctccaccccccaccccaccttattcagcctcgtttttcttcctccttttaccacccgcccctcttccccttctcaagttccccgaaggtcgcttagtgtgcggggctggcggaggcccgggggttcgtgagctctggggaggggattccaagaggctggggtgaacgctggggctggggctgcaggtagacacccgcccaccggagcgggcgcggcaggcactaccgagggctgctctcggcggcgcgggcgcgggcgccgcggaggaaaggcaggtccgttaggaggcgggatcgcccggcctctgggccagggacccgcgaggcggcggctgcttgctccgaacggaacgccgccgggtgtgcgttagaccagcggatagacgcccgcggcttggggtcaagaatcttttcctttttagcaaagggcaaggggtgtgtgcgtgtgcgtgtgcgtgtgtgtgtgtgtattgagtggctgtgttcggctgtgagaaccgattcattcttcggcccccctaaaagggttccatgcctacaaatgaacttcacctccttcgtttctccaagcatcaagtgcgccttctggctgggagcagctaagggaaaagggactggaatgcgccgggtctctccttccttctacttctatccacccccaacccccttctcgctcctcttttctatcagaaaaaaataataaaatctctcatggaattgtataaagtttctctgccgatgtccaagttacagaaggttccctattctaatccccttcccctagaagacggtgcactggtttctatttcttttgttacctgtgatccgggcggggggctcctttcggccgctcgggctggggtccggcccagagaggaggcttctgcgggcgcctttggccgcgacttctcacttccgcgcggttctggtgaggttttagctaccgttcggtgagacaccctccttgtaggtaccaaaggttcagatcgcaaacacggaccccccccacctc

SEQ ID NO: 32812 - DNA, 917 bp, Homo sapiens; identical to SEQ ID NO: 29481
  chr8:81785915-81786832
  binary

SEQ ID NO: 32813 - DNA, 922 bp, Homo sapiens
  chr8:91094269-91095191
  hyper
cgcgcctgctggagctcctggatcaagttctgcagctcctttccttccaggtaaccacttcctgcaaagacaaagaggcacccaggtgtcagatatctcattccaagtgtctttcccgttcactttccaagacagttatctttctggcgacccgagaggctctctcttgcctggacgttgattaaccagcaaagtgtacagacggtgaagcgctcccctcctggggtatcaaactttagatccactgaggacaaaggaggatggttggggtgctaagcgcagccacagaaactttgggggggcagcattccccaatccctgctctctctctcctaccattaccgttcctggaaagacaaaagtttaaggttttgggattacggtggaaacaatataaactttcaggttgacagtttggcggccagtcggggagataagaagataagattaggcagaagggggaagaagtaaagaatagaaaggagggataatgggatcaggaggctcagaaaagggcaaagaatgggaaggggcatggaaacgggtcttgaaacagttaaaaagagaagataatcaccgtcagcgtcgaaatggagccagatctcgaaaaactgtgaggctgtgatgagggatgactgcaggtgggattctgccattgtacagcggggtgtgtgtctgggtgtgtgaatatgcgtgtgtctgtgtccgcgcgagggggagtgagcaaaagctcagcgtgtgcgcgagtcagggctgcggagggagacctgggcgcgggcgctgccgggcgctgtcctcggtgctgctcagctcagcgttcctccagagttctctccctacaccccgcacccagttctcagtatttatcccgacggccccaagccgggccacgcctcctccagcctcccattcctcactcccc

SEQ ID NO: 32814 - DNA, 764 bp, Homo sapiens
  chr8:95651257-95652021
  hyper
cgcacggggttccgcgtccctgtgaggcggcacctcctgggcccagcagagctgagcacctgggaaccgcgcaccgagagccccacggggaggtggttagggggaaccggctcctccaggcggcctcgcccactgcaatgcaatctgggtggtttttccaggtccctccctgcctcgttccgcgcccagtccctgcccccgcgacgcccgagggcctggacgggtagctcggagttaccggggctggggaggagcgaggctactgcagtaagccagccggaacccatttatgactccgcactctgaagttcaggacagggaagcacccacctctggaactcaagcagtggacgagggaggtcccgagcgccgtcgcagcgctgcgagtgtgggaccctggccttcgcccgctctcaggggacgagagctgccacctgtatcacgggaggccccgcctccgcctgcaccttctcctaccaggaaacgagacggcgcgggcctcgggctcctctcccccctcccgggagctgaacccccactgggaaagccaggtctccagcttcccttgacacgcgtcttgaaaggttaccggatttgtacccggagtgggttctgcagggataggtgcatggttgcccgtttcacatcatgaatatgaacggggctggacacctagagccgaattattaatacttcagacagaattctgttcccaagaacaaatcgctttgagatataaaacccgagaaaacttcacctctggc

SEQ ID NO: 32815 - DNA, 813 bp, Homo sapiens
  chr8:95652747-95653560
  hyper
cgccgcgccctgggcagctccgcgccccgggcctcacctctggcctcctttcgcctccctgcacctggccttttcgcttgaccgttcagaaccttcggcttcgttccctgcagccggtattctccgagcccccctgcacctctcagttacctccagtgggaacccctccccccagcgactccgagccctttacctctctgagccctttccccgtctggcctcgtctaccctctgggtgtcaaccgcctcttccctgcccctcacgtctccccctcctcctcccctgccctcgcctctccattcatccagccattgtctcccgccccttcctccccctcccgaagcggcctcctcccccaccgctgccacgtcgtggtttgaaggagccaatgggccggcgccgccaggtgtctcttacctgcaccacgtgggggagggggaaggggcgggcaggtaaagccacatcccaaaacagaaaagctttcagccattgcgtgcctcccggggggggcagccttgctccaggctttttgcatagacgcccgggcaactgaatacaaaaagggcaggcctcctgcgccctccttcccaccccccttcctgccctgggcgtggagcaccgaccaggtgtgggcttgggtggttggttaccgccttttgcactagcagtagcaaggaaggggggtgggcgctctttctttttctcttagaagagggtttagcacaggttttttcgttctcacttccacaccaccttaccgcctcccgaccccccctctccccctccccacctatcgtcatgacggcctctcc

SEQ ID NO: 32816 - DNA, 846 bp, Homo sapiens
  chr8:97156910-97157756
  hyper
cggggtggagccggggtccatggagttcatcagcgtctggatgatggcgtggttggtgggctccaggtgcgagcgcagcgggaagtcgcatacaccctcgcagtgataggcctcgtactccaggggcgcgataatccagtcgtcccagcccagctccttgaagttcacgtgcaggggcttcttgctgcagcgtagcctggacttcttgccgtgccgcttgccatggcgactggcgaaggccgtgcgccgccgccggcggccgggcgagggcagccaaggcctggcatccggggcgcccgacggcggcggccacgacccctcggcgcccgcgcccgggcccgcagcctcggccgagcccagctgctcgcgcatctctgcgaacaggttcttgcgctgggatctggtgaataccaccagcagggcccgctcctggggaggccgcaccctccggccgaagcccagactccgcaggtccgggggcggcggttgctggggtccccgcgcgcgcgcctcggcctccccggcgtccagctcgccccatgcggcccgcagctccaagcacagctgcttccagggctggtggcgcaggccctgccacacgtcgaagacttcccagccggccggcggcgccccctgcgggtccagggtccgcgcgtccagcagtaggggcgaaaggcaagggaagagctgcacgtggagcggcccggctggtggcccccagggcgctgagggcgcctggcgaaagagccgcagctccgcgcccaccagctcttctttgtctgagagcatggacacatcaaacaaatacttctgtctccggagaggagtgtgcgagagatcgtctgc

SEQ ID NO: 32817 - DNA, 1485 bp, Homo sapiens
  chr8:97172008-97173493
  binary
cgacgccgctcgcggactagttcctcagactgtgggactccctagtgccggctttgcccagggctttccaaggctgtctcatgccctagatctgccccagcagctcaggccttggactgcgaacccagtatcccgagacaccgattccatcagtccccatcccgacccctctccagccgggttcatccgcctgctgcctcccgtcctccacgtttcccccaccagccaccaacaagcggcaaccacgctgccttctgcaaaagaggaagaaggaaagaagggagagagaaagaaagggggggaaaggaagggaggtttagagactggaatagaatccgcagccacattcagaaacttactcgagcttgagaaaaacaatttaagaaaagtaaaaaggaagtgtccagagcaggaagggaattcacaaatgtagcctccagcgggaacagctccctggctgccgagctccagcgggaggggagtcgagcgttttctttgccacttacctagtcccctgtctacaaagctggtgatcgtattagccgacttggaagactggaaaaagctggcattgatgcccagcttctcagcgatggagtaagtcctgtagattgacagcatgtactcgtggggcaccacgcgcggacccctgcctggcggctcctgcgcccggggctgctgagcccggggttcgtcctgaggccgcggctgtggttcctggccctcccggcccgcgtcactgtcgcgcggcgcccgctgcatcttgccttccttgcggcttcgcatgcccttggtggaacccagctcggcggacgacgaggaggatgagatggaagcctgctggaaaccgggcaaatcccacagaaaactgatgaggaagacggccgagagcaggaccctgggagtatccatggcgggcaagtggctgcgtctccccaggaggcggtggcggcggcgcaggacgcgcggggcacggagcggctggacagcggccggggcccggctcctcgggcggactcggagtgcgaggagccgggtcccagccacacaaaccccggccccgccacgccccctcccgcccctcgccgggaggggaggaatggggagggagggcagaggaggggtggggagggtgggaggagagccgggtggtgcgggccggaggtgtgggggagaggggccgcggtgcgccggtgtggcaggaagacgcagcgcccccgcgggacgcgcgcggggttgccgggcggtgcgcgcggcgcgggccgcaagcgctgaccgggggaaggcgggcgctgccggcccgtggccggggagcaaaggctggcccgccgcgccagggtccccctcgaactcccggaggtgtggtccctccgcagcgcggccccggctctcggtcctcgccagccgcctccactttcctgggagcgagcggccccggaggagggaagcggcggcggcgcccccaagagacagcttggagcaggc

SEQ ID NO: 32818 - DNA, 188 bp, Homo sapiens; identical to SEQ ID NO: 29489
  chr8:98787253-98787441
  hyper

SEQ ID NO: 32819 - DNA, 192 bp, Homo sapiens
  chr8:98787788-98787980
  hyper
cgcaaggaactagactaaaagaatctcgacccttgaatggagttacacgaacggccagatgaaagaaggaaggcccggacctccactcagggccgactaggggactggcggagggtgcacgctgatggatttactcaccgggtgcttggagctccagcagctggctggagcccgcgatgacgtcacggactc

SEQ ID NO: 32820 - DNA, 691 bp, Homo sapiens
  chr8:98788300-98788991
  hyper
cgcaccggcaccatcctgctcggcgtctggtatctggtgagcgcggcgcgcccggcccgggaccctgcgttgcttccgcgcccctagctgggcttctggcccggcctcgcggtggggtgaggcgtgcgctcatccgcctaaagttgtattattagaaacttaattctccgggtgccgcgtccgcacttcccccggctgggccagcgccgactgggggaggccaggagtttggggcgatgggggaggccaggggcgcggggcggagggccgcactcgacccttggcgcccaggtggtgtgggtcgccgatctccagcctccgcgcagccccgcggcctcgcgtagggcgcaccggggcagacaaactgagcttatctgccgagcacgtgtttcctttcttcttaaagcccgtgggctttgtgtttcgacggctgcggacggagcggtcgcggaggtgacggcgcatattttgcagctctgtggttagggttgcggatttgtcaatgctcgttctccctggccgcgtctccgctagggtggcctgcgctttcacgccgtcgcacgttcggatcccgagttgaagtggttgggagttcttggcatcctcttgtgaatgggtcccccccccgatgttttaaagcccttactccaggaagggatgtgagtgtgatttactgcgtttccatctgccc

SEQ ID NO: 32821 - DNA, 931 bp, Homo sapiens
  chr8:98880996-98881927
  binary
cgcactcccaacccgacaggcccctaaagctgcctgtgttccgtgcctgcggctccggacccctggagtctgatgcccgcctgggctcaggcacggacggagtggagccaggtggcagcaggcagggcgcgccgccagagtgcccagctcccggggctgcccacagggtggggccgccctcgccgccgctccctctccgcgccttccccatccccaaagaggacacccctccttccgcccggcccgctccccacccccgccgcggcaccgcctccccagccgcccgcccttgcccagcgcctcccaggcagccagcgagcgaagggagcgctctgggatgggacttggagcaagcggcggcggcggagacagaggcagaggcagaagctggggctccgtcctcgcctcccacgagcgatccccgaggagagccgcggccctcggcgaggcgaagaggccgacgaggaagacccgggtggctgcgcccctgcctcgcttcccaggcgccggcggctgcaggtgagcgcggcgcgctttcccccggctctgcgcggccgggcggcctcgaagtgcaggcggaccgacccaccgacagaataccgagcctgggctgcccgacgcgcaggcgccctccccaggcccgcactgcagcccccagcgccccggggccccggcgccttcgacccctccgaggacagggggagagggagggcggcgctgcccgacccctcggccgggagagctgggcgcgctccctgcgcaggacaagccgcgctgcagccgccccggagtgccccgtgggggcgctgtggcacgcagcggggacgcccagaccccggccaccgcgacccagggaaagggagacctgttgagcgggtatgcagggtgattcctattccacggacagccgatggctcccccttccctcttc

SEQ ID NO: 32822 - DNA, 1263 bp, Homo sapiens
  chr8:99438692-99439955
  binary
cgaccagaactcagcgactcccgcccccgccgtgcggcctgcgctcccgccccccgcgtactaagccgatctccaccttggacttcccggccccctcttttcccctccagctcctgttccccaacaaccccacccccgggcttcgggaaacttttcttcaggtccctaaaaggggacacctggagttcctccggtcccgccctgtccccggacacgcgcaagccgccctttatttcccagcccagctcccgccagacccagcggggaaaggtcaccgtaggcagccccctgcctgcgccctgggggtggtgataataacagctgtcaccgggggatggtcggggggaagggagaggtgtcggccccgcgccgagccgggggcgcaaggtggtcgcggtgacgcgccggggaagcgcagagaagcagcggcggcggcggctgcgccttccgagcccgggcggcggccgaggcacgcggagctgtccgttcagcaccaccgcgccgcgccccgcgcagggcgggcgccccgtcacacccgctctgctcccgccccggctcacggggcgaatgcggcgcgggttcctgcctctctgggtgggtgaggggcgcgcggatccggagagggggctccgggagcggcgggaccacgcagccacctgtgagccttcggcagctgcgggcggcggcggcgtacccggcccgagacgggaggagacgctcggcggcccccgcccgccggcccgccgggcgcacacactcgcacccgcgcacgcaccgccagcaggcagcggccaccgccgcgatgctcgcccgcgggttggggaagtttcccgccggcctcggccgcgggcacccgtgctcccaggtaagcgcttccagaacgcgcagggcgagcccgggcagccccgctgggtgaggcgcagcgcacgcggccccggggcatagcgccaggccggcagggagacctgggccggggacgcgggggctgcaggcgtgggatctggacccaggggaggccgggccgcccccctcattcccgcggcccgggtttccagactccagcgcatcccccccaccccaccaaagctacgcgccccccgtgtcggcccggccctgcccgtgcgtatctcagctccggtcccgcctgtctgcggcgagcgggcgggggcgtctcccgggcctgcccatggacaaggtcagcatgcagccccctgggcgctcagagccgcggggacgcgaccccgcacgcgcaaagcgcccacc

SEQ ID NO: 32823 - DNA, 1998 bp, Homo sapiens
  chr9:100614615-100616613
  binary
cgctgcgggaaggggctgcttggctgcctctgggggtcttcagagctaccctggtcccgggggattggaggaggaggttacctatcctgcgtcgtctttaatccgtgcaccactatccatcaaatagagacagatcctgggcctctcaaagacggatgattgggggtggtgattggcctatccctaaatatctaccacgcaaggactcttgagagatccagaccccggtacagtcgagggacctggggcccaaaaagggaaagcggctacctctaccacacagttgggaagcgcagtcctaaaggagacgcaggttggagactccgctaagcggagaagccgcagtggggccatggcaagtcaccttccctttcgggcctaggaatactcattcgaaagatggggggactggagtgccgagtggctgtggcagccacgattggggtttggaaaccatcctgaaaggcccggggagccagtctcctggaacttctccctccccattcccacaaaaaccaagcgccctctcggccaattctcaccctctcaggacaaaaaagtgagatgagcccgtcctttcacctgcgagtccaagcccttggcagaggcctgaaaagtccgaaaactccgagttcgggcgctgaggtctcccgagccggttcctgaactctccgggcctcagtcgatcggggtgcggagggggccgacccgggggatctccaagcgccctccccgccctgacgctgtggggctcctaccgcgccgccacagctgctcctacctggggaggtgcgcccgggccccggggggcgggcagtcggggggcgggcagggaaccggtgccgccccacgcttcgtggcccctttaaggaggggaagccggcggagggaggagccggtccggtgtgtgcaggggagcgcctcgccagcggtccgcagggctggagacccacgccgtggagaggaccagcctcaggtcgccccgcctgggcccgcgccccgacctcgctgcccccgcctcgcctctctgcccgtggcgcttacggccaccttggcctcgggggcagggcatgggcggcccccgccagatcgcccagcgccagtactaactgccctcgctctggccttcgagcccgaagcctcttctgcgcgcacaacctaggcagtaatcctaaactagcgggcaccacagaccagctgcagccaccccaacccagggatcacttccggacccctcgaccgcccggcaccagcgcgcaagggacccttcagccggagaccagagtccagtcccggtcacgaggccaccgccgctgcccgcctcgagaagcaccacgcgggctgagccgtcggctagcgggtcactcccgagcctctgtctgcaccgcgccagccccagaccacggacgctgagcctccagcgcgtgccagcctgggccgctgggctctcggggccagcccgcgacgatcccctgagctctccgcagaagggccgagcgtccgttccggggacgccaggcccgcccccgccccccgacagccgcggggatccagagcccgggggtgcgggacgcccgcgccatgactgccgagagcgggccgccgccgccgcagccggaggtgctggctaccgtgaaggaagagcgcggcgagacggcagcaggggccggggtcccaggggaggccacgggccgcggggcgggcgggcggcgccgcaagcgccccctgcagcgcgggaagccgccctacagctacatcgcgctcatcgccatggccatcgcgcacgcgcccgagcgccgcctcacgctgggcggcatctacaagttcatcaccgagcgcttccccttctaccgcgacaaccccaaaaagtggcagaacagcatccgccacaacctcacactcaacgactgcttcctcaagatcccgcgcgaggccggccgcccgggtaagggcaactactgggcgcttgaccccaacgcggaggacatgttcgagagc

SEQ ID NO: 32824 - DNA, 982 bp, Homo sapiens
  chr9:100616625-100617607
  binary
cgccgccgcaagcgcttcaagcgctcggacctctccacctacccggcttacatgcacgacgcggcggctgccgcagccgccgccgccgccgccgccgccgccgccgccatcttcccaggcgcggtgcccgccgcgcgccccccctacccgggcgccgtctatgcaggctacgcgccgccgtcgctggccgcgccgcctccagtctactaccccgcggcgtcgcccggcccttgccgcgtcttcggcctggttcctgagcggccgctcagcccagagctggggcccgcaccgtcggggcccggcggctcttgcgcctttgcctccgccggcgcccccgctaccaccaccggctaccagcccgcaggctgcaccggggcccggccggccaacccctccgcctatgcggctgcctacgcgggccccgacggcgcgtacccgcagggcgccggcagtgcgatctttgccgctgctggccgcctggcgggacccgcttcgcccccagcgggcggcagcagtggcggcgtggagaccacggtggacttctacgggcgcacgtcgcccggccagttcggagcgctgggagcctgctacaaccctggcgggcagctcggaggggccagtgcaggcgcctaccatgctcgccatgctgccgcttatcccggtgggatagatcggttcgtgtccgccatgtgagccagcgtagggacgaaaactcatagacacatcggctgttcacacgttccccgcaatctgagaacgaacaggaatggagagaggactcaactgggacccacgtggaaaagaccgagcaggccacagaggctcggtctccccgcgcacagcgtaggcacccggtgtactctgtaaacgggaggaggtggggcgaggcagccagagcccttggactggcacagggaccctcgatggagcgaagccctcaaacgggatgctttctggtattctatcggggagggtccttggc

SEQ ID NO: 32825 - DNA, 855 bp, Homo sapiens
  chr9:104248306-104249161
  binary
cgccctgcggtcccccggagagagcctgggccgagcagaggatgcgggtcacaacgaccctgcaggagctcacgccccaagacaccgcgagcgcagtgcgacactagcgacgccggagccaagggccagaaagagggcgagacacacccaggtggatctaattaaccctccctcttggaaaaagaatgggggacgatgtccagggccctggatctagtgtctgtcgctgaccttgggcagtccctgccacgcttgagcctcagtttcccacccgtaggccgagctgaccgtctccatcgctgcgctccttcccttctgctggtttttcctggtcctgggagggacgccttcctctgcccagtcgccctcccccagcccttggctgcgaggtcgcccgcagaaacccaacactgctgccgcgctctcggcgcgcccggcgaacctaaggtgtggacgcgccgcgagggtcccctgcttgcgggcggccattaggcgccaggccccttggcgcttcggccctgctaggctcggcgagggtcttacccagactggcacgcgccccgctcgcgtccttctattgacctgtcagcgcagctggcgcaggcaagggccagggaggcgcccccgagacactcaaccatccccgcactgatgcgggcccctgctgccctggggacccctgcggggtcctcgcaatcctccggcaggaagcggtcggagctgcgggcagggccgctaggcaacccgcctgcccgaggcgcactgcccggggcacaggccctctgcgatgactctccccaacccccagctgccctgcttgtgccagctgtggccacccctaatccttgtcccctc

SEQ ID NO: 32826 - DNA, 875 bp, Homo sapiens
  chr9:109622327-109623202
  hyper
cgtggaggcttggagaggaggtttggtttccaaggattggagcgctgtgaagggcggggccattccaagtccatctcccctttttgtcctcttctcccgggacgggagggtggagccaagtccccccgcggccggttcgggagctttctctatctcggtcgctcgaggtgagtgtgaaagggcggcagcccgtttaattgcagcgcaggttaatttcttgagttcaccgcagtcggtccgccagccgcttccccggtctttgccaagtgggtttacgaggtctgaggcgtgttggggcgcgctcacgttctcgcaaaaggctcctccccagggctcaattccccgactgcgggaagccctttggtgccccaggagccttggaaacccaaggtttcctctgacctcgtcgctcctttctccctccccaccgcctggttccctacgtccctgcccccagggaaggacggcccccatcttaggacttacgacccaagccaacccagaaggtaccttcacgtcgatgaagattttatcgcagcctccaaaacccagcagtaataggagctttcaacctgaaatacgattgttattttcccggtgcagagcttgacagaaaaagtcagctttttattaaagacaaagaggtaaattatcagccgggacagtggagggacggcggagacctggcgcgcttcctccggttgccacgaggaatttatggggtggcggcggccagcgctcagacaccccccgggtcccggtggggaggagctcggggcaggaggacttccctaggtccctccgggcactcggaagggggagtcctcccaaagccgcacaaagccgggatcatttcaatccggaacagcctcagc

SEQ ID NO: 32827 - DNA, 950 bp, Homo sapiens
  chr9:110249882-110250832
  hyper
cgccaccaccaccgggtggctgccgtcagggctgcctttgctgacgctgatgaccgacgggctgccgtactcgctgccaggggcgctcagcgacgccttcagcacgaacttgcccatcagcccgccacctggcggctgcggctgctgcggcggaatgtacaccgggtccaattctggccgcaggagctcggccacgaagccgcccgaggggctcacgtcgttgatgtccgccaggttgaagggagccgtcggagggggagcggactccctgccatagaggaggcctccgcccgtgccgcccggcgccacgcccgggtcgttcccggcccggatcggataggtgaagctgcaggtggagggcgcgctggcagggccgctgctcgacggcgacgacgaagaggaggctgacgctgacgaggacacggtggcggccactgactccggaggatgggtcagcgaattggagagaataaagtccaggtccaggagatcgttgaactcctcggtctctctccgaggtaggggcgccaggttgctaccgccgcaagccgcaccggctccgccgctctccaggtctgtggccacggtcgccgccgccaggtcataggggcggccgggaagcactgggggaagtcgcttcatgtgggagagctcctcccgccagcgctgcggggacagggcgggagagacctgtcagtggtggtcccctgttgccacccgacatactgacgtgctggcgggccacgcgcgactgcaccgcccagacatggggactggtcaggcaggaagcacccgggaacccagggcgccagcgctgcaatctcggcccactcccgggtcgaagaagaggtgatgcgtctgtattgcgggtgttatgtcctgtctgcccaattgcgtgtgagcgagcgccgcggctggtccctccccctccaggtcccgtggacgtcccc

SEQ ID NO: 32828 - DNA, 949 bp, Homo sapiens
  chr9:110251832-110252781
  hyper
cggagctgcgaactggtcggcggcgcaaggcgcggactccggtgagttgtgtggagcgcgcgcggccatgggcgcgggccacgggcgggtgggagggtggggggccagaggggcgggggagggtcactcggcggctcccggtgccgccgccgcccgccaccgcctctgctccccgcgcgcccgcagacacgttcgttctctctggtcgggaaactgccggccgccggcgcgcgttccttacttataacttccttcgctacagccttttcctccgccttctcccatgccccgcccctccctttcttctctccgccccccccgaggctcccttccatcgttgctatggcagctaaatcaacaaactcggcgcacgtgggggcgggggaggggaaggaggggcgcgggcggggctgggccgggccgtgacgccagccaggcagctggcgggctggagccgagctgacgccggcggcagtggtgtcggcggcggcggcggcgtccgccccagcgcggggcgcgaggaaccgggcgcaggttcggtcgctgcgcgaccagggccgtactcaccgccattgtcggctccctgggttcgaagcccgcgaagactggtggggtcagcgggcggcacggtcacgcgtccgcacccctgctagcatacgcgcttgccgcgctgtctgcgcgctggagaagagcgcgattatccgcgtgactcatccagccctccatctccccctccctctctgcgctcgcaggagtccgctctcgtcgctcagcgccagtgccggtggcggtgccggcgctcggcctgacctcgcacggttcctcgcgggcccttctgctgaggggtggggggcgctaggggtgtggagaggaggcagtgcccagcactgtgcagcgtgaactgggagcctcaagagaaggccagaggagtgttccgccgggaacaggc

SEQ ID NO: 32829 - DNA, 845 bp, Homo sapiens
  chr9:112259840-112260685
  hyper
cgcaacttctcagtaagtttaggtagctgaaaatgggaatttcgggggggctgggcactctcacatacactcccccatctgcagctgtctcaccgcaggtacctgataaatcattccatatcgtccgcggaacggggaggatttattggctctggagtttcgtgccaggcccaggaaatgccatctttgaaagccgagaggcggattcgccctgggagccgagcgctggcagccgctctcggctagctccccgcgggctgtgtgccccctcggagccccgagccggggtcgcggcggcacggggtcctccggaggtgccggacgcacgggctccgcgggttgcgcccgcccctgcccggctggagcgcacgcccacgctccggcgccgcgtcccggccgccagcccgccccggccgagccccacccggcgccccgcccgcgccctcccgccccggccccgccaggtgagcgcagcggggcgccccctccccgccccgacgtggtgcggggatcccggtgcagccgcacccgccagcccgcccgcgcgtccgccgcgcgccccagggacgggtgggggcggggtggcgccgagcgcgaccccggcccccggcagccccgcaccctgcccccggcccgctggggtcgcacgggcccgtacctgcagcatccgggggcgcggagcgcccaggtaggtcgcgcgtgcgggcggcgcggaagctcgctcgcggcgcgacctggccgccgtctgagcatgcccagtgccgcccgcgggcggttcccgccggccgggctggccgcgacgggcccgcgcgccgggcggggggcgggcgtccgggctggcctgc

SEQ ID NO: 32830 - DNA, 978 bp, Homo sapiens
  chr9:113800180-113801158
  hyper
cggtccgccgctgggtgcgggaggccaggggagcctcgcctcctgcaggccggctcgcaagaacgcacggccacccacccgcgccgcggcccacagcgcgcacccacactctcactggcactcgcacgcgcgcccccaaccacaaagcccgtccgcggcgggacagtgtgagcccagcgcgccgtgtggcgggccgagcagtcgccgcggcctctggcttcgcgcccagggggcgccgtccccacacgccgcgccggcccccttacctgcgctcgctgccgccgcgcgtccctctcctgccgcccccgggctggcttcaggccgcgcgcccagtcccggcggcccccgccccaccgccagccgagcccggccctccgcccgcccctcggcagtcgcccagagcggggccgccccctgcgcccaccccgccggggtcccgtgctcggccgggcggcggggagggctccgcggctccgggccctggccgccccagatccggcccgcgctccgcagcggggctggagacggagtcgccactcagggagcgtcagccgccagtcggcccctactgcccggctttggcgcgctggcaggaggagggggcgcagagggagggccagaggagcagcgccgacgccagcctcctctcttcctccgccttccttcttttctgcttgttccacgtagcacaagtcagcaacacccgaacccccagagtccgccctccccgctcccaagctggaccccttacctggtgtggcgcccccagcgcccctgacctctgcgccccctcctccattcattggctcgacagcccacggtggtggcagggccggggctggggggtggccttagcctcccattcattatctcagcagcctcccccgccccgcccccgagtcgacacacccgcagcgggagacccgtggccgccagctcgggtcccacccccgcccctcctgcgcttaccccagcgcc

SEQ ID NO: 32831 - DNA, 914 bp, Homo sapiens
  chr9:120176629-120177543
  binary
cgacctctgggcccctcctctaccctctgccaaccccactcggggcagccccgggcagggatccccagggcgcccccacccgtccggcatgacgcaggggctcggggttccttgggatctagcgcgtgccggcgcccagccttacccagggtgaagaagggcagctcggtgttgtccaggtcgtcctgcaccgcgatgcgccccggcagctcgttacgcacaaagagcaggaggcgcgactcggcggcggtgccggcagagccaggagagcccggggacgcggcggcggcggcggctccggccccggtcccagccccggccccggcgcgggcgccgctccagccgatgtcgctctcccgcagggcgggcagtgtggacaccgtgacggtcttcagccggcacgggctgtcgggctcccgcgaggcagcggcggtggcgccggccagcagcggcggcggcggcagcaggagcaggaacagcagcagcagcggcagcagtggcggcggccccgggtggaagcagagcctcggccgcccccggagccccgagccggggccggggctgagccgggcgccggcggcggccatggcgggaggggctgcggtgctgcgggcggcggcggcggtggcggcggtggcgaaggaggaagaggaggcagctgcggagacggcggacgccgaagcgaaccaggacgcccgagctaaggagcggagagagccgctcgccagcagcccccagctccgggctccgcctcccgatcggccctggaccgcccccccgcgccgcctcccggggcccagccgcccgtccccgatctccggctccccccgcagaccccgagcgtttcggaggctccgcccggcctcgtgcaagtcccagtggctccctcccctttcccaagatcccccaattcc

SEQ ID NO: 32832 - DNA, 670 bp, Homo sapiens
  chr9:127265598-127266268
  hyper
cgtagtggtagccggacaccttgtccccgcacacggggcacagctcgtccaggtcctcgtcgtacgaatagtccatgcccgcggcgtccgcctgcggagggacagcgggtcagggagggccggcggagaccggcagcctggggtccccgcggccgccgccccagccgctgtcgccggcccgtcgcgtaatcccctctctgtgcccaggcgctgccgccggcacccaccgagcgccccgcgcagcgtcccggggtgggtccggtgcagtccccgcgcccggccttcccctgccaggccccacgctcccgccccgtccggggggctcctcccgcgcggaccccgtcgcgcccgatctggggccctcgggttcgatgcgcttcgattgggattcgtttgtctgagaacaaaaccccgattctgagaaaaagagatgggctcagccgcggggaagacgccaggggacccaggagcgctggggcgcccggcccgggtgttctgggaacccgacagagacgaaggaggcagagacagagtccgggggagccagagatgggaagaaactctggcgagagacaacgaccgacgccaccgggcgcagacacgaggccagtccgagagtgccagagacacagacactgagacgcccagctagagagaacccggcggggac

SEQ ID NO: 32833 - DNA, 895 bp, Homo sapiens
  chr9:129375660-129376555
  hyper
cgcggaccaagcggccccgagcaggcgccgccgcccgggggactccgactcagcccccgcgacctacctcggccgacagtcgggggttcccaagcggccactcccggccggcgccgtcccctggcggagccgccgcgctccctgccgtccgcgcagtctggcctcgctcggggccactcctcgtagcgctggagctttacaaaatattaataataaagaaggcagaggagaaaaaagaaagccttcgctccccaactcccaaatcaatttttcaagggggtggagcagagggatttgtttcgaagacgatcaaaacttctgcgaggggcccgcggggcggccgggccggggagccggggcctgagctcggggccaggcgcggcgcggggcgcgggccaggggcgcggagccccggggcgcgcgggggggcgggacggcactatttgacgtggagccggcggcgcatcccggcgcagggataccggccgcggggttcaaatgtcaggaagtttcgggaggtgaggcggcccgtatccctccgccgccagccccagctctaaacccggcggctcagcgggcgcaccatggcactggagtagcgcggggagcgcgcccggagccccgcggcccgctgcgccccgcccgggaccccgctgcgccgcgcgccccccccgcggcccgcggggccgcccctgcacccccaccccctcccccgcctgccgccgccgccaccgccaccgccgccgccgcctcctccccgcggctccgtctgcagcagccgccgccgccgggttccgggactgacaagcaggtgacagaggagccggcgcgcgtggctgcaagtgtccgggagagcgcggcgcgggctgcagccgccccggcccgcccgcacgac

SEQ ID NO: 32834 - DNA, 941 bp, Homo sapiens
  chr9:129387302-129388243
  hyper
cgtttaatcagaggctgtgccgctcaaaccgcggggccctttgtcccacggagtgaacgacggaaacttgccatcctaatccccttattcatgtcaagcacagaaaagaagccgagcaccttacaaccgtgtcccctccaccccttccgaggacggcgggaagagggggctccggccctgtagccccctgacgcttttcgtttccgagcgcgcttgggcctcaggagccggagcgttgccgtgggggcgggggaaggggtggttttgcgggtgccttaattggcagcgtctggaaaatggggacagtgaccccacgactagaggatgaatggggggagggttagtgggatgtgtttgcctcctctgaccgagagcacgggtcctgctctgtcccctcttcccaggaaaggtggcactccgggtgcacacccaccacccccattaaagcgggattgaccagaagagagaggccgaatggagatgccaggctggggccctcggcggggcagatttcgttggatccctgggactaatgtcgcagcgctcgcactcctgcaggtctccagggttggccattcccggctgcatgctcggcccctttcttccgagggtgaattcctttgttccacccccacggaaaccctcttctccgccaggcccgtggcgcctttctcgccacctccgccgccgccgccgccaccctcgtcccaccgtttgcagggctttcctgcggcgctctggccgcagagacccagccctgtctgccgactggcccttcgacgtcgccgccgtgcctgagccccgctgcctgctcggacaagcagaactccggcaggcgcagcgggcgccgaggcttgggctttagccgtggcgctcgcctcggcgcagtggggagccgcgggcgtcggagaagcggccgcgctgttccgggtcactgcacc

SEQ ID NO: 32835 - DNA, 524 bp, Homo sapiens
  chr9:132020659-132021183
  hyper
cgcggtaagacgtcagcccggtgagcatcctccgcactgcggaccgcccggggtcggggtcacccgggccccgccccgagcttgctgtcgtatcggccccgccccacccacgccctcccggcccctcctgctccgggcgcgctcggctccgcccccacgggcaacacggcctcccattggccgcggtttccatggttacgcgggccggcggagctgcgggctcccagacacgtgtccccgggagccgcccagaatttgacaggggaccatgtgcgcggcagcgcgggagcgagacaaaggaccgggggaggcggggaacgaagccgggcggaggggtccgcgtggcccgggcggggatgggccccgcgcttctcctgcgagcagggcaccccctcttcctttttattttgaaggaaagggaaaaaaggaattgctacggaaagagaggtgggagaggaacccagtcaatttcacctgctccccttcctccaggaagaatcgggtacgcgggcatctgagaaccc

SEQ ID NO: 32836 - DNA, 772 bp, Homo sapiens
  chr9:132244512-132245284
  hyper
cgcgctcctcccggaccccaccccgaggcagctttctcacaacgggatcctccccgggcggcgtggggacgcctcccgaccccgaggcccggcaggagagccgccaccgcggccgggtggtctccgcgtcgcatggcccctgccggcccccccgcccatggcagctacataattaattcgcccataaataactgattggggtcgcgcacgcgcccggtgtccctaggactgggatccccgttagggttaggggcgtggggggtcgggggccgcggggctgtgcgtgccggggcgcacggttttgctccgcgggcctctctcgctccctcgcgccggctttttccctttttctctttcctttttttctttcctggagcggagcccggcgccaggagtctggaaccagcttgacaggcttttgagttatggaggggggagggggagaggcgggcggcggggagggggaagggagggcgccgccgcggcgtgggggcggggccggctccccggtttggagactcgccccgactttggggtccgccagcggcggccgggcggagggcgggggaccgcaatcgtggggggagtcaccccgcggggcccggcgggcgaaacgggccgggcttcagagccgcagtaaatgaggcccggggcgggcgggggtggacacggcctcggggccacggcctcccccgccgagcaaggcattcctttccgctgaactgggcgcccgggcccgcgccgcgccctgcacgcctcgcgcccggcgatc

SEQ ID NO: 32837 - DNA, 690 bp, Homo sapiens; identical to SEQ ID NO: 29516
  chr9:132258226-132258916
  binary

SEQ ID NO: 32838 - DNA, 417 bp, Homo sapiens
  chr9:132312367-132312784
  hyper
cgacccccaagagagccccggccgggacgcgcggaccccagaagctcgggcgggggcgcccctcggaggaatgtttccggggcccggaccgcgccgccgccgcagcctttcctccctctccccgcccggctcgccggccgccctcgcgccccctccagggccccctatcttcccccacccgaaccccacatcactgccctccgggccggctgcgcccaggcacttggtgcagatgtaacctctccgcgggccccgcctccgccgggaagccgcgcgcggttgccaggaacgcggcaggcgatcggagctggacggcggcccgggcatctcggcactggcggcgctcggccctcctgggcggccctggcccggccctctccccactggcgccgctgcgcttgctccgattccctccgc

SEQ ID NO: 32839 - DNA, 252 bp, Homo sapiens
  chr9:132428412-132428664
  hyper
cggccggccagggacgggggtggcggggccggggccggggccggggccggggcgcggggtccggggagccggcgcggggcgggcgaagatgcagggcgcgtggtcggcggcaggacttctgggggcgcgtgtaagtgacggtggacggcggttgaccagcactctgggctgggggagggggaccctcttcgggtcttggggtgcgtccccacggggaagtgcgctgccttcgctccccagtattcggctccc

SEQ ID NO: 32840 - DNA, 1138 bp, Homo sapiens
  chr9:13278637-13279775
  binary
cgcccatcagcgcggggggtgaggagactaagggagagacaagaccaacgtgctcccaccaacgggagcggcggttaaaagggcgccggtgccaggggtgagggacggggcaccggtaccaattagcggctcgcctcggggtccccgcggctaaggcgagaacgcaggaccaggagcattgctgcccactctctaccgcaacccgcacatcccgggaccacgtaacggcggatggggcgtccgggagcggcccctgcaggggagagcaacaggctcccgcgccctggaggcctggtctgcgctccgggcccccaggctaacaccccacccccagccccccgacaccaagactgtgcccctctgggtcaaggaaaaggaaaaacttttaaacctcttagtcagcgagagcaaaagaaaggggtggcgggggtgctgaaaggtctaggattatccaccgcggggctggggggagtggagacttgcgagtagcaaaggaaacttctagaccccatccttttaaaaaagccacagcagcggcttccgcgaagcgccgggccgcgcggggtggggcaagcgcaccgccccaccgccccacggcccgccgccacccctacccccacccccacccccacccccatccccgcccccacccccacccccaagcgccgagcccagggcgcccgcgcaccttccccgccggcgcgcgcgcagggcgcgggggcgcgcctcggcctctgggccggggctcaagcgccgcttacccggctcgcggcgcccgcccagggccgcgacgcgagggggcggaggactggggagcaggggtcgccggggcctctggatgcctcgcctcgcccacgctcactgtcttctcttctgaagtaacgacccggcgaggagcttcggatcaaaacgcacagacactcacgcgtgactgagaaacttaatcccgcggtggcccgacgccagcctagcgctccgccgcgccccctcccccagcgcgcgccgcacttgcgccgaccggggctgccgcggaggcggtggcggggcccaggctgctggggctgccgtgacgcctgcgaccggcggggcggcgggcgcgccttggccaatcaggggacgcggccgagcaggcctgtgc

SEQ ID NO: 32841 - DNA, 972 bp, Homo sapiens
  chr9:133535423-133536395
  binary
cgcggatgctgggcgcgcgacggcagcgggcggaggaggggagcggccgggaacctgcgcgcaggggaagccaggacggagcgcagcaccggcaggggagggttgccgaggggctgtgccgaggagcccgggtgggggcggctggaccgcgggccgcgggactcacagacagtgcgaggcggcgcgggggcccctctccctatgcggggctggggcgcaggggctgggcggggcgggtgggcgtctgagcgcggcgcgggcgcattcttcgccttttcttcctcgggctcattccggccgatcgatacctgcgcgggacctgcccccgccgctaatatctttttaatgagttcgccaggcttaaagcgagcgcgatctgccctccagggtggattttcccccggcagatgtttcgggaggaggaggcgcgcggagctcccgggaggggggacaaatctctccctccgaggggcgagaacaggagactttcttctaaagttcaaaagaaagacgggctttcactcggcccccaaaaatgtatttctcggcggacaatgggcttctttctgcgcctctgagggccggcggggcgggcagggcggggacccgtgcgctttggccccgcctgaccgactcgcacccccctcccccgcacccaggcccgggccccagagcgagggcgcaggagccgcgaagccggccgcccttccgagcgtccccctgaagcgcactgtcgggacctggctctcccggagctaagccccggcgcaccggcgagaacgaaagcgtcgtgcggggccctgggctgtcccacacgcccccgttctcataggtgcctcagccgggccgaagggacgcgcgctggtgcctcaaggggaggacgaacggacctccgggcttgggccgcggcctccttcccctcggcgctccgccctgagcggggcaacaactagaaattagccaaccccgggc

SEQ ID NO: 32842 - DNA, 571 bp, Homo sapiens
  chr9:136474214-136474785
  hyper
cgcgctgccccggccgcgaggacttgggcgcacgtgacggggcgggcgggcgtccgacccgggcagggcgcagctagcggcggccgctcatgcccaggccacggcggtggcgcctggtgtggctgggcgggcgaggcgggcgctgagaagcccgggaggcccccggggaggcgactgcgtgcccaggcgggcacccctgccagctccgcgctgcggccgcgactccggacgccccggctggctccctgcgagctgcacgcgcggctccagcctggtcccgagcgcagggcgcgcgctggcggggagggcgcgcgcccgagcctggcggggagcgcgcgtcaccggcccgcgcgcgcagtcgtcgggggatgccgggagcggcctggggagctgtccctggtgctgacggctcgtccgctctcgcccgggacgcgcgacctcctggaggcctgggggtgcccccaccctggccggcgccctgcggtgctccctccgctctccgcctgttctcggggcgttccggcttccacaacgttgggatctggagtcaggccgaagctgctgcttatcc

SEQ ID NO: 32843 - DNA, 1404 bp, Homo sapiens
  chr9:137533140-137534544
  hyper
cgccctgatctggctggatgggaagtttagtctccacccagaagaggagctctgaactcctccacgttaaagaaaaagttaggcggggtaaactgcaactttctttttaacccgaagtgatcaaacctcggggcccctctgcactggttcttggagcatggccaggtgcgggcacctggggtgggaacagtggggggaccagggtgggcccctgggctccgaggccgccccaggcccgcccgcctaccggctctcagagaaagaacagggggccgcgcccgccccacgtccgctccgccccgggccagccccttcctcgctgcgactcgcccgctgtccccaccccctcgcccgcggcgcccagtgggaggcgggggctggcctcgccgagcccagcgccgggctctgatttgctgcgggcgttggggatcgacagcctccgcggctgccttccaggagagagggagggaggaaaagggggaaaaaagtgctccgcgccgaaggcgaggtccgcactctccgtccccgcggctggcgcaggacctcactcgagcggagcgcccacggggagcgggtcgcggggcggcggcggcgaggaggaggcgagaaggagttggaggaggaggaggaggaggcgagggcgagctagcccagcggggtcccggccgccccgcgggccaaagtcgagccctcccgcccgtgggcgagcgcgccagccgccccttccagaacagccgccgccacaaagaagaacggggggtgccgaggtccccatgacctcctaaagtggtgcggtccctgctgagtgcgctgcccgggccgtgacccgcgcccctgtgcgtccccgcgcgcctccgagcgcccctgtgcgccccggcccgcgccccgccggcatggacgtccatacccgctggaaagcgcgcagcgcgctccgcccgggcgccccgctgctgcccccgctgctgctgctgctgctgtgggcgccgcctccgagccgcgcaggtaagggcgccccggggcgcggggctgcgggatggggcgcgcgcagcccgggcgccgctgtcatccccgggcgccttcgcccgcagaacttttcttccttggcctgtggaatgcacgggccaagaccacgaatgccatttgctgggggcccccccgagatgacgacacgcagacacaatgcccgcgggcgcgccgccgccccctccccagacgggcgggtcgggtggggctgtcgcgcgagccgaggaaggaccgagggctggatcagcaggaggggttgtccacgaggcgggcaaacttttgtcccaaaaaccttccttctctgtcccacatcacaggcgcccagcttgggccctcacagccctacagcagaacttcctctgctccaaaccgggcagggcc

SEQ ID NO: 32844 - DNA, 150 bp, Homo sapiens; identical to SEQ ID NO: 29523
  chr9:137979104-137979254
  hyper

SEQ ID NO: 32845 - DNA, 752 bp, Homo sapiens
  chr9:137979477-137980229
  hyper
cggccgcggcccccgcgcgcagcccgcgcagcgctcagagccggacggcgcttcccggtggcggcggaggagcccggagggacgcagccgggcaaggcagggcgcagggcgggcggcgcgaggcgcagggcgcggcgggcagaggccacctggccaccttccctggcgcccggggaaggcgcggcgatggccggggcgcgcggggcggcggcggcggcgggcgggcggcggcgggccgagggggcgcggggacacagccaggcgcccctgcccgccgcggtgcccgccgcctgaaggccgcctgggcgcgggagccggtgccagctcggagcgggcgctggaggcagctcgaggcgcgatgtcggtgccgctgctcaagatcggggtcgtgctgagcaccatggccatgatcactaactggatgtcccagacgctgccctcgctggtgggcctcaacaccaccaagctctcggcggccggcggcgggacgctggaccgcagcaccggcgtaagtgcgcccgccggccgccttggcgcggctcctcctcctcctcctcctccccctcctcggtccggagccccgggctgggcgggcgccgcgcgggacccgagtcgcccagggaggcggcggggagcagggcgggcaagggcaggcgtcgcgggccggcgcagcggtggcgaccctgctccccgctcccccagcctgggccactccatctccgcccgcgcgcccctggggcggcgtttccttc

SEQ ID NO: 32846 - DNA, 1557 bp, Homo sapiens
  chr9:138986173-138987730
  binary
cggctccacgacgagagtccaagaccaaacttcccccagagcctggcagaggggctgggaggtgacctctgacctccgaccccacacgatcccagcaagagaagcaggaaactccgtcggaaggcctcggtccgccctggccgtgcggggtgcgcggcgggccccgggctccgctgagtttcttagagaaggagctggggccccccgacctcagctccgcagaggcacagaagctggcaagaggcagagccccctccccctgcggccggaccccagtttctccccaggctggggcccgagtgggggaggcgcgggaggcggtgacgacccacgaacgggcccacctggaccgggagggcgaggcgcgggcccggctgggccaggcagctgcgcagatgcgccgggaggggtgggtacctccgccctggccccgggccagtcctgccccggcttccccacccggagggctggatcggccagtcgggtccctggggaggccgcgcgggtccccagaaatccagggaaacccagcaggcggcggggagcgccccgggacgcccggagccggggtctccccgaacgcgcggcgcggcgtcccggcccggggtcgcgggcgcctccgccgggaccccccggccccgcccggcccccctccgcgggctcccgaggccggttcccgcgcgcacgcccgggccggcgcggaactcggccgcacccgccccgcgcggccggcactgcggcagggggctcgcgccaagttgggcggccgcggagtttgcgggaagtgcgggcccggcccgtgggacgaccccgcccggcggcgtaacccgggggcggccgcgcgcgccaagttggcggtacctgcgggcgcccggcccggtccggcctgggcagctgcggcgcgccgcccgcggcaggaagtgcttggcgtcccggcgctccggctcccatggactttctccgacctcgcccagcaccggcggccgcaccgcggcgggggcggggcggcggcgggggaggtgcccgcgggccgttaaagggacagcgcgccggccgcgcgcgcgcgcgcactggcagccaggtgggctcccggggtcggggctggggtccgggggccgggagggtccccagtgggggccggcggggcgtggggaaccccgagcgctggggaggggaggcggcagctcctcgcccctcgcgcgtcctccttccggagctgccggcggtcgaccctgcgcgggacacccggcgggagccggacgccgcggcgcagaggacggagctcggcggccgggtcgggaaaggacctggagcgccgccctccgccctccccgggccccggcctcggccggactcgctaagcccgggagagcccccgggcccccctaccccgcccccggcgcgcgccctgcccgcggcagtcgcgtccgcacggtgcagcctccgggatccgggcgggggaagtgcgcgcatccgcagccgccctggacgctcaggcgggccgtgaaagacgaggatacgggagcgcccttgggcgaacgtctgcggggctccggc

SEQ ID NO: 32847 - DNA, 998 bp, Homo sapiens
  chr9:139084831-139085829
  hyper
cggccccggccctgcctcacccgccgccccaccagggtccgagaccgggagaccccagccgcggggggggggggacatcagccttcgacctgcccccgcacctcccgctccgcggggagactgggcgccaggaaccccgaattcggggctgacaacccgcaggcgcgcggctaaagcttccaccgtccgcgagaaggcgtctccaccctggaaggaagggggctcggacccagggaggatgaggggtccgccttctccttcccctcacctcgctgcagcccagagcccgcagacagccccgcggcccaaggtctctctccgcccgaggtctgcagctctggctgggcgtcccccggcctggcgggggtccgggtgggggccgcggcccgaagtctgattctgggttcgccctcgcgggtacggagcaggagccggaggaggtcggagcccgcgtttctgtccctggggcgcggggaggtcacagggctccccccaggcccgcgcggggcggaaccgggtacggccagagcggcgcgcgctgcgctccgatcgggaaccggaggccggcgaggtcacgcagacgcgctctccagggcaccgcgggtctcccatcgccgaggccgcctccgcaggccccgctcccctccccgcggcggccagggcggtgtcgggggcggccacgggctccgggattatcgacgcgccgccagctggagcgggcgcgggcggggtccccgcgggaacagtcggcactttattaacctgtcagcgcctaaaaggtcccgggcggcctgggggaggggccggaggccggggcggggtgggggcgcggctgggggatttgcgccccctcctcggggctgccccccgccagcccgcgctgcaccccggcggccgcgccccctccctaaattccgccttcgacctgggcccggagccgctttccccgcgggctgcccgttgcccccggagagttcggggtcgtccctccagcgccc

SEQ ID NO: 32848 - DNA, 636 bp, Homo sapiens
  chr9:139093549-139094185
  binary
cgacctccggcggaaaaaactgggctgcgcctccccacgcagtggcgggaaaccggcgatgaatgcgccccgcatccggcaaaaccgcagctccgggtgcggagcgtcgaggacccgctgcgcgcccggggtccccatcgtgggcagcgatcgcaggcgaggacccggctcggagcggggcggcccgacaggccgacacagcgcggattcagcaccgcggaccggacagcgcctcggccgcagctcgccgccggcgcccgcgtcgggcaaaagccgccccagcccaccccgcgccgcgcccgcgaccccagccttacgctgcatggcgactccagccctggcgggggctcctgtgtcagggatggcggggtcggcggagcctggacgccagcccgcccgctccggccagctctcccgagcgcgggcgcgcagtcctccttcctccctccctctctccgccccccagcccccgcggccaacccctcccaggaaccgtcgaaaaataaataaataagtagggaaccgcgagcccccacagcctggatgtaacccccttcccgccggccggtccctctcactccccactggctccggggcctccttccccatcctgcggctccagctggcccgggagtc

SEQ ID NO: 32849 - DNA, 454 bp, Homo sapiens
  chr9:139739050-139739504
  hyper
cggccatggagaccctgccggagccaccgccgccggagtccgctgtgccgcgcgcccggacccgcgaagccgagccacgccgccgcgcccgctccaagagtgcgccccgcgcgcccccgggcctgacgcccgcgcccgcctcgccgccggtgttgccccgccgagggcgggaggcccagcgtgcggcgcgggccgaggcatcgccgcgccgggagcccgcgtacccggcgctccgcgcccttgccaacgagctgcatcccatcaagttgcagccgcagcggggcggccccggccgcgtcgcgcccctgtgcgccgccgcgggccgctgcgcaccgcccgagccacccgcgggtcccgccccccacgtgcgctgccgcctggacatcaagccagacgacgcagtgctccagcacgccacccggggctcgcggtcctgcgggcccaccgaggccgc

SEQ ID NO: 32850 - DNA, 341 bp, Homo sapiens
  chr9:139872508-139872849
  hyper
cgacaaacactccgtgcgcggtgggggttgggagggacgcgcaccgcacagacagccggcgacgcgcgctctcgcccgggagctgctcggggaagcgccggagcgcgggtccccgcgccgcgcgcccctccctggcgtcgaggagaaccccagcggtccgcagagctgagccgaagacccgccccgatccccgccaggaatgcgacgtcctctgccgcccgctgtatgggccaggcgctcagccagggcacagaatcgggaccgggggcggaggggccgaagctggctggtgggcggcgtgcgagggtgagggactgtcctcgggaggggcgtggccagac

SEQ ID NO: 32851 - DNA, 2395 bp, Homo sapiens
  chr9:14313401-14315796
  binary
cgctaattgtccgcaacaaaacaaaacaaaggcatttcgggccagagagaaagctcgagaaagcgaccgagacatgtacctgagtgagacagatgggagaatacatcatgacttcgccttaaaacgcactttccgggagatgcccaagaaaatcttcgagaagcaagaatttcatctattcattttacagtcatctgagccccgcgatgcgatcaatcaggacggggctctgcgctggatcaccgcaacttcacaacaaacccagtcctccttaaatagccaaagattcaagttcactcggcgtgctagatttccaggggtgaaatccaatctacacttttaaccctcttgcagtccgagcgcgctggccgtgcttgccgaggccgccgccgccgccggtgttggctgcttttcgcctgggtttggggatttgttttctattttgcagttgttgttgttgttggggtgtagggggtgcgcgaaggttcggtgtgggttggattggggtggtggttggtggtaaaatgctttttcaaaaaaggcggggaggggggcgcgggagggcgcaggagggcgagcgggcgggcgggagggagagcggggagaatgtgtcaccgcgctgggaaagttcaaggttacagccccaagcactgcggcaggatcccggagtggtgatcgcaggcgaaactttgccgcgagccgaccatgtgtgtgcgcgaggggcagcgtgagcgagtgcgcgcgggtggcggggcgcgcgcgggagagggccggggtgggggcggggtgggatgggggagaagggagaggccggggtgagggagggggcgcgagcgctgatctctggggcggaagaggctcgcggcgcgtggtccccggcagcagcagccgccgccgcccgcgccgggtcttcggcgcccggccgcccgcccgcccgcctcgccccgcgtctgacccggccgagcgtggaggctgctgttgccgccgctgcccagagcccaggggtatcaaaacgatctcctgaaaaattccaaacgataaatcccgctctcccgctcggctccaaactcctctcttttctgctctaggctcttttttttccctccctctcttgctttctttcgttgcaaaacttggaagttgaaaaattcaccggttccaccctctggaccccgctcgagctctctccaaatcagacttaaggattgttttattatttaattacacaatcatcgctttactcctcctcctgcaaacgcgcattccttttgcaccagcctctccacaccccccgcccccccaccttcctcctcctcctccttctccttctctccccccacctctccctcatttgttaaaggtatcctaccggtgctacagaaccatgactttttttttttttccaaaatagctcttctttccgctgccctccccacaccagcacacacatacacacccccgaaaacccgccctggaagaggtatttcggtgctcgctgcggactcttttaagccgcgggaacatccgagtgggagaagcaccgaaaccgtctgagcccgagaaaggaacgagtggaaaattccctcacacccaggccgcccccaggccggggctggggcgcggacactcgcacccggggcgggctcagtccgcggagcctgcggctgccgggaaaagggggaggccgagcaggcggggacctgagcgaacttgggctcaagtagttggggcgcgccggcgtggaccaggggggtgcggcgcccagcccccgacggccccgcccggagcccgggttcgcggatagggagggggtgcgggttcgtcccgggtctgcccaccaggggcccgcacccgaggcagtcgcggcgcgcggcgcttcgccgcggtttgccgccctccccgggggtgccccgtgcacgtggcctcgctctgagcgggaggaccgggccgagccgccgccgccgcctcttgctccctccacctcctccccgcgcccggcttcgctctcctcctcctcctcctgcagccccgctggctggctcccaatccccaccccccggggcccggggcgccggcggaaagcgtctccctacccgcccgggtgcaggcggggcggggccgcggcgcgcccggggctgcggggcgggccggcgggcgcgcgcgcgccgctgcagccctccagaggctgcgggccctgagccgctcggcgcccgcgccggctccccaccgcggcgctgccccgcccccaccccgtcgcccgtgcaggctccgagtgaatgaacttgattccagggattttgaagaaggcggttcgccttgcaccctttctgcaccccccgcccacatacacacaccgccccccaaatccagttttctgcttggggtggatggggac

SEQ ID NO: 32852 - DNA, 796 bp, Homo sapiens
  chr9:14347440-14348236
  hyper
cgccagctggggcaaacttgagctggcaaagcgcgagaaaacttttctttggaaagtttaggtagcgcagttagtggcggaggctcagggcaagctaacagtgctggggcgggtgtggagggagtgagctgggtgcgattgggagaggggagaagggagaagggaaggagtggccagctccctaggcggttgaagatccaagtctcttcggtcaggtccgcccaaggtcccagaggcactggggggtcgggtgactgtgcggagtgtaaaagacatttccttaggaaacagacaaggcagggccaggagttccgcggttttttttccgtgcagaaatcactacccggcgacggctcagggcggtagagggcaagtcttatctgccaaggcgggattagattctctcgccgagggtcccagtatcccgccgcccagcaagggccgagcgcgcgcgcgcgccagggagctttggagcgacgcgcgtagtttcgcgtcgcacgcggtgtctggtctccgcgcaccacgtgcgctcgcggtccttggcggggacgttggtgctagcgatccgacagagcacccaggactaggtttttgtgatgccctaacctgggcatttatgctgggggcggaacgaagtcgcccaacccaagttctccctgcaccctgggaaggaaatgtggtgcgccctctggggcgtgaggccgccgcggcccattctacacacctactggcattccgcttttccttactgtgcgccaggggaaggcataattcaattatatcatacaactgcagc

SEQ ID NO: 32853 - DNA, 801 bp, Homo sapiens
  chr9:16871284-16872085
  binary
cgcccccccccccccccggggagctgcgggcgtggaggtagaggtggccgctagcgcccagctgtcacacacacacaaaaaaaaattgcggggcgggggtggggagcggagcaaggagaggaggctgcgaaacgccgaggaaagggcgcgaactttattccgactgcagcaaaccgcggcagctctttccttttcgggcactcgggcgtctctgtcccctttgaccagttcctcctccccagccccgcacgccccctcctcccctgccccttccccagcgtcccagccgcggccgacccggctccccgcgaccctctcagcccagctcctccgcgcgccgctggggagaaggcgagtgaggcggaggaaaacccagcggacagaaacctgggacgcgaacgtgctgggagaaaaggccaaaagttgcgcgcagctgggggaaaaaagtttttctggtggcggagcgttttgtgccggcccagacgccggcttgcggcgagggcttccttccctttcccgtggtctgggccgcgggcctcgggctggagaggaaggaggctgtcgcgcccgcgggggaaagaacagtcacatctgtgggtgacactcagccgacccaagtcaccctgccctggagactcagaaacgccgactacagcctaagcgcgcacacgcctgcagctgaacgatatttcttaaatacaggcaaaacacactccccggccgcaagaatggggcgggggtggggggggagcttaatcatcatcatctaactaacgtacactttgtgccaaaaacatctcc

SEQ ID NO: 32854 - DNA, 986 bp, Homo sapiens
  chr9:21559133-21560119
  hyper
cgctgtatgaaagcgctctccgccaacacgctcatggacacacacaactccttcctcgaggtttagggacagagagcgaacctgtgacttcgggccaggatgacgacctgagatttggacaagaggaggcggcggttccgcgaagagccaagggcggccggcgctccgggatgcgccggaccccgcggcgcatcctcgtttgggcgccaacgggcgccggcggtcctcggacccgggtgtcgactgccgtgtgcccactgccgtgtgcccaggccccgaagcctcctcaactccttgaggggcgcctccctagccagctcagcgcgcagcgggaccaaggctctcccagcttacctgcgggtccgagtaggaggacagaagcgccgcccggcctcgcccaagcgcacacgaaggggccgcttcccgccccccgcaccccagaccaggcggctcacggaacaccgcctcccagctctggcccgggaccaggcggtcccccagccggcttcggcgccgcggccggggacgcgcgtcttccttctccaggcgccggacgtggaacctgcgagcccctggcggcgccccaagttatgcacaggtcgcagctgctcaccaagctcctcctgggaggccgccctggtccccgagaggggcgcgcgggagtggacgttcccgcaccttcgccccatccacacctgccgccgccgccggggccgccagcgccgtggctccgccccggctccgcccctcgccgcccccggctcccgctccagccgccgccgcgaccgccgcggaaaggagggggagggaagaggcgcctggacggggctgcgggagcggccgtgctgagcctcctcccttgggcccggacgggacccaggtttctccactgcaacgcagctcccgagtgacggaattttgtgggggaagcggcggccactacgctcgcttttggcacagtagccctttgcgggtgggagcttctc

SEQ ID NO: 32855 - DNA, 748 bp, Homo sapiens
  chr9:22446681-22447429
  binary
cggattccccgccgccctcctcccagaaggtccccactccccgccccgggccctcccccggcttccgcgctgggccgggagcctgggtgggcggggtagcctctctagccttgccttcttggctggaggcacaaaggcattaacttagcgcccggggtctctgccaggctcacgggacagctgcacctctcagcgtctccagctccaggacgcggtcgtcccaactccttccgagtggaaagagtgtaaaacttttgtccgtgcgcgggtggagctcagtaggaccacggcgcgtcctgccccggcttccccagcctcccagcagggttagctgcggtcagcgcactttccacttgggactcccggccagaaatttctcgggaatggagcggtcacagtgtggcagcagagaccgaggcgttagcggccgacctcacttggcccctgggctagtggtggctgcccctccgcccccgtccccggcgttgccggtaccatcggggatgcaggttcccccagcgttcctgcggccgcccagcctctttctgcgagcagcggccgcggccgccgccgccgctgccgccacctcgggaagcggaggctgcccgccggctcccgggctggagagcggggtaggcgcggtgggctgcggctacccgcggacgcccaagtgcgcccgctgtcgtaaccatggtgtggtgtcagcgctcaagggccacaagcgcttctgccgctggcgggactgcgc

SEQ ID NO: 32856 - DNA, 1461 bp, Homo sapiens
  chr9:29212746-29214207
  binary
cgcagctgggcagcgccgcaccggctactccctgacttgccaggcgggtcgtgcgatcgcgtagcgacgcccggagagatcctcctaacttgacttaacccccaccccatccccaacatctattttaagttattgtctctggcaattcaagcagcagctttgctgcctcttaccttgaggcgctgttaattctccttcgtgtccttaaaatcccaagccaaggatgcgacgcacacaagtccaggggcttttcctggacttccccctcctcagctctgaaggctcctcctttccaagggatcaggaggggatggcggttcaaaagccctcaccatagaggcgcctccaagccttcgtaccagtggaaatggagaccgggaccaccttcccggcacccggaagcctcccagcccctcctgggccaacttggctgcctattcagttttcttccgtaaccccacagacacgtcagtcaattccctggcatcaggcaggatattctcagttgcggccgctcctcttgctttctctcgataatgcccctcccccctttctccccttaatttggaaaaatttctactccctgcccgaattaggtggggatgaggcggaaaggtgtaagaagagccactccaaggcacagcttcggaacaccgtctccctgggctgctgcagcgcgaaggtgtctacgctggggaaactttcaggggaggcagcgccggtgcggggctgggcgggcggcgggcggcggcgccaggtgaggaggctttgaggaggcggctgcaaggcgggacgcaggatagccggctggggcttggcagccgggctcagagctcgggctgcgcacacacacaggcgcgcacacccgcgcgcgcgcagctacacacgcacgcccagccctgcgcccgcggcccccggccagtggcgagcgaaaagtcgggagtcctgaggaggggtaggggttccaaggatgctgatgacagaaagagtcaatcaatcctcactagttagcggattgccggcaggcagttcctcgccgcacgccgttaagtccgttgggccacctctccgttctctgccctgtctggcatttcaactccctagctcttttcttgaagccagttacaccccctcgacacccagcgagaggccaccagactaaagatgagccccgttcccatcgccaccctccaggggccacctccgccccttctgtagtggagaattgaagtggctgcagcagctctcctgggagctgaggggctccccgaggtccttcgaatagaggagcctacacatcgcttcgtgaacataatcccctcgcatcccgtctttacctgcccactcccttcgtaacatttcccccaaggagctcccgaaagtcgcttagatgttttgaaaatgaatttcttagggaattgtagtgcctagcttttggaactgggttaatttaggtgctac

SEQ ID NO: 32857 - DNA, 904 bp, Homo sapiens
  chr9:35161771-35162675
  binary
cgcgtcacacaactgagggtcaaccccttgctccctgcagtaagcctgattagtgggcggagcttccttcaggatcgcaagaaagaaaggaggaaggggaccccgcctcctacgtgctcgcgggggggggcggggtcggtggactgggcgtgagttaattggctggggggcggggcaccacgggttggctccgcccaggcgctcgcgcggatcccgggtggaatgacgggagggagtcccggcagctcctacctcccagcgatggcgtcgctgtgccgcgcccagtccccagcctgccggccggtactcaccgctacccggagttcgctcagacggtgagatttggggcgggtccgaggcagcggcgggacgctacctgcgaccgggaccatgaggagctgccagacccgtggggccggtaacgagagcagtcgcggcacctgctgagaggaaagagggagcggtccggcgcggctggggcgcggcagaggcttgcccgatcctcggccatgtcactgctctgcgtgcgcggtgagtgcgcggactgaggcggggaggcggggtgtcggcgtagaggtccccgcacccttccagtggacgtccggtgaccgtctcacccaaactttacatcccgtccgtgctttgggggtctattattttggcaatcacttaacaatcacttgagttctttccactttcttgttttcccccaagctcctgcaagggacgattagctctccattctggtagccatgtgacaatgttgttggactgcaggctcagatcctattaaacagtgactggggttctctagtgagagtggacgagttagaagaccgcggatggttggtgcctgtgaatggtgggcagcctctcattcttttcctcctcctcgcaccgtaac

SEQ ID NO: 32858 - DNA, 922 bp, Homo sapiens
  chr9:38619917-38620839
  hyper
cggggaattgccagcgacggaaagcagctgaggctccatttggctccgctgctccgagggtgcccggcgccctccaaggtccccgccccaggggctgccgggctgcagggaagccgggcctgcggccccctcccaccgcgggctgagtccccgagctacctgtcttttctgtcgcgggcgtccaagtcccggaacctgcgcgtcaggcagcgctccacctccgcggcgtcgcccttgatggcagccctgtggatcttccgcagttcccagtcccgaatgtcgtaacccggacccgcatactcttggtccatggagctcaggagcgcctggcccaggcgtctcccgaagctgaagagcttcctcatggtggcgacttctcagacgcccaccacccgctcctgagccgcggcggctcctcgtggcctttccacccccactccgccccaaatccgcgatctcccccgcaacccgcgatcccccccgcaacccgcgatccacccccaaatccaagatccacccccaaacccgcaatgtagctcagaatccgcgatccagcccggtccaccacagccttcagcagcgacactcgcagactccgacctctcagaccgagtgagcccagctaagccgttaggcgcgcgcctgaacctcagcgctccgaactctcagaccgagtgagtccccgcgatgccagttaggcgcgcgcctacaactcagcgccagccgggactccggaagccgctcccaagccctcgtggccggcagggggcacctgcagcacgggcgcacgcgtcgctggcttgcgggttctcctgggctcccgcgggacgtcccggaatcccaggagtgcatcccttcccgcctgagggcctgcctggccctgactcccgacccgctcctcctccgaagagagatcggggcc

SEQ ID NO: 32859 - DNA, 674 bp, Homo sapiens
  chr9:74764247-74764921
  hyper
cgcggagccaactcgcgggagaaaaatcctattggcattgaggaggtagggagccagcccctgggcgcggcctgcagggtaccggcaaccgcccgggtaagcgggggcaggacaaggccggagcctgtgtccgcccggcagccgcccgcagctgcagagagtcccgctgcgtctccgccgcgtgcgccctcctcgaccagcagacccgcgctgcgctccgccgctgacatgtgtgccgctcagatgccgcccctggcgcacatcttccgagggacgttcgtccactccacctggacctgccccatggaggtgctgcgggatcacctcctcggcgtgagcgacagcggcaaagtaagcaggcgcggggtcgagcgcactccgacgggcgggaggataggtgcaaggaacctggcgcggtgcttcgcgtagcccggggttcgctcggtgcgcagtgagcgccgcggctccggagttgaacttgagtctttggctcttgggcaacgcagagagaaccctggcgctaggttcgtgggctggctggggagttcccagaagtcgggagcagtggcgtgctaacgccacaactggctcgacagcagtccgggctgcggtagagccgggagcaaggatgtcaccccccgctcccccgccccccgttccaatcctaagatacc

SEQ ID NO: 32860 - DNA, 790 bp, Homo sapiens
  chr9:77501932-77502722
  hyper
cgagaccaagaaattaccaggatctccactactctcccaagcgtctccagtgctctcccaacagccaggagcaccctccctctccaagcccccagaacttcctgttgcgccatatgccagcggtggagaggagccagcggggactcctgaggttgcaagtccgggcggcgccgcgttggggaaggaagcggactgcggcggggcgggtgtttaccgtaaccggcgctgtcatcgctccgggactcctgcacggggaacactgggcgcacggggacgcgcaggggcgcggagggacggccgtctgggcacttctccagccgcctcggaaagccgcgacccccggctagtcagcgtccgggtctgagatctgtgcccgtggcagctcaaaacgcgccttctctcctccggattctcagctcaagccacctccgaactcctctccctccggcccggagcggaatcagagctgcctcctctcccggggtgtttcccaccgccccgagctgaacccccgacccccgctaggtttccgctctgacaccacctccgctatggccgcatcccagctcttgaaacgggggctgcgggacctgccctgtagtagcgtacactaccttagataggataatcatctttgggtggagaccagagaacttgaaagccggtatttcataaatcctagctattctagatcctcgttagatgtagtgtccctggccccacccacttctatctaaggccgggggcgcagatctagcgaatcgcctaaggtccttgttccccgccagtc

SEQ ID NO: 32861 - DNA, 975 bp, Homo sapiens
  chr9:78505461-78506436
  hyper
cgtcagcgcctggctgcggccgctttcaagagggcggaggagggagaggaggagggcgatgtgggaaaggaggggtgttaaggggggcgggggaagtcatttatgcagagcaggagctgctgccattgccactcagaatcctcgcgcgctgctcggagccggagggagcgctgggagcgagcaagcgagcgtttggagcccgggccagcagagggggcgcccggtcgctgcctgtaccgctcccgctggtcatctccgccgcgctcgggggccccgggaggagcgagaccgagtcggagagtccgggagccaagccgggcgaaacccaactgcggaggacgcccgccccactcagcctcctcctgcgtccgagccggggagcatcgccgagcgccccacgggccggagagctgggagcacaggtcccggcagccccagggatggtctaggagccggcgtaaggctcgctgctctgctccctgccggggctagccgcctcctgccgatcgcccggggctgcgagctgcggcggcccggggctgctcgccgggcggcgcaggccggagaagttagttgtgcgcgcccttagtgcgcggaaccagccagcgagcgagggagcagcgaggcgccgggaccatgggctgggggagccgctgctgctgcccgggacgtttggacctgctgtgcgtgctggcgctgctcgggggctgcctgctccccgtgtgtcggacgcgcgtctacaccaaccactgggcagtcaaaatcgccgggggcttcccggaggccaaccgtatcgccagcaagtacggattcatcaacataggacaggtaacgaactacaggctagcccagccctcggccctgaagccactgggggcttcttgtcccctctgcgtggaaccccctccccctcttccagatgtgctctagcagctgttgccctaactcttgggcgatgctctgtctcctgcgcgc

SEQ ID NO: 32862 - DNA, 662 bp, Homo sapiens
  chr9:79520881-79521543
  binary
cgtggctaggggtttggaacccgggtactcggaggggcgcagtggaaaatctcggcccaaggaagacgagcggggtcccgggaaagtggcccgccggggcgcagcgaccgactgctccctcctgccgctctgaggcggctgcggcggaggctgtgcttgcgccctcgaccgtctcgcccagggctccccgccccacccctcgcccggccgccggctctgggcacccgactctgccctaataaggaaagtgggtgtgccgcccaggagccccggggcgcgccgggcacgctctctggcacgcgcctcgggcgccgtggcgcgtgggcggaggtgcaggggtatggcgaggggctcctccgccaatcgcagggccgtgctgcggcctcctgacgtggcgcgccgaaagctgctgcaaccatggacagcgcccagaagtgcgagccaagtgcaaggggctgctgcagagggaggctctgccgcaggcaccgccgcggtcagcgggggaaggtgggaagagggagacgggtcccaggagagcccccgcctcgcccagcgcctcactggctggctggcgcgttacggagcactccggcggtcacttaatgatctggtcggctggcctggccgggggaggcactcagctagattggcgtgggagggac

SEQ ID NO: 32863 - DNA, 1843 bp, Homo sapiens
  chr9:79632838-79634681
  binary
cgccatcccagagaaacctcatcttgtccaactcactcgctccaggaaagtgtggtggagcctccattcgccaagccctttagtgcctattctattaatttcttggttactgttcgtctcaccctctataccgcgatggtggagctcggatactgtctcctgtctccctgcacctggtgcctcacatgcagttggcgcgcaataaaactgagatgaatttggcatttggtgaaaacaccccatgctttcttccccatgagtttttccctccagccctctaatcatcggggtttcttgcagagaagaggccttgaggacacgatactctgaacttgacccagagtgtctagcccaggaaaaagggtttgtaaggagagagaagctcacagcgagtagatgaaaacagggaagggtaaaaggaagggggcggaagagggagatgccagagagaagagaagcaagaaggcagtgtcctgttccccctccaccgtgcttggtggcccgggtggggcgcagctgcgggaaatgcacccggagctgtgccccctcccggcgaacagcctgcgccacccgccgcaccgggaggtggctgggggctgccgagcgagtggtgaacgcgatgggtggagagcgcccgaaacgaggtggaaaagggggcgggggcgaggcacggcgccttcttgccccttcttcagctacagacgcggcggcggcggctgagtccctcagcctcggtcatgtgatagtctcgaagcgctagctgcgggggtctcggcgtctcggggaccattacaaaacgcagccaggagagcgcgtcgctgccactgccgtcgcctctcctcctcaagacaagcccgggagaaaggcggcagctgcggcgcggacggctgagcctccccggccagcactcacccagcattcgcagacgccctctccagcccgccgctcgctcccagagtcctgcgccccacactcctcagcagaacctgcgggcgctgccgcttcagaaaccaccaaagttttttctcctcagcgacagcctagggctgcgcgtctcttctaaccccggcgacgctgcgagcctcggagaaaagagaggcgccctagaagccaatcttctctctccttaccctgatttttcactccaggaaaaggagaactccagcgcggtctggctaagtgcctggccaggggcctgcgtccagggcactggaagtcctgctgtcactggcctccaggacagcaggcgcaaactcagatttaaagggccagagtctctactgcccagaccttcctcccagccatcttggtctgggtttccctcggacctagaaaaagcaaagaggccgggaggaaacacggccccttgccactctcctctgcagccagctccagcactcagtctttggccacccgggggaagacgcagagaaggcggcggtaaacctggtgcactccgcccgcgactgtgcgcgccagtcggcaaccgtcggggccagaagttgccagcttccgagagctgagtaggcccgaaaggccaaggtcggagacaccaggcaattcggagaaggcaggagagagaagcagagagggcctggagggcgagagggcaaagtggcgggactggaggggccgagtgggaattagtgggggcagccaggccccaggaacggagtgcggagagattctgtggtccagtgcgggccggagggcggtggaggagccgggggcgatgccgcggccggggaagagctcgtacagcgaccaaaaaccgccctactcttacatctcgctgaccgccatggcaatccagcactcggccgagaagatgctgccgctgagc

SEQ ID NO: 32864 - DNA, 1324 bp, Homo sapiens
  chr9:79634705-79636029
  hyper
cgcttcccctactaccgcgagcacacacagcgctggcagaacagcctgcgccacaacctctccttcaacgactgcttcatcaagattccgcggaggcccgaccagcctggcaagggtagcttctgggcgctgcaccccgactgcggggacatgttcgagaacggcagcttcctgcggcgtcgcaagcgcttcaaggtgctgcgcgccgaccatactcacttgcacgcgggaagcaccaagagcgcgccgggcgccggtccgggagggcaccttcacccccatcaccaccaccacccccaccaccaccatcatcaccacgctgccgcacaccaccaccatcaccaccacccaccccagccgccgccgccgccgcccccgccgccgccgcacatggtacactatttccatcagcaaccgcctactgctccgcagccgcctccgcacctcccgtcacagcccccgcagcaaccgccccagcagtcgcagcctcagcagccgtctcaccccggcaagatgcaggaggcggcggccgtggcggcggcggcggcggcggccgcggcagccgcggtgggcagcgtgggacgcctgtctcagttcccaccctacgggctgggctcggccgccgccgctgccgccgcggccgcggcgtccacgtcaggcttcaagcacccctttgccattgagaacattattggccgggactacaagggcgtgctgcaggctggagggctgcccttggcgtccgtcatgcaccacctgggctaccccgtgcccggccagcttggcaacgtcgtcagctccgtgtggccgcacgttggcgtcatggattcggtggccgccgccgcggccgccgcagccgcagccggagtccctgtaggcccggagtatggggccttcggggtcccggtcaagtccctgtgccactcggcaagccagagcctgcctgccatgccggtgcccatcaagcccacgcctgcgctgccgcccgtgtccgcgctgcagccggggctcactgtccccgcggcttcgcagcagcctccggcgccatccaccgtgtgctccgcggccgcggcctcgcccgttgcctctctgctggagcccacagcccctacctcggccgaaagcaagggcggctccttgcactcggtgctagtgcactcctaggggacccggcgggcgtggggagaccagcggggtgagagacgccgggcccggaaccgcccaaaccacccgacggggagagggcgccctggtcaggccgggcagagctggcgagtctcagcctttgctggaacggaaggtatttaaatagacgaacaacccc

SEQ ID NO: 32865 - DNA, 334 bp, Homo sapiens
  chr9:79636205-79636539
  hyper
cgctggtaaattggaagtcgattctgacccttattcctgggagcagaagctggcagagctaaacctcccgcgaagaatccaacagagagtgacgctgaaacggatctcagccaccacgtttctctctgctggtcgcatcctcggcggtcgcctctcgtgaacattcaagacaaaactgccgtccactaaggaaatttcgttttatttaagaaggaaaagaggaagcgtttgataccgttattttcctagtcagctaaatgggcaaggaaacggtgtcatgaataaagtcgctttggagggggaaggggaggagaggaggcagcgggaaccccac

SEQ ID NO: 32866 - DNA, 600 bp, Homo sapiens
  chr9:79637630-79638230
  hyper
cgtgagccatcacgcccggccaccacctatttttaatatgtccgtttcctaattgaacttaagtccaccaccatggtagagactgaattagcaaaaacccgcaacagtgcgtttttcctgtcaccactatccgtcacctctctcccattttgaggtcctcgactaccatctaaggccaggaactcggtgtcagcggggtgggtgcccgacggcgcccccttaagtctgcggtcctggacggaggcagccgggttggcgccgggacactgccgctgccgcatcaactaggcaagcgcgcccagccaccgccgcctagaagacctgttgcgcgccgacaccgcgcctcgcgggaggccacagcctggggcctgggaccgcagagttcttggtgggtgaaagccggcggccaagctgctcgagctgcgggaagggaacccttgggcagcggctgctgcagagctgctctgggagtgggccaggaggccccggcagggtgcggcgcctccgctggggcctgggaagccgcgtcccggcctccgccctccaccctttagcacaggtctactttgaaccagcttccgtgtgcccagccaggccaac

SEQ ID NO: 32867 - DNA, 710 bp, Homo sapiens
  chr9:80263018-80263728
  hyper
cgggaagatgcgcgcgccccttggcacaggagccggacagcagtcgggggcgcagacgagttggaacgtcggtgctcgggggagagtaggatctcctgggcctaggggtgtccccaggcgggaggtaggcgcggagtgggttggaggcaaaggacctggctggcctttgcctggaaagttctgaaaacctcagcagtgaccgcagactaagactgagtggaaaggttcccgctagcgtttgtggctctaagtggcaggaggaggcggagcatcttgaacctgcagccctggcgtctgctggacttgcccttctgggcaccccaagccgaaggcgcctggaagtgaaaggggacgagcagggggcgcggagctgggggtgggagctggcacctctaggagcagctcccacacttgcctccctggctggggcgtcccggccaaggtttgctgtaatctgcgcgtctggccgccaggcaccgggttccgacaggtgagtgagtttcgccaactcactcgctcggagaaggcggcagcaggctggaagaggagcggcgccaagcgtctgttgcgggacacaaagccccggacctgaagtggaagcttgcccaccagcttcaccaccacgcacacccggatttcctagactggctccttccgcttcccggacgccccggcccagctcgggcttggccaaagcccttggtcagctc

SEQ ID NO: 32868 - DNA, 2110 bp, Homo sapiens
  chr9:80645519-80647629
  binary
cggccactccaccgcaggccatcccccaacgtgccccggctccgctcgccacccgctgggccacacacacggctccccacgccaccaccccatggggtgccgcggccacgacactggaagttcaacccctctgcccacctttccacccccgcgcctctggtcggagtgatctgccatttagcagatgcacagcagataaggtacagccctcagggacacgaaaaggaacaagccaaggcaccgggcagggcagccccgacccctgtgctgcgtgtgtgtgtcgctgtgtgtgtgtgtgtgtgtgtgtgtgtgtgtgtctgtgtgtaacgcgcccgcgcgcccgcgcgggtgaaggcagtggccgggggcgcgcccgggagggtaggggcgaaccgcgggcgccggggggcgggggcgccgaaggcagctgccccgcagggccaaggatggtgggctgggggcgcagaggcccggcggggccccggacggtactcaccgagcagcagcagcttgagctcccggcgggcgtcccgcttgtccctgcggagctgccgctcgatctcgtcgttgatccgccgggcttccttggcctcctcgctcaggcagcacgccatgatggactccagagtcattcttccaaagtgcctccgctgcagccccgccggcaccccctgctcacagcgcgcacacacaccctcccgccctcgctcccccgaggcagcggtggccgccgagcccccgccgcccgggcgcgcgtccgggacgagctccgggaaccgccgcgggggcggcggccagggccggggccaccaggtgggccgggggcgcggtgggagcggatagtctgggccgacgggagaagagaggcgggcgcgggaggcgggcgctggctcggggggcgcgtgagagaaggccgccgcgcccggcctcgctcagacgcccgcgcctccttccccgggaacaggcggcccgcctcgccccccgagccgccgccgccgccgccgcctgcgaggctcccctacgccgtgcgcctggcggcgagagctcattcaccggggtgtccccgcagcgagcggccgccgacggctccccgcgcccggcgcgcccgctcctcgccgccgcctgacacggctcccgggcgccctcggccctgtccgcgcccaccgcccggctcgcgcgcagacccggttcccgtcccgcccggcaaccgcgcgctcctccgcctccgcctccgcccccgcccccgccagacgcccaccccctgccccgattgccaggcgcggagcggctgctcagtgcgagccctccccctcgccacacacacacattttcttctttctctgaactggagcacagatccgggagggaggaggcggcggcgaaaggaggaggaggaagaggcggaggggatgggcgcgggaggagggagccgggaggcggtgccgcccggcccctcctggaaggctttcctgggctcgcggccgccgcggcgcgcctcccagtgcggctctcgcctcgcccgcgcggctcccgggctgggccggcccccgcgggctctgcggacgcctactgctcccgcaccctcggcagagtccgcgggcgcagcagtcacggccgcccccggccgaagtcggggccagacccggccgccgacgcgcagcccgagccggcggccgccgttgcgtgccagggccgcagccgacctgcggctgccgtccggccgggcgtggtgagacaggaatatggcggcctctgcctgcctcagcccaccggcccgggagcgcggccgcggcccctgctgaagtcgcgggaggcggccccgcggagccccgcacgcgctccctgcggcgccggcgctggcgtccgccgctcccgggctgtgcctgtctgctccacggggtcgctcctcagccgtttctgtgtttcccgttcctatttctaaaacgccattcggttagaaactctcacgtcacctctgacaccggtgcagtcttagaaaataagctcctctatactgtgtggggctactggggaagggaagggaaggaattggcaccggtgcccagaggtgtagggggagattcacaggcgaagctgttcgcaaagtaac

SEQ ID NO: 32869 - DNA, 824 bp, Homo sapiens
  chr9:842882-843706
  hyper
cgcgttccaacagaattgggagggtttattgcgctagaggagtcttcaggatcttcgctcccgccctccgaggtgaggctagaggggagggttcgactccaagggaatcccagggatctctagccccgctcttctagcagagaattaaggaattctctccgctttggggtcccaaaaatctccgaccgcgccttgggagcagagggtttcggggttcgatttcctcgagcgtccccagaatctctgactctccctccttgctgagttgcacttaaattagaaaggatcttggagggcggcagcgctggctgctaggttagcgggaaagggaggctcggccggctgctgcttacgcgggtaacctgtcggaaagccttgtttgtttttctggaaaagtcgctgcaatggacacagcgttgcgcggtttccctgcgcgcctggggcgctttttgtcttcgccctccgtggatggaggctgagcgcctcagccattttgagagctctggaaattttattagcattttaaaatttgcattctcgaccgaagattaaagtgcaaattactttgaagatgttttaaagcacgcttaagaattttaaagaatatgcgcaggtggaaaaaagcgcgccagggtttgagatttggtccgtctgtggttttgtttttttgaaggttcgtaagtaggctggtaatttaacattttaacggaaagttaatgtctttagtattctaaaaggatttttggaaggcagtaatccacgttatttccagttaaaagttgtttcatctttttaagacaggttatttaaaatgaaaagataac

SEQ ID NO: 32870 - DNA, 811 bp, Homo sapiens
  chr9:85677440-85678251
  hyper
cgccgccgccgcgtcctcgtcgccttcgtcctcctcgctgtcgtgtgtctccggccccgcctcagacacggcgggcgcgggatccagaggaccccagtcccggcgccgccccccgcggagggacccgaggaagccacgcgcgaactcctggaaggtgatggcgccgtcacggtcggcgtccagccgctggaatactgcctcggcgtcggccggccgcacccgcagctccgtgcacagtgcccggaactcctcgcgctccaggcgccccgagcggttcgcgtcgcaggcggcgaagactgagcgcagccgggccagctcctctccgtccccatccgcctccatcccgcctggcgggggcggccgagagggctccggagcgccgcggggcgcagggccctccctggaaggacggggccacctgctgccgccgggaggcccggcgagtttggctcgtccggctggttcggccacttgagggaacgtcgggcggggcgaggaacgtcgggggtggccgagcggctcccttcgacgacggttcgggccagcccccaacaggtcccgggagcggtggggtgcgcccgggctccaggcaccgccaaggagcgcctcctgcgactgagcgcccaagcgccgaggtggctctcgccactttcccggcgggtgcagctccgcccagccagggaggaggagcgcgcgccaccgcttctccagttcccacgccccggagtccaccgctgcttgccgcgcaggtgggggagacctggctggccggaactgggattcggggggagcattgcccttcggcgtaagc

SEQ ID NO: 32871 - DNA, 1496 bp, Homo sapiens
  chr9:89560777-89562273
  binary
cggccgcccgatgcagcagcgccgctgcccgggcgcggtgggtgcgggacgccgtcgtcgtcgtccagcggctgctcaccacccgcgcccccggtgcgctgctcgtcatcgtagtcctcatcgtagtagtcgtccaggcccccgtccgagccgctgctgccggggccgttgcccagctcggcgccgaagcacaggcgggccatgttctccttgaccgactcgcagatgggccgctcgaggccgtcgcacacgcagtcgttgagcagcgccgccttgggcatagccagcatgtcctcaatgacggtgcggcattcgtccgtgcagcgcagcccgttgaagactttgccgcagtaggtcaggtagcggctcagcgccaggttgcagcggctgtcgcggtcgcagcgccgccgggcctcggtgcagcccatgaccccgcccgcgccggggccgcccgcgccgccgccgctcgtccggggcaggcacggctcaatggcgcgcttggtggacttgcagttctcgtcctgcgcgcagtcacagtcctccagggcgggcccgcggcgcgtgtggttgagctgaatgagggccgagatgcagtgactcgggcagcgccagcgcgacgagaaagaggcggccgaggccgggaaagcggcggcggcggccccgggcgcgtcgcccccgccgtgctgcgccagcaccggcgcgcacgcctcggcgtactggttgtaggcgtagctgcactccggctccccctggcactgcagcagcgcctgccagcagatgaggcggcggccgtgcgccagccccgatccccgcggcgccgagcccagcagctgcagcagcgccatcaggcacagccaggcgcccggcactgtccccccgcgggcctcgccgccgccgcccagcagcgcggccaccatcgcgggcagcggcggccgccgggagaggaggggaaaggagacgaggcgcggggagcggcggacgcggagccggtggaaaagtttgtccaagtcctgcccacttcttgcatgagtgtcttcataaatccatgcgcgccgctggctgatgccccgctggtggcagaaggtcccctttcgctctggctgcggtggcttcctggaaatgaacagctgtcgagatctggtcccgctctcccacccgagagccctccgctcggcccccggtggtggcgggagaggctcactgtcgccccgggggggtgcgggccgcggggccgtggcggggctgcaggaccgcgcggcgcggcgggtgcattttgctccgcgcctgcagatccgttgtgcggccggctgtccccgtgccggctgctcgcgctgcggccgcggcggctccttcctcctgggctcagtgcctcgccgccgccaccgccgccgcggtctctcgcatcgcgccgcttcctggcccggcgtccgcgcgctgcccgccttcccgcggcccggccgccccgcgtcccctccccctccgcccgcggcaacccc

SEQ ID NO: 32872 - DNA, 757 bp, Homo sapiens
  chr9:90112514-90113271
  binary
cgcccgcgttccgggcggacgcactggctccccggccggcgtgggtgtggggcgagtgggtgtgtgcggggtgtgcgcggtagagcgcgccagcgagcccggagcgcggagctgggaggagcagcgagcgccgcgcagaacccgcagcgccggcctggcagggcagctcggaggtgggtgggccgcgccgccagcccgcttgcagggtccccattggccgcctgccggccgccctccgcccaaaaggcggcaaggagccgagaggctgcttcggagtgtgaggaggacagccggaccgagccaacgccggggactttgttccctccgcggaggggactcggcaactcgcagcggcagggtctggggccggcgcctgggagggatctgcgccccccactcactccctagctgtgttcccgccgccgccccggctagtctccggcgctggcgcctatggtcggcctccgacagcgctccggagggaccgggggagctcccaggcgcccgggtgagtagccaggcgcggctccccggtccccccgacccccggcgccagcttttgctttcccagccagggcgcggtggggtttgtccgggcagtgcctcgagcaactgggaaggccaaggcggagggaaacttggcttcggggagaagtgcgatcgcagccgggaggcttccccagccccgcgggccgggtgagaacaggtggcgccggcccgaccaggcgctttgtgtcggggcgcgaggatctggagc

SEQ ID NO: 32873 - DNA, 898 bp, Homo sapiens
  chr9:90340643-90341541
  hyper
cggctctgcggaccaaaaattccaggactaaggaatagcaaggttaggctgaaacagtccacacagggcttgcggtaaacgtcttttcaggagccactcgcccagtgcagtaagtcgtgtacttagttgactcgagcgctccagggagacgcccgaccctactctgcgccgccccggggcaccagctctgcttcctccaggtccactgaggcaggcacgcccagctctgggacagtcagtaaacaagccacgaaccgcgccagggatcagagcacccagagtccccgcccagctgccggcacagccaatcgcagcgcagccaggcggcggggcggtgccggccgaacccagacccgaggttttagaagcagagtcaggcgaagctgggccagaaccgcgacctccgcaaccttgagcggcatccgtggagtgcgcctgcgcagctacgaccgcagcaggaaagcgccgccggccaggcccagctgtggccggacagggactggaagagaggacgcggtcgagtaggtgtgcaccagccctggcaacgagagcgtctaccccgaactctgctggccttgaggtggggaagccggggagggcagttgaggaccccgcggaggcgcgtgactggttgagcgggcaggccagcctccgagccgggtggacacaggtaccgcagccaggccgcgccgcgccgactcagggcctggcccggccagacagggaagctcagtccccgcacgccagacagcggtactcctgctggcgtcaccgcaaacatcctctgaccgctacagccagtgtgtggcgcaggcgtcatgtccccggccctgccacgcctggagccctggaagctggctgcagggcgctggcttcccgcgtgcggccatatgacccc

SEQ ID NO: 32874 - DNA, 378 bp, Homo sapiens
  chr9:91149028-91149406
  hyper
cggctgcgggacacctgcggcggggcccggcagggagcgcgagactggaagagaggccaggagggaaggagagcgacgcggggttttgggggaggggctgcgtggggcgctgaaggggagcgcgaggagtgggaggaagtgaaggaggaggaagagcacggtgtgggggaagcgcaggaggcaataggtggggcgggacggagggcagggcgctgcgtcgggagaaagtgtagaagcgctggggagagtgcccacgacgggagagcccaggggcgcgagggcgcgggagtgtgggcggggcgcagtggggatgggggcgggggcgcgggatgtggtagggggcgtagtggggagagagtgcaggagtgtgggcagggc

SEQ ID NO: 32875 - DNA, 1000 bp, Homo sapiens
  chr9:91149647-91150647
  hyper
cgaggcgcagttggagaagagtgcggggatgtgggcggggcgcagtgaggggaaactgtggaatgtgggcgaggcgcagttggaggagagtgcggggatgtgggcggggtgcggtgggggagggtgcggagatgtgggcggggcgcagtgggtggagagtgtagggatgtgggcccagcgcagtgggggacagtgtggggatgcgggcgaggcgcagtgggggcgggggcggggatgtgggcggggcgcagtgggtggagagtgcgggatgtgggcggggcgcagtgggtggagagtgcggaatgtgggcggggcgcagttggggagcttgcggggaatgtgggcggggcgcagtggtgggagggcgcaggagtgtgggcggggcgcagttgggggagggtgcagagacctgagggcttgaggttgcctggctggccccgctcccagaggcgggtgccgcgctgtcgcccaggtatctggggtctctggtgtctgagtgtctcattgtcggcgcgaacacaattgctccagccacaggcgaggcctggccaaggtgtgggcgcatctggggcaggtcttgagaggtccagcgcccggtggtgcggacagaggcggggcaccgcggcgctcgccgccgcctccccgcaggtgatcatcctcctgcaggtgtcctcgggtctcaggtggctgcgtgtctgcgccatggttgacattctgggcgagcggcacctggtgacctgtaagggcgcgacggtggaggccgaggcggcgctgcagaacaaggtggtggcactgtacttcgcggcggcccggtgcgcgccgagccgcgacttcacgccgctgctctgcgacttctatacggcgctggtggccgaggcgcggcggcccgcgcccttcgaagtggtcttcgtgtcagccgacggcagctcccaggagatgctggacttcatgcgcgagctgcatggcgcctggctggcgctgcccttccacgacccctacc

SEQ ID NO: 32876 - DNA, 967 bp, Homo sapiens
  chr9:94711117-94712084
  binary
cgcccgccctcctccacccccgcagggtgccgagaatccggcccgaggcgcgcgggcgggaggtgctcccggagtctgcaccgccagagctaacgccgcctcctccaggcaacctaggcaggtcccaagctgcacttccgaacctccccgccgttcctctgcgccccggatccaagcagccgaaaccgcgcagggactcgggggaagtggggccccgggaggaaacccacctaggagccgggccccgcccctcccgccgccagcctcctacaggtcccgggggtccccccggcgcggccagaaggcggccgcgccccagccgctcagggacccgcgatcccagtcacaaaccatttcaatccagatcacacaccacttcggccaccccagagcggtgggggagaggaggtttcagggaccaacaaaagggatgccaaagagcccgtttccatcaagcggcccgcgggctgggaaagtcaggacccgggagccgccggcgcccccacccccgccgcaagagccgcttctccggggccacgtccaccccaggattctgccaggcatcaggccgccctgggggtggggggacgctccgagacagacgggggacactcggggccgtgtgcccttgaaggaggaagacctcggggaggaagcccgggtcctgggaccctcggggcacatctgcggactcgggtcccgggcccagggcgggtactcacattcacactcgcactcccactcgcgaccctcgggaagcgccaccgagaggctcccagccgccgccgcccgcccccagactctggaaacacttaggcgtccccagagcgcggcttattgtaaccagcccgagggggtccggggtgcgggccgggagcggcgtcgggcgagatgcgaatggccctgcctggcgcccctcgttcaggagcatgggcgccggcgcagcggccgggagcatagtggcggc

SEQ ID NO: 32877 - DNA, 310 bp, Homo sapiens; identical to SEQ ID NO: 29570
  chr9:95492133-95492443
  hypo

SEQ ID NO: 32878 - DNA, 755 bp, Homo sapiens
  chr9:95946034-95946789
  hyper
cgctgagccccaccaggcttagccccaggctgggctcccgagggcggcggtacccctggtccttttcttcctagcctgcccattctgtcctggcacagggccttgaggtctagcgcgccgggctgcggcgtgctgaggcgttgagcctgctgcctcctctcaggaagaaacggggtcctccgcagctgacagccctgcggggcgttccaaagaacttcagaggacaggagcgctacctcgagcaaagaaccgcgggtgggagcccaggtagccggcccgcaggtggccgcgcgcgcctgccagtcagccagcccgtccgcagccaggtgggcgtgccaggcccagccccctgcgccggtccggggcggggcgaacggagccccgccctccccgcgcgccgggtcggagccggtgcgggagcggagccgcgcgaagccggcaggagcacgcgggagcgcggccccgcagtggcccggcccgagagagcagcgcgcaggagctggagcggcgccacggcccccaccccagcgcggacctcgcccggaactcggaccccgtcctcgaagcgtgatctctcccgcctcgcacgccctggccgccgggccgcgggcatggacggcgtccgctcgccctgtgagtgccgagcctcccctcaacgccgctcgccgcctttgtgtgcgcgccgcggcgctgcagccccctccccgcgcgcccctcccgcgccccgggcccgcgtcctttgtggagccgccgcc

SEQ ID NO: 32879 - DNA, 1603 bp, Homo sapiens
  chr9:96716664-96718267
  binary
cgaagcaggtccgcactgcggccaaggccgcgttcctcgcccgctggagctcccggggactccgggccggcttgggcccgcgtcagcacccagccctcgggagcgcaggcctcctccccagaggtccgacttccctgggttgggcagccgcggccactcccggccatccctctgcggcgaagcccaggcgcccgtggcctgaggtcgcttccacccacgagagtccgtagcctggcagtgcgcctgcactggggatgctcactcggggtccccgggctggaggccgaagggaagcagtgaaggaaagagcgaacaccctccccgggcggcccgcgggcacgaggcctggtttctgtgaggcctggagcttgcaccctccgcctcccgcctggagggctccgagagacggtcccagaacctgcgctcccagagcagcttcccggggctgcttcgatgccggaggaggctcggggcgcccccgcggttcagctcgctgtctcccgccaagcccggcccgcgaccccgcggccgccacacgtacccaggtggctgtggaagggccgcgccgccagcagcgcctgcacgccgaacttcagcagctcgcccgccgcggcagcggcggctgcgggcgcggcgcccttgggcccgggtggctccgtgaggatctcctcaatcatgaagctgcgatagcggtgcggccggtggtccgcgcagccctcgggcgggccgaagcgcgcggcgcccggctcccccggccgctgcatcgcggcgcccactgctgcgcccgcggtttggcggcggcggcggcgacggcttggctccggcgcggggcccgcgcggggctctaggccggcccgcagctcggggcggcgcgcgggcgccggctcatgccccctcccccgccggccggccgggcggaggcgcagggcgcgggcggggcgcgcggggctcggccggtcgaacccgggactgcgccccctccccacgccgccgcgcctcttgcccggccagccccgcgtcaccgccccgccccgccccgccccgcgccgccgcccccaacccctaggctgagccggagggagggacccagaagggagggaggcggaagggaggccaaaaaggagggggccacgtgaaagaggccggccgaccgagaccgagggagactgagcggagcgcacgccctggaaggagagagccggagagttcgggaggcaagacccccagagacgagagtcggagggatcaaacgacacaggtgagagaaggggcagaggcagacggcgtgggccaaacaagattccagacagtgatgtgagggcaccagagacgccaccgagatgtgcgcagagagaccaaaagaggcgtgagagccagcgggctgtgacgtgacggagggcacagaggcaggcggggcagaggaagggggcggtaaagaaatgggaacagctagaaaaccggcggcttgatcggcttttaggtagccccggaaaggtcgggaggaggaggggcaaaggccgcgctcctcagctgggaaggaggtggtctcaagcagcctccagtcccgggctcaacaccgccaacccggcaagggtgaggcagc

SEQ ID NO: 32880 - DNA, 831 bp, Homo sapiens
  chrX:2846679-2847510
  binary
cggggaacacggccgtgctggaaggcatcgagctggggggttgggggcgggacggggtgcctcttaggaagtggggcgggcaaggctacgcttcgggggatggagccttggggcgggacggggcgcgtcttagtggggcagagcggggggcgcggttcggggcgggtcttagggagcctttgaaggccgaatccgggcagcggtgtagctgggcgtggaaggcggaggacccagcagggcgtgaccggcccagtttccgctccctccgggtcccggccagccttcctccgccctcccttcccttcctcctttgttctctttccctgcccttccgccttcccttcagttcggtctcctccacccgcccttcgtcccctcagtcgccccccatccctgggctctgctgtctggcgtctttcccgggcacagaacgcgcctccagctacattttggagactacaaggcgccggacacaaccacgccctttacaggggcccaggctcgcccggggcgcccctcgccgtgctcgcgaccccctccccaggcccccaccctaggccttagtatgggccgcgtcccggggtcccaggcacctggcggcgggcgcggcgcgtcccctccgcgcggcggatcgcatggccgagcgctggcccagagcgcaggaccttgccctgcgcactccgcgcccgggcgccgctagtgccaaggcttccgccctctcagctgcgggatctgggccgggcgcccgcccctccttcatccgcgtcatctcctggctctcgggacctccgggacctgcgcgtggaaacaggttttcccaggtcgtcacac

SEQ ID NO: 32881 - DNA, 1316 bp, Homo sapiens
  chrX:8698495-8699811
  binary
cgcgaacgcgccagcttcaccagccggttcaagatcatccccgagggtaaggggaatcacttccacattccacccttattaatatggcctcctctggcagcttaattcccagggcctctagggggacccccccccccaccccttgacccagctctggcaggaggggcgcccagtttaagagccaagggtttggcttccagttcccgcccagccaggggaacccctccccccagcccccatttctccttttggtccctccagagtttccctgaagcgagaaattgggaacttggaacaggtgggcacctagggatagaggcgagaagaagaaggagagaaggatgagagaagagaaaaataagcggaggatttcagagctcgcacgctcgacagggctggtacaggcagcagctgcactcgctcgcgctgagtccggaacctgctctcgtgcgcccacccgcacccggagcctcgcgcaagtcccgcgggggtccgcgccacagggcagagtcccggcaacccgctggagccaagcgcgcggctcccggagcctcccacacaagcgcgcgcgcacacacacatactccccaccctcaggctgaaagaacctacgttcggggtttgggggacggttcccccgggactcgttgaggagtatccgaatacggccccgccaaatcccctgtccccggcacttcttccctgacgctctacgctagtccagggcaagaccttgaatctttggggttccgaattgaggcgcgcacagccactcgcacccccaacacgcgcatacacgcaccctggaacacgacttggcacaagtaccctggctggggctccaagggtgggcagcgagctctgagccctcagagagtgaaaaccatctttcaaaagagacaaagtgtcggcccgcgggcacctgcggggctggggctcgaggtgaggtccccaggcgcagccggacgcgcctcccagactccctcccagtgccccggagcgcctgggactttgcgggagtcgccgcccgcccggagtctcgcgcactccaattcccgggaaaccgccacatccacacacccactcccagcatccacgactctccctccccagggaaatcgcctttggtttcctgctgggaaggagggagttggggcaagatgtctcgggcttctttttcttttcaggagccgggaagaggctggaaaggagagttccagcaccccgactgtaagatccacgcccaggggaagccaggatcagccggcggcgctggccgagaactttgcgagcccaggctgggaggcgcgcgcccc

SEQ ID NO: 32882 - DNA, 129 bp, Homo sapiens
  AEKP01153556.1_1-5252:392-521
  hypo
cgtcatcaccgtcatcaccattatctccaccactgttgctgtgaacgcatactgcactattatcacctgaggtacagtgacaacgttgtgtgatgctaaaatgtgagcttttctatctgccgatgattc

SEQ ID NO: 32883 - DNA, 411 bp, Homo sapiens; identical to SEQ ID NO: 29578
  chr1:10707634-10708045
  hypo

SEQ ID NO: 32884 - DNA, 138 bp, Homo sapiens; identical to SEQ ID NO: 29579
  chr1:10713961-10714099
  hypo

SEQ ID NO: 32885 - DNA, 863 bp, Homo sapiens; identical to SEQ ID NO: 29580
  chr1:10719750-10720613
  hypo

SEQ ID NO: 32886 - DNA, 204 bp, Homo sapiens; identical to SEQ ID NO: 29581
  chr1:118163688-118163892
  hypo

SEQ ID NO: 32887 - DNA, 199 bp, Homo sapiens; identical to SEQ ID NO: 29582
  chr1:118166377-118166576
  hypo

SEQ ID NO: 32888 - DNA, 142 bp, Homo sapiens; identical to SEQ ID NO: 29583
  chr1:12241609-12241751
  hypo

SEQ ID NO: 32889 - DNA, 186 bp, Homo sapiens; identical to SEQ ID NO: 29584
  chr1:12630214-12630400
  hypo

SEQ ID NO: 32890 - DNA, 315 bp, Homo sapiens; identical to SEQ ID NO: 29585
  chr1:12638803-12639118
  hypo

SEQ ID NO: 32891 - DNA, 121 bp, Homo sapiens; identical to SEQ ID NO: 29586
  chr1:15102346-15102467
  hypo

SEQ ID NO: 32892 - DNA, 298 bp, Homo sapiens; identical to SEQ ID NO: 29587
  chr1:152733117-152733415
  hypo

SEQ ID NO: 32893 - DNA, 220 bp, Homo sapiens; identical to SEQ ID NO: 29588
  chr1:15283890-15284110
  hypo

SEQ ID NO: 32894 - DNA, 383 bp, Homo sapiens; identical to SEQ ID NO: 29589
  chr1:15374975-15375358
  hypo

SEQ ID NO: 32895 - DNA, 517 bp, Homo sapiens; identical to SEQ ID NO: 29590
  chr1:16464269-16464786
  hypo

SEQ ID NO: 32896 - DNA, 645 bp, Homo sapiens
  chr1:16474862-16475507
  hypo
cgtcactcaccctggcaggcatcctccaccttctcgtagcctgcctggcacaggcactgcccaatgggcaccagccactcgccatccactgcacagtgcatacggggctcttcaccccccggtggcaccacggcatggtccacacaggtgccggccacagtggccagggaaggtgcatcagagccggcgatggtctcagggaagtgggccaggccctgcagcagctcggggcacttcttgtagtagacacggacggagagcagcgccacacaggcaccgatatcctggaaggccaggtagaagcctttgcgggtgagcggccccacggagcgctcctccacgttcagcttcacgtggcgtgcctcgaagtcgctgctgacggtgatctcatcgggcgcaatggtgtcaatcttggtgaacaggcgcttctggaagttggtgccgtagtccaggtccgactcggcatagtagaggttgaaagtctccttgcaggagctggcgccaccagggaagctgttgcagtcacgtacagtaaacttgagctcaatgaagatacgctcagcctctcctcggtacacccagttggtgcggagccagttgtcctggtcgccagacatcacgttgcacacggagtacatgtagatc

SEQ ID NO: 32897 - DNA, 515 bp, Homo sapiens; identical to SEQ ID NO: 29593
  chr1:164768766-164769281
  hypo

SEQ ID NO: 32898 - DNA, 403 bp, Homo sapiens
  chr1:175372314-175372717
  hypo
cgcagagcccctcctcacattgtcctcgcccactgcaggcattcagacactgccgctggccgcagtcctcaccaacgtagccctcctcgcataaacaggtaccgttggcacatctccccttccccgaacagtccccagggcacctcagttccctgcagtcctcgccagtgtagggctcttcacagacacactccccgtccacgcagagcccccgggagctgcagtctgttgggcaccggagttcggaacagtcatccccgctgtactcgctgtcacagatgcactggccatccacacacaccccccggctggagcaacccagcgggcagtagggctccgagcaattcttgccaaaccagccttcgttgcagatgcagccacaggactcaaagctaaagttgcc

SEQ ID NO: 32899 - DNA, 310 bp, Homo sapiens; identical to SEQ ID NO: 29596
  chr1:18023481-18023791
  hypo

SEQ ID NO: 32900 - DNA, 247 bp, Homo sapiens; identical to SEQ ID NO: 29597
  chr1:18026186-18026433
  hypo

SEQ ID NO: 32901 - DNA, 226 bp, Homo sapiens; identical to SEQ ID NO: 29598
  chr1:181382621-181382847
  hypo

SEQ ID NO: 32902 - DNA, 121 bp, Homo sapiens; identical to SEQ ID NO: 29599
  chr1:181765823-181765944
  hypo

SEQ ID NO: 32903 - DNA, 336 bp, Homo sapiens
  chr1:181767556-181767892
  hypo
cgacacgcgggcagcatctctccacctgctgatggaagcgaggagggctccccgctgacctcccaagctctggagagcaacaatgcttgcctgaccgagtcttccaactctccgcacccccagcagagccaacatgcctccccacagcgctacatctccgagccctacttggccctgcacgaagactcccacgcctcagactgtggtgaggaggagacgctcactttcgaagcagccgtggctactagcctgggccgttccaacaccatcggctcagccccacccctgcggcatagctggcagatgcccaacgggcactatcggcggcggaggcgc

SEQ ID NO: 32904 - DNA, 302 bp, Homo sapiens; identical to SEQ ID NO: 29602
  chr1:203134410-203134712
  hypo

SEQ ID NO: 32905 - DNA, 189 bp, Homo sapiens; identical to SEQ ID NO: 29603
  chr1:204124923-204125112
  hypo

SEQ ID NO: 32906 - DNA, 370 bp, Homo sapiens; identical to SEQ ID NO: 29604
  chr1:204197954-204198324
  hypo

SEQ ID NO: 32907 - DNA, 154 bp, Homo sapiens; identical to SEQ ID NO: 29605
  chr1:204199556-204199710
  hypo

SEQ ID NO: 32908 - DNA, 383 bp, Homo sapiens; identical to SEQ ID NO: 29606
  chr1:204226544-204226927
  hypo

SEQ ID NO: 32909 - DNA, 277 bp, Homo sapiens; identical to SEQ ID NO: 29607
  chr1:204228369-204228646
  hypo

SEQ ID NO: 32910 - DNA, 75 bp, Homo sapiens; identical to SEQ ID NO: 29608
  chr1:204913459-204913534
  hypo

SEQ ID NO: 32911 - DNA, 171 bp, Homo sapiens; identical to SEQ ID NO: 29609
  chr1:204948556-204948727
  hypo

SEQ ID NO: 32912 - DNA, 315 bp, Homo sapiens; identical to SEQ ID NO: 29610
  chr1:204955352-204955667
  hypo

SEQ ID NO: 32913 - DNA, 256 bp, Homo sapiens; identical to SEQ ID NO: 29611
  chr1:207195396-207195652
  hypo

SEQ ID NO: 32914 - DNA, 560 bp, Homo sapiens
  chr1:207200605-207201165
  hypo
cggcggaaaaagtctcatttgcccagttgctctctaaggtcgtcccatcctattctctatagagccagggctgactcaggcagaaagcacccactggtgttgtgaatcactccccaacaatgaaagagaaggtgcagtgagccaggatgggtggcaggaaaggatagggcagggcagggcagggcaggtgtgcagagagcagaccaggttgcgggagggagagtattacgtacagatccagagcgggtggaggtgctgctcatcatgctgtcacagctgccgacacgggtcacgggttctgagccagtccccgctggccacagctccctctcgggcatcacccgaaacaaggtgcagggatggcaaagggggcttctagaggggaagcgaggggaagtgaacaatgtcccaagccgggcctgaaaagagaagaatcaaagccacacatgagccgaggcttcggcaaggctctgcccaggccctgggcggcatggcgggaaggacaccaagcaagcagagagctggaaggggggcatgaacagccactgcccgacaccccc

SEQ ID NO: 32915 - DNA, 311 bp, Homo sapiens
  chr1:214637813-214638124
  hypo
cgtgctaagaataacaggattcttataaacacatcgtcgcttaggccaaaaaacacaacagatgccaaaaaacagatggctggtcccttcggtgagttctccttcacatacccaacacgcatgcacgcgcacatgcgcacacagacacacccctcttacctctcgcagctccagcctctgggccacagcctccaggcattcttgccctgtgctttccaccgacagcgtgcactcgataacattgctgtccagcaggcgaatccgtgtgacaaagcagttcttgctcaggacgttgtagcgccgtgtccggc

SEQ ID NO: 32916 - DNA, 108 bp, Homo sapiens; identical to SEQ ID NO: 29615
  chr1:21889603-21889711
  hypo

SEQ ID NO: 32917 - DNA, 1367 bp, Homo sapiens
  chr1:2275654-2277021
  hypo
cgagagcggcatcacctgagggctgggcgtggccaggcacaaggggctggcgggcctgggagggatctgcagggcaggttgagacatggttctgaagccaggcagctgctccccagaagctccggtgagcacactcgacaaggtggtgcggcgagctggctccgagcgtcccccacagggccacattctcactattggggtggcaggaaggcccagcgaccaggagcatgtgtggggtctgggaaaggcctgggggacggggtgtggggtgcaggagccccaaggccgatgctgctgaggaggccaggagcggggaccgcacagacggcagttcctctggaggggggtcccgtgtgggccgggctgtgcaaaggacacactggtccctgctggcctctcagggcaagcgtgaggaccctggcctgctccggcctccttccctgggggcctcgtccctgcgctgcacagatggggcccggccgccccagtgggaagggaaagggggagcgctgtgccaactcacaggctctacgagccacaacagctgcctgcagagcctgggggcagggctgaagctggccatggaggaccttgggggccacctccaccttccagcagcaaatgccaagtccccgaatgcagaattctgccagagggagcatgaccgtctctctgttggcacaaagcgagagcatcaaagacagcgtcagcccccgcgagggtccacgcatgctcacactctgcgctcatggatggccacacacaccctgaaaacggcgtcagcctccgggagggtccacgcgtgctcacagcactcatagatgaccatatgtgccccgaagacagtgtcagcctccaggagggtccacgcgtgctcacgctctacgctcatggatggccacatgtgccccgaagacaacgtcagcccccgcgagggtccacgtgtgctcacctgcgctcatggatggccacatgtgcccgcaccctcgcacaggcatgggcggtccccaggctgccacactcagggtctgtctgtgccccggcacctccaagccattccttccaccaggccagggccaggcctggacacctgccacctaccacccgctggggcagcagccacgcactcccccactgctccctgttggcggccaggcatgggccggccttgttgggggacacaggacaattcggggcacttgtcttgcctccgtcctccttggagagcctcgggctcaccctacgtggctctgaacaacaagggccaggctctgcaccgggggaccccctgccctgccagccggaccctcaggccgctcagagggccagtcccagcacctgcccctcgccagtggacacaggctgcc

SEQ ID NO: 32918 - DNA, 408 bp, Homo sapiens
  chr1:228081860-228082268
  hypo
cgcaggagaaggggagcaagtggggcggagtgactgcatcctttgggtactggcatgggacaaggtgggtgcccgagagccctggagcacagatgtctgtgcacggctctgtgcaccagcccaggtgcagggtgtccacagtgcaagagcccacaagcacacaaccacaataggtgttcgcacacgagcccaggatgtgtggtgcctgcaggcatgtgcccaggacccaaggtgtccacaaacgtacccatgcccttcacatggactcagacacagggtgtccacgatgcaagcatccacgcacgtgcccatgccacatgcacacaaccatgaagggtgtccatacacaagccccggacacatggtgcttgcaggcatgcgcctgggacctttggttttcacgaacgc

SEQ ID NO: 32919 - DNA, 581 bp, Homo sapiens; identical to SEQ ID NO: 29619
  chr1:228109246-228109827
  hypo

SEQ ID NO: 32920 - DNA, 129 bp, Homo sapiens; identical to SEQ ID NO: 29620
  chr1:229160222-229160351
  hypo

SEQ ID NO: 32921 - DNA, 117 bp, Homo sapiens; identical to SEQ ID NO: 29621
  chr1:233601764-233601881
  hypo

SEQ ID NO: 32922 - DNA, 499 bp, Homo sapiens; identical to SEQ ID NO: 29622
  chr1:236156658-236157157
  hypo

SEQ ID NO: 32923 - DNA, 145 bp, Homo sapiens; identical to SEQ ID NO: 29623
  chr1:236274591-236274736
  hypo

SEQ ID NO: 32924 - DNA, 265 bp, Homo sapiens
  chr1:248027980-248028245
  hypo
cgatgtgatccacggtgtcacctcaggagaaagtggaaatgcagaggcagcgcttcagattggagtttgagaagcatcgtggctttctggcccaggaggagcaacggcagctgaggcggctggaggcggaggagcgagcgacgctgcagagactgcgggagagcaagagccggctggtccagcagagcaaggccctgaaggagctggcggatgagctgcaggagaggtgccagcgcccggccctgggtctgctggaggtgaggcc

SEQ ID NO: 32925 - DNA, 433 bp, Homo sapiens
  chr1:2725544-2725977
  hypo
cggcctcgcaggtgtggttggggtgggtggggctgccgtgggcctggctccatggctctgtgcaggtggcagccggcgccgcgtgtcgccacccacacaggaaaggcgagattggtggcagaggccgtgtccgcgtcatcatgggagctgcagctcttcccttagttccctgcacccacttattgaggggggctggtcctcctgggaaaggacctggcagcatccccgggcgtgggacacatgcctcgcagcagagttgggggacacggggctgtgcccgccctccctgcactagaaccagcagcagcaaacagcccccagctcggccgctgaccatgtcctgctcgggtctcccgggctggccctggcccgcttagcctggactcaggtgcctgtggccggctgctcgtgccttcccatcctggggcaaccc

SEQ ID NO: 32926 - DNA, 215 bp, Homo sapiens; identical to SEQ ID NO: 29624
  chr1:2726383-2726598
  hypo

SEQ ID NO: 32927 - DNA, 204 bp, Homo sapiens
  chr1:2726837-2727041
  hypo
cgtgctcctggactgaacgctgctaccgtaacttcatcagcaccctccaggcgaggaccacgtgtccagcccctgctgtgcacacgactgagggttgtcggttccccgagctcagctgaactccctcctgccagctagccgtccccatcgcccggactggggaacagtcctcctggggatgccgcactcctctccatcattctc

SEQ ID NO: 32928 - DNA, 620 bp, Homo sapiens
  chr1:2846750-2847370
  hypo
cgtgcacacacatacatgcaaacacatgtgcacacacacacgtgcgcacacatgtgcacgcaggtcccagcatgtgggcttcttccgtgggcaggcacagaggtcgggtgtcggcccagaggttcatggaggcgctaatgagcggctccgggcccgcaggagatgcggctcacacaggtcagatttcggatggatgatgaaggaaatgagggccaggccagcctctggttacagtttaggaaaaacacgaggcgcccttctctagttcaaaaggcagagagaggcagacccaggagctaggggggccggacgggattccagtccggtttcatctccggatgccctgggaacccgcctggcgtagaccgggtgggggcggtgcagacaggaccctggagaacagggctgcggtgcgcagcagggggtggccccggtcacacagtgtcccccatggaggggcctcgatggccgggctgcgcatggcacgtgtcgtgtgtggatccacagcagggccgctgcccccacccagcgccagccgggaggttgggaagtgttagcgccaggagcagctttcagctgaaaaatccccagtttattaactttgctccagaagccagggc

SEQ ID NO: 32929 - DNA, 511 bp, Homo sapiens
  chr1:2850546-2851057
  hypo
cggccagccgggctctaacatgtcctcaactttcaggaaaccagagcctccgagtaagtatcagatgagttgctaatgttggaaaaaaagcgagaaacatgcttgggggctctgttttacggctgcacttgaagtcggaatctgcgatcgtaacccaatgctggcctcgccaacgtgttttcggtattgtcgggataattgaaagtccagacaaatttggctatcagggctccaggcagcggaatcccatggtggcccctggtgtgatgagctcgccgaggccgtctcaggtcctgcgcccaccacggtcttcgggagcagctgtcggctttgcaaaagccccaggactttccgggtggacatggggggcttggctttgtcaccgggacctcttgaaaggcagccggtcctgggcctctcatctggccccgcacccttcttggccaccgacgtggaaggcagggcgccctgtggggtgagcagggccatccgtgcctcggggtctgccctc

SEQ ID NO: 32930 - DNA, 441 bp, Homo sapiens
  chr1:2918283-2918724
  hypo
cgaccccggtggaaatgtacccttctggcagccacagagtcacagggtgagggcggcaaacccatgttcccacagtaagccacgtggaacgacgacgaggggaccccctatgtgtccactccgtagctcccagatccatgcattctgcctgtcatggacacggcaccgtgtcatcgtcactggctcaagaaatagcctgcaaactaaaggacagcgcccaccttctcggacgtccacattctcggacgcccacattctcggacgcccacattctcgggggcgcccacattctcggacgcccacactctcggacgcccacactctcgggcgcccacactctcgggcacccacactctcgggcgcccacactcttggacgtccacactcttggatgcccacactctcgggcgcccacactctcgggcgcccacactcttggac

SEQ ID NO: 32931 - DNA, 727 bp, Homo sapiens
  chr1:2938633-2939360
  hypo
cgagaacttcggcgtgcccgctttctacctgtcggaccaggcggtgctggctctctacgcctctgcctgtgtcacgggcctggtggtggacagcggggatgcggtcacctgcactgtccccatctttgagggttactccctgccccacgcagtcaccaagctccacgtggcgggcagggacatcacggagctcctcatgcagctgctcctggccagcggccacaccttcccctgccagctggacaagggtctcgtggacgacatcaaaaagaagctgtgctacgtggccttggagcccgagaaggagctttcccggaggccggaggaggtcctgagggagtacaagctgcccgacgggaacatcatcagcctcggggacccgctgcaccaggcgcccgaggccctgttcgtgccccagcagctgggcagccagagccccgggctctcgaatatggtctccagcagcatcaccaagtgtgataccgacatccagaagatcctctttggggagattgtgctgtcggggggcactaccctgttccacgggctggatgaccggcttctcaaggagctggagcagctggcctccaaggacacccccatcaagatcacggctccccccgaccggtggttctccacctggattggagcctccatcgtcacctctctgagtagcttcaagcagatgtgggtcaccgccgcagacttcaaggagtttgggacctcc

SEQ ID NO: 32932 - DNA, 156 bp, Homo sapiens
  chr1:2999791-2999947
  hypo
cgcaggggtcgggtctcctggctgcgccccaccaagcagcaacctggcggctgggccccggaactgcacatccctccccatcatagccctgtcctggactgggcggcgcgctcatttcaaggcagtgcggccatctgggctgggcctggcgctggc

SEQ ID NO: 32933 - DNA, 584 bp, Homo sapiens; identical to SEQ ID NO: 29634
  chr1:3000551-3001135
  hypo

SEQ ID NO: 32934 - DNA, 205 bp, Homo sapiens
  chr1:3008438-3008643
  hypo
cgggggtgatggacagttcgcaggtggtcagatgcgagagaattcacatcgcagaacctgccaggaaaatcaatgggaccgtgaggactgctaggtttgggaggcccgcgttagccccaggacggcttcatggggaggggacgcaggtccccatgtagaggataagatggagccagccgtgggtaagggtggaccacgcaggatc

SEQ ID NO: 32935 - DNA, 512 bp, Homo sapiens
  chr1:3032644-3033156
  hypo
cggcaggcgtcaggttgagtccttggggttcagggaggtcaaggtcaggcctagcgtgggtggtcatctcaggggcagcactggtggccgttgaattgttccttaccggggagaacaggtggcagggagggatggttccagaccccatggcacccgtgtctctgcagtgtgtccctctcatggggggacagtaggcagagctccccggctgccctgcgccggcgtgctcactccgcggtgcgtgcttaatacccacagtgtgagaaccgagagccagggccaatgacgggggggacgcgggttcacgggtggcctggagacgtggcaccgtacctccctgctcccttcctgtgagaattttgccctcaagatggcagcccagcctggatgcccagaccccattcccaagccgcaggtcctggtctgggctctgtcactcggggacgcgcctgcttgtctttccccggctggggcagtgcctggtctgctcagcccttcctctctccccgccc

SEQ ID NO: 32936 - DNA, 125 bp, Homo sapiens; identical to SEQ ID NO: 29639
  chr1:3037182-3037307
  hypo

SEQ ID NO: 32937 - DNA, 145 bp, Homo sapiens; identical to SEQ ID NO: 29640
  chr1:3050813-3050958
  hypo

SEQ ID NO: 32938 - DNA, 373 bp, Homo sapiens
  chr1:3052594-3052967
  hypo
cgctttgtccgggagccacaggacaccaggctggggcggggctgggggcagaacgctcctccagcagcctaggagccacccctgggaagaaagggggtctcgggcagcctcgccatgggaccaccagctttgggccttcgttacaggggtgatgctgccccgctgatagggttgggggcctggggctgcagcgtagctgaagtggaacctgcccagcctgcacttcccagctggccagccccgcgcgatgctccggggtctcggcgaggcacgccaggcactgagtcctcagacccgctgtccggggacctctggtgtcgtccattttacagacgaggcagtggaggcccagaaagatggaccgacagtcccc

SEQ ID NO: 32939 - DNA, 671 bp, Homo sapiens
  chr1:3111118-3111789
  hypo
cggcaactggccactgtctccccaccacacgccaccgtctccccaccacacgccaccgtctccccaccacacgccaccgtctccccgccacacgccaccgtctccccgccacatgccaccgtctgatcgccacacgccatcgtctccccgccacacgccaccgtctccccgccacacgccaccgtctgatcgccacacattagggcttggtattctcagtcccacgttttatcatctaaacgccaaaactcgttcctggcctgccctttctctccaaggttcccagatgcacgctccactgcccacaccacccccacggttgagtgggctcggccccgggacgtggcctggctctgggcacctctgctgctccactctgcgtggagagttctgcgtgaggccaggaagctttgccgcgcttccccactcaggagcttctggatgtttctatggaggcctcacgtctaaaaccgtgagcgcaccggccagtggatgctctgaggagtgttcccgtggagccagcaccgggcagctcggcgaggcacacagcgtcgggatttggagagagacggggccctgtgggatggtgcggagcctgaggccaccgtggggacagggatgcagagaaacccatgggcctcggcgttgctccgggagaagccggcagtgcc

SEQ ID NO: 32940 - DNA, 683 bp, Homo sapiens; identical to SEQ ID NO: 29645
  chr1:3114432-3115115
  hypo

SEQ ID NO: 32941 - DNA, 188 bp, Homo sapiens; identical to SEQ ID NO: 29646
  chr1:3125905-3126093
  hypo

SEQ ID NO: 32942 - DNA, 187 bp, Homo sapiens; identical to SEQ ID NO: 29647
  chr1:3172404-3172591
  hypo

SEQ ID NO: 32943 - DNA, 164 bp, Homo sapiens; identical to SEQ ID NO: 29648
  chr1:3193780-3193944
  hypo

SEQ ID NO: 32944 - DNA, 473 bp, Homo sapiens; identical to SEQ ID NO: 29649
  chr1:3195292-3195765
  hypo

SEQ ID NO: 32945 - DNA, 550 bp, Homo sapiens; identical to SEQ ID NO: 29650
  chr1:3228695-3229245
  hypo

SEQ ID NO: 32946 - DNA, 223 bp, Homo sapiens
  chr1:3277485-3277708
  hypo
cgggtgccgtcccgcggcgggaacgaggcaggtggctggcggccggagtctatgcactctcgttttctcggcggagccacttgtgtgtgctggagcgaggacactgactaacaacggcggcagtgtctgcggaacagcgttccattgagcgcaggaaaggccttttgaagtggggacagttttaagaggcagcattcctcgcctcacatttcggctctggggc

SEQ ID NO: 32947 - DNA, 1249 bp, Homo sapiens
  chr1:3321132-3322381
  hypo
cggccacggcagagaggaggtgggcagggagacaccagcatgtgctctgatccctcggcagcgtggtgggggctccgaaggggcactgggaacaagctgtatggttggggtcccctcccgggcagagggcaggtagtcgggccccgcagtgagcctcgtcctctgcgcagcctggagcagcacatggtcatccacacggaggagcgcgagtacaaatgcgaccagtgtcccaaggccttcaactggaagtccaacctcatccgccaccagatgtcccacgacagcggcaaacgcttcgaatgtgaaaactgcgtgaaggtaacctgcggggcggccccgtctcagccccggggcagcaggaggctgcagacgggcgcccgcccccgtgctccctacaccccctggtccaaatgtagatggagtgcggcagagtgggtaggaggcccctgcggtggctcgggcccttccgtgtgactaggaaggaaaggaagtctcagggaagaccgtgtcccccaggtcagaaggatcagggccgagaccagaacccaggcccctccagagcgcggctcctgtcctcccgccggtgtggaaggaagaggctggcggggctgagccgagcctccaccccgagcccgccagggtctcagcaccacagctgaaaacgctttctgcagccctgtctcacgcagcctcagttcaggaattgttcttgaggaaagcagccggggaggctctgcggctcacttaaggccctgcagcgggtccttgctacacagagacctgtcccggcctgcttggtgcagactgcaacgtggcaagagagacaggcagggccctgccccccacagccggttggtccgccagccagaaccaggccaaggcgggtgtccaggcagggcacgcgccaacggcatccgtctccccaggtgttcacggaccccagcaaccttcagcggcacatccgctcgcagcacgtgggcgctcgggcccacgcctgccccgactgcgggaagaccttcgccacgtcctccggcctcaagcagcacaagcatatccacagcacggtgaagcctttcatatgtgagtggtcgcccagcctggccgcctgccctccgggtgcgcggatgccgtggcggtcgggccgaggtgggccatcccccaaggtctcccccgatccgaggggccccagtttgttcataaagcactcatggcaggttctgacatctctgccgcgtgcagcctggtcccc

SEQ ID NO: 32948 - DNA, 1004 bp, Homo sapiens
  chr1:3328265-3329269
  hypo
cggcgcctcccacgttccccgcactcacccccggcttcccgggcatcttccctccatccttgtacccccggccgcctctgctacctcccacatcgctgctcaagagccccctgaaccacacccaggacgccaagctccccagtcccctggggaacccagccctgcccctggtctccgccgtcagcaacagcagccagggcacgacggcagctgcggggcccgaggagaagttcgagagccgcctggaggactcctgtgtggagaagctgaagaccaggagcagcgacatgtcggacggcagtgactttgaggacgtcaacaccaccacggggaccgacctggacacgaccacggggacgggctcggacctggacagcgacgtggacagcgaccctgacaaggacaagggcaagggcaagtccgccgagggccagcccaagtttgggggcggcttggcgcccccgggggccccgaacagcgtggccgaggtgcctgtcttctattcccagcactcattcttcccgccacccgacgagcagctgctgactgcaacgggcgccgccggggactccatcaaggccatcgcatccattgccgagaagtactttggccccggcttcatggggatgcaggagaagaagctgggctcgctcccctaccactcggcgttccccttccagttcctgcccaacttcccccactccctttaccccttcacggaccgagccctcgcccacaacttgctggtcaaggccgagccaaagtcaccccgggacgccctcaaggtgggcggccccagtgccgagtgcccctttgatctcaccaccaagcccaaagacgtgaagcccatcctgcccatgcccaagggcccctcggcccccgcatccggcgaggagcagccgctggacctgagcatcggcagccgggcccgtgccagccaaaacggcggcgggcgggagccccgcaagaaccacgtctatggggaacgcaagctgggcgccggc

SEQ ID NO: 32949 - DNA, 152 bp, Homo sapiens; identical to SEQ ID NO: 29655
  chr1:3331040-3331192
  hypo

SEQ ID NO: 32950 - DNA, 238 bp, Homo sapiens; identical to SEQ ID NO: 29656
  chr1:3343487-3343725
  hypo

SEQ ID NO: 32951 - DNA, 561 bp, Homo sapiens; identical to SEQ ID NO: 29657
  chr1:3351144-3351705
  hypo

SEQ ID NO: 32952 - DNA, 168 bp, Homo sapiens; identical to SEQ ID NO: 29658
  chr1:3361098-3361266
  hypo

SEQ ID NO: 32953 - DNA, 353 bp, Homo sapiens; identical to SEQ ID NO: 29659
  chr1:3379762-3380115
  hypo

SEQ ID NO: 32954 - DNA, 337 bp, Homo sapiens; identical to SEQ ID NO: 29660
  chr1:3385485-3385822
  hypo

SEQ ID NO: 32955 - DNA, 238 bp, Homo sapiens; identical to SEQ ID NO: 29661
  chr1:3425542-3425780
  hypo

SEQ ID NO: 32956 - DNA, 617 bp, Homo sapiens; identical to SEQ ID NO: 29662
  chr1:3435632-3436249
  hypo

SEQ ID NO: 32957 - DNA, 214 bp, Homo sapiens; identical to SEQ ID NO: 29663
  chr1:4037053-4037267
  hypo

SEQ ID NO: 32958 - DNA, 430 bp, Homo sapiens; identical to SEQ ID NO: 29664
  chr1:47685395-47685825
  hypo

SEQ ID NO: 32959 - DNA, 428 bp, Homo sapiens; identical to SEQ ID NO: 29665
  chr1:48459812-48460240
  hypo

SEQ ID NO: 32960 - DNA, 1601 bp, Homo sapiens; identical to SEQ ID NO: 29666
  chr1:7723202-7724803
  hypo

SEQ ID NO: 32961 - DNA, 244 bp, Homo sapiens; identical to SEQ ID NO: 29667
  chr1:94495968-94496212
  hypo

SEQ ID NO: 32962 - DNA, 115 bp, Homo sapiens; identical to SEQ ID NO: 29668
  chr10:116050056-116050171
  hypo

SEQ ID NO: 32963 - DNA, 114 bp, Homo sapiens; identical to SEQ ID NO: 29669
  chr10:126711488-126711602
  hypo

SEQ ID NO: 32964 - DNA, 1801 bp, Homo sapiens; identical to SEQ ID NO: 29670
  chr10:126714633-126716434
  hypo

SEQ ID NO: 32965 - DNA, 295 bp, Homo sapiens; identical to SEQ ID NO: 29671
  chr10:126721936-126722231
  hypo

SEQ ID NO: 32966 - DNA, 549 bp, Homo sapiens; identical to SEQ ID NO: 29672
  chr10:126771776-126772325
  hypo

SEQ ID NO: 32967 - DNA, 409 bp, Homo sapiens; identical to SEQ ID NO: 29673
  chr10:126794880-126795289
  hypo

SEQ ID NO: 32968 - DNA, 392 bp, Homo sapiens; identical to SEQ ID NO: 29674
  chr10:126819324-126819716
  hypo

SEQ ID NO: 32969 - DNA, 84 bp, Homo sapiens
  chr10:126828919-126829003
  hypo
cgatgactgccgcttaaacctgccctcagcctgactgatgtgatgagggaaggggacaaagaatgagctccgaaaggacatttc

SEQ ID NO: 32970 - DNA, 379 bp, Homo sapiens; identical to SEQ ID NO: 29676
  chr10:126830153-126830532
  hypo

SEQ ID NO: 32971 - DNA, 213 bp, Homo sapiens; identical to SEQ ID NO: 29677
  chr10:128813812-128814025
  hypo

SEQ ID NO: 32972 - DNA, 307 bp, Homo sapiens; identical to SEQ ID NO: 29678
  chr10:129195296-129195603
  hypo

SEQ ID NO: 32973 - DNA, 413 bp, Homo sapiens; identical to SEQ ID NO: 29679
  chr10:129195681-129196094
  hypo

SEQ ID NO: 32974 - DNA, 669 bp, Homo sapiens; identical to SEQ ID NO: 29680
  chr10:129245272-129245941
  hypo

SEQ ID NO: 32975 - DNA, 118 bp, Homo sapiens; identical to SEQ ID NO: 29681
  chr10:134680051-134680169
  hypo

SEQ ID NO: 32976 - DNA, 119 bp, Homo sapiens; identical to SEQ ID NO: 29682
  chr10:134694283-134694402
  hypo

SEQ ID NO: 32977 - DNA, 1457 bp, Homo sapiens
  chr10:134732799-134734256
  hypo
cgtgagggcgggtacgaacctcgccgcagcctcaacttcttcaccttgacgttgtcatacaggaggcagaagcggctcgccgtccgacagacgtcccacacgccttgtttccgggccactttggccagctctgcccaaatctgtatcctgctcaccgagaacccaaacgagtgaaaggtgagtagacaagtgtggttgctgaagttagaaaacacctgggctggctgcctgagaaaaggccactgtggctctgcagtttcaaggtggcaaggagcccggcactcgcgctgggtacggcctggcgggtgcatgtcccagggtcgggcgcagctctccgctctccctgccagccagctgtgcgcggcacctcccttccctgtggtgagaagaaaggccacacaatccactccccgggggagtgcacgggacaggcctcccggggatggtaccgaccgcagggtcggtaccaaaaatcagcctgctctggtcacaggcgctgcgtgtcctccgagtgacagcagtgacaggcgggacagggcagccgcacacctcataggccgtggctgtcatcacaggctggggggtcccgtctgtggcgggactcccaggcagggacctcgtcccaccatcctggagcaggtggcctggcgagtccccagacggccacatgcagggtcagctcagccgccacagacactggccctcgggctgagcgacccccgggctgagctgtgcgtggcgctctggccttttcctcactcacctctccttgtcgttttcgttgcccaggcgccgcaggtgcccggcagctttgtccacgctgacggtgtggtgccacgccttcgcacagaggtaggtgaaccggcccctgttcttcccggtggagactgagggcggaaatgcaaaggcaggtgttgcagctgctggccaagggccggggacgtgcccatcagtaaccaatgccctgcgccggcgccggggtggccacccacaggtagcggctccaggggccctagatccccggctcccagaagccgagctcctcacagagctgcagagtggcattgcctgtgtctcctgccggcgatgaggccgagccagtgctcctctgagtgggggaggctccaggaactttggagcagagtctgccaagaccctcctgctgctctgctggctgcgctgtccagctgccctccaagcagaggcacccggcctcagactcccgagctcccacccagcccctgcgtagcaccccaagtcccagcaggtttatccgcatgacgccagatgttccgaatcaccgctccttttcctggcaaataatcacgagcacccggaactcagctccacaccctggggggcctcctgtgcatgggcgaccccgggggctgggcctcccctggctggtgtccaccctctcggccagcacaggggttcaccttcaggagccactcaac

SEQ ID NO: 32978 - DNA, 504 bp, Homo sapiens
  chr10:134734534-134735038
  hypo
cggcagccccttcccgctccaagagtcgccaaccttcccttgcagggcgcgacccaccctgcgtctgcccatctcctcgtctcagacccgagacatgacccagcagctccactcccgaccaccatctccacaggctgcagtctgggtgacacctggttcgtcgtgctgggtgaaagccgccggctgctgggcactgagctggagggaggcctggcagcagcccccagcaggaccctcaggggaccagcgggaagggctcccaagccaggcccagcctggcccctgcactgggctggagagagtggggccgcctgcgttcccagagccactggcgagtgcccagagaagctcgggcagtgaggatgcaacacacctgccgaaccctggctcagtccccgcacatgggccgtacggccccgtgtcccattacccaaagccagctcagggtctccctgggacagatgtgatggcttcagctttgacccccgtgatccagggagcccc

SEQ ID NO: 32979 - DNA, 957 bp, Homo sapiens
  chr10:134738029-134738986
  hypo
cgacgtgcctggcccggagctgggacagagggtggcccttattgagtacagggggagtctgttgcttgtggcactgtcatggcaagggggcttgggccaccttctcctcctctgtctcctcctatgcgccacgccctctgtggaggacacagcacaggtgagcgccccacctgtccagcttctccagcacgtccgcaacgccagccaggggcttccgcaggtggtgccgcaggttgtgctgcagcaggggcaggcaggtgttccactgcgtggcgcacaccacgtggatgacccgggggtcgcccaggcgcacggctcgctgcagcgcgacgtctagcctctgtatgatatccagctgggcctgcggagaagacgtgggggattctagggaggttgctggctcgagctgcggggctggggcggcacctgcgtgcagggcacactgagaacgcaggccctaaattcatcaccctgcgtggcgtcatgctcaaatctgtccgtgaaaatggccagagtgactctttctaggaggaagtggacgtctcacaagatattacatgcaggaggcttggcggtgcccacacatcgtggctgcgcccgcctcccccgtgtggactcagcgggcgctgctcccttcctgatcccgtctctttcctggggcctgtgctcgctacgcttcccacccccagaatgcctcctccggtctgtgctacacgggcccttcccaggacaaaggctttggccaggatttcagtggagcagtctccccacactcccacctcccacaagccctgctggaccgcccaccgtcctgggctcacttggccacgtccccacagcctgtggcttccacgggggcctagccctcacgctgcccctgggctgggtggggcctgaacctcacaactccatcctgccacttggctgctgggtctgaaagcctcgtacgccggtgcc

SEQ ID NO: 32980 - DNA, 152 bp, Homo sapiens; identical to SEQ ID NO: 29687
  chr10:134758138-134758290
  hypo

SEQ ID NO: 32981 - DNA, 288 bp, Homo sapiens; identical to SEQ ID NO: 29688
  chr10:134790715-134791003
  hypo

SEQ ID NO: 32982 - DNA, 488 bp, Homo sapiens; identical to SEQ ID NO: 29689
  chr10:134829387-134829875
  hypo

SEQ ID NO: 32983 - DNA, 382 bp, Homo sapiens
  chr10:134836865-134837247
  hypo
cgtgaccacggcaagagcgagctggagcggagcctcgggtagccatgactaacagacatggttcgcaaacccacgcacaccttccaaaaacgccaggctggcctcacatgaccaggggcctcaccaagtgcagtgggtccctgcgtgtcagggaggctgcccagagctgtggctgctcctgtcttagcctcaacctgtgcccggggccctgtggatggatccgcgtggggcggtggtgttccaagtccacgtggggcggtggtgttccaggtccacgtggggcggtggtgttccaggtccacgtggggcggtggtgttccaggtccacgtggggtggtggtgttccaagtccacgtgggacggcggtgttccaggccacagc

SEQ ID NO: 32984 - DNA, 179 bp, Homo sapiens; identical to SEQ ID NO: 29691
  chr10:135001623-135001802
  hypo

SEQ ID NO: 32985 - DNA, 369 bp, Homo sapiens
  chr10:135012335-135012704
  hypo
cggcagctcccggctctccagtccccgccccgcccacgaaggcatctgcgctgcccgtagagcaagggccggctgagccgatcccacctggagttgcttccgggggcctcaggcccgacgccctggggcccaccacggcccaccacggcccacgccacccgcccaagcccccacgaagcaaggccaccgagcgcccgggccaggagccagagggccccggggccacccctgccggggaacgtgatgaccagagtccagacagtgtcccagagaggccgcggcccgcagaccggaggctctgtctgccctgcgtggatgcctcgccactcccagggaggacggcctgcccgtcgctgcaggaggccacgc

SEQ ID NO: 32986 - DNA, 739 bp, Homo sapiens
  chr10:135014662-135015401
  hypo
cgtgagggggcagagggacacagtcctgatagcagagccagcgaggacagggcccggccccaccccggggcgagtacgagtttggaagcagtgagggcgcagagtggggctccatctggggagaggcctctctctgtcacccggccccgtgcggcagttcagggtcccagcatctcccctgcactgggaggcggcagccgtgcccggggggcgcccgtggtgggcgggtgcaagagagaagggcgtcgggtgtgcaagcaccaccggcctcccattaacagcctgcccgggctccgcccacaggagccactgtccacgtaacctgcgtctctttctttcaaggaaaagagaagccagccatggccaggaccagcagcagggccccctgctcacccacctcggtgtcggatgtggactcggacgcactgtcacggggaaacttcgaggtggggtttcggcctcagaggtccgtaaaagccgagagagcgcagcagcctgaggctggcgaggacagacggccagctggcggggcctcagacgtggaggcagtgacccgactggccaggtccaaaggggtcggcccagccttgtcccccggcccagccggattccagagctgcagccccggctggtgcagcgccttctacgaggccgactgcttcggggccgacgtccacaactacgtgaaggacctggggcggcagcaggcggacggggccctgcccgacgcccagagccc

SEQ ID NO: 32987 - DNA, 333 bp, Homo sapiens
  chr10:135025560-135025893
  hypo
cgtgcacatatgcatgcaccttcacacaatccacacgtgcacatgcgtgcacactcaatccacacgtgcacacgcacgtgcaccttcacacagccatacatgcactcgtgtgcaccctcacacatatccacacctacacgtgtgcaccctcacacatatccacacctacacgtgtgcaccctcacgcaatccacacatgcacacacgtgcacccgcacacgcatccacacacacacgcatgcaccctcacatccacacgtgcacactcacataccccctccatgttcccggtcccaggcagccctgctgcgctggcacctcctgcaccatccc

SEQ ID NO: 32988 - DNA, 558 bp, Homo sapiens
  chr10:1443319-1443877
  hypo
cggcagccacaaacaccgtcaggcccagcgtcaccctccccacctcccggatgagaaggagcctccggagcagctgagggacccactgtggaggcagccgggtgggggacggcccggtgtgtgtggtctggtcgtgactttcccacaaggcatcacccatgggaaggaggcgtgatgatggtaagcagcacagagccctgcggggaccagggttttggaacaccccggccttcggtcatgctgcgggaagcctgggtcctctccctgtcagagaagacagctgggttctggggtttcacagcacacgggtacccccggttccaggactgaccatggagggcaggtgccagcgctgttcggggcctccggtgatggtcccagctcccttcccacaaaggccaggtgcagccttggaatcctctgacacttggatccccatggattcaatgggagctcgcatgctgtgaagaccgcggtgcattttaaacggcaccagcaaggaggctacactgtgtatcccgtgtccccatttctaccgaagagcggcggcttcacggc

SEQ ID NO: 32989 - DNA, 413 bp, Homo sapiens; identical to SEQ ID NO: 29696
  chr10:44198155-44198568
  hypo

SEQ ID NO: 32990 - DNA, 234 bp, Homo sapiens; identical to SEQ ID NO: 29697
  chr10:71405328-71405562
  hypo

SEQ ID NO: 32991 - DNA, 138 bp, Homo sapiens; identical to SEQ ID NO: 29698
  chr10:80848861-80848999
  hypo

SEQ ID NO: 32992 - DNA, 423 bp, Homo sapiens; identical to SEQ ID NO: 29699
  chr10:80878255-80878678
  hypo

SEQ ID NO: 32993 - DNA, 253 bp, Homo sapiens; identical to SEQ ID NO: 29700
  chr10:80921761-80922014
  hypo

SEQ ID NO: 32994 - DNA, 178 bp, Homo sapiens; identical to SEQ ID NO: 29701
  chr10:80928401-80928579
  hypo

SEQ ID NO: 32995 - DNA, 197 bp, Homo sapiens; identical to SEQ ID NO: 29702
  chr10:81036003-81036200
  hypo

SEQ ID NO: 32996 - DNA, 261 bp, Homo sapiens; identical to SEQ ID NO: 29703
  chr10:81050762-81051023
  hypo

SEQ ID NO: 32997 - DNA, 447 bp, Homo sapiens; identical to SEQ ID NO: 29704
  chr10:81063491-81063938
  hypo

SEQ ID NO: 32998 - DNA, 366 bp, Homo sapiens; identical to SEQ ID NO: 29705
  chr10:81065719-81066085
  hypo

SEQ ID NO: 32999 - DNA, 635 bp, Homo sapiens; identical to SEQ ID NO: 29706
  chr10:88441134-88441769
  hypo

SEQ ID NO: 33000 - DNA, 1051 bp, Homo sapiens
  chr11:1103476-1104527
  hypo
cgcccacggcatcgtgggaaggtgctctcatccccaggaatgtccgggggtcccgggctcattctcctttccctctagggctccatcacattcatgcccaatggatgctgcaagacctgtgagtacagggcacagcctggggggtaggcagggtgggggcacaagggctggtgccctcagccccgcctggggtggctggaggctggacaacggcctctgggtgggcagtgagggctgggggctgaggccgagcctggggaggggacgcagcgagggagagcctcctcgaagatgtggaggccctgccctaagccgctgcccgctctccccaggcacccctcgcaatgagaccagggtgccctgctccaccgtccccgtcaccacggaggtttcgtacgccggctgcaccaagaccgtcctcatgaatcattgctccgggtcctgcgggacatttgtcatgtgagtcccaggctgggagtgtgcctggagggggtggtggagaccccagggaggcgagaggccagcgctggccccggaaggtcacccctcactccgccctccccccaggtactcggccaaggcccaggccctggaccacagctgctcctgctgcaaagaggagaaaaccagccagcgtgaggtggtcctgagctgccccaatggcggctcgctgacacacacctacacccacatcgagagctgccagtgccaggacaccgtctgcgggctccccaccggcacctcccgccgggcccggcgctcccctaggcatctggggagcgggtgagcggggtgggcacagcccccttcactgccctcgacagctttacctcccccggaccctctgagcctcctaagctcggcttcctctcttcagatatttattgtctgagtctttgttcagtccttgctttccaataataaactcagggggacatgctgtactgtgtggtttaggttggtgctgcaggggtgcggcttggccactgtgcatggcggaggccaccaggctctgcgtgcaggacacgggggcaccacacacacgccacgc

SEQ ID NO: 33001 - DNA, 257 bp, Homo sapiens; identical to SEQ ID NO: 29709
  chr11:119290824-119291081
  hypo

SEQ ID NO: 33002 - DNA, 199 bp, Homo sapiens; identical to SEQ ID NO: 29710
  chr11:119505179-119505378
  hypo

SEQ ID NO: 33003 - DNA, 261 bp, Homo sapiens; identical to SEQ ID NO: 29711
  chr11:119506104-119506365
  hypo

SEQ ID NO: 33004 - DNA, 130 bp, Homo sapiens; identical to SEQ ID NO: 29712
  chr11:119506981-119507111
  hypo

SEQ ID NO: 33005 - DNA, 750 bp, Homo sapiens; identical to SEQ ID NO: 29713
  chr11:119535401-119536151
  hypo

SEQ ID NO: 33006 - DNA, 286 bp, Homo sapiens; identical to SEQ ID NO: 29714
  chr11:119574555-119574841
  hypo

SEQ ID NO: 33007 - DNA, 471 bp, Homo sapiens; identical to SEQ ID NO: 29715
  chr11:119579320-119579791
  hypo

SEQ ID NO: 33008 - DNA, 283 bp, Homo sapiens; identical to SEQ ID NO: 29716
  chr11:119587853-119588136
  binary

SEQ ID NO: 33009 - DNA, 123 bp, Homo sapiens; identical to SEQ ID NO: 29717
  chr11:119589823-119589946
  hypo

SEQ ID NO: 33010 - DNA, 128 bp, Homo sapiens; identical to SEQ ID NO: 29718
  chr11:119590586-119590714
  hypo

SEQ ID NO: 33011 - DNA, 83 bp, Homo sapiens; identical to SEQ ID NO: 29719
  chr11:119606553-119606636
  hypo

SEQ ID NO: 33012 - DNA, 291 bp, Homo sapiens; identical to SEQ ID NO: 29720
  chr11:119970240-119970531
  hypo

SEQ ID NO: 33013 - DNA, 357 bp, Homo sapiens; identical to SEQ ID NO: 29721
  chr11:12182020-12182377
  hypo

SEQ ID NO: 33014 - DNA, 372 bp, Homo sapiens; identical to SEQ ID NO: 29722
  chr11:12183631-12184003
  hypo

SEQ ID NO: 33015 - DNA, 78 bp, Homo sapiens; identical to SEQ ID NO: 29723
  chr11:12225829-12225907
  hypo

SEQ ID NO: 33016 - DNA, 150 bp, Homo sapiens
  chr11:12230977-12231127
  hypo
cggggggtataatcattctcttcccacctctctctgccaactcatctcatttctctgtcctggtagaaattggctggcgggcagaatttctccctacagaccattctctgtcggagtttgagtttgacgtcatcattggtgccgatggcc

SEQ ID NO: 33017 - DNA, 258 bp, Homo sapiens; identical to SEQ ID NO: 29726
  chr11:12240017-12240275
  hypo

SEQ ID NO: 33018 - DNA, 251 bp, Homo sapiens; identical to SEQ ID NO: 29727
  chr11:12247662-12247913
  hypo

SEQ ID NO: 33019 - DNA, 264 bp, Homo sapiens; identical to SEQ ID NO: 29728
  chr11:12248553-12248817
  hypo

SEQ ID NO: 33020 - DNA, 97 bp, Homo sapiens; identical to SEQ ID NO: 29729
  chr11:12262569-12262666
  hypo

SEQ ID NO: 33021 - DNA, 180 bp, Homo sapiens; identical to SEQ ID NO: 29730
  chr11:12267687-12267867
  hypo

SEQ ID NO: 33022 - DNA, 352 bp, Homo sapiens; identical to SEQ ID NO: 29731
  chr11:12278228-12278580
  hypo

SEQ ID NO: 33023 - DNA, 141 bp, Homo sapiens; identical to SEQ ID NO: 29732
  chr11:12279396-12279537
  hypo

SEQ ID NO: 33024 - DNA, 301 bp, Homo sapiens; identical to SEQ ID NO: 29733
  chr11:12281112-12281413
  hypo

SEQ ID NO: 33025 - DNA, 434 bp, Homo sapiens; identical to SEQ ID NO: 29734
  chr11:12283321-12283755
  hypo

SEQ ID NO: 33026 - DNA, 366 bp, Homo sapiens; identical to SEQ ID NO: 29735
  chr11:12284011-12284377
  hypo

SEQ ID NO: 33027 - DNA, 268 bp, Homo sapiens; identical to SEQ ID NO: 29736
  chr11:124794665-124794933
  hypo

SEQ ID NO: 33028 - DNA, 400 bp, Homo sapiens; identical to SEQ ID NO: 29737
  chr11:125817639-125818039
  hypo

SEQ ID NO: 33029 - DNA, 168 bp, Homo sapiens; identical to SEQ ID NO: 29738
  chr11:125971144-125971312
  hypo

SEQ ID NO: 33030 - DNA, 720 bp, Homo sapiens; identical to SEQ ID NO: 29739
  chr11:133790547-133791267
  hypo

SEQ ID NO: 33031 - DNA, 361 bp, Homo sapiens
  chr11:134608555-134608916
  hypo
cgatggcgtgtgtgtctgtgtgagtctgtgtgtctctctgtgcgtgtctgtgtgagtccgtgtgtctctccatgagtgtctgtgcgagtctgtgtgtctctccgtgcgtgtctgtgcgagtccacgtgtctctccgtgcgtgtctgtgcgagcctgtgtgtctctccgtgcgtgtctgtgtgagtctgtgtgtctctctgtgcgtgtctgtgtgagtccgtgtgtctctccgtgagtgtctgtgcgagcctgtgtgtctctccgtgcatgtctgtgtgagtctgtgtgtctctccgtgcgtgtctgtgtgagtctgtgtgtctctccctgcgtgtctgtgtgaatctatgtctttctgtgc

SEQ ID NO: 33032 - DNA, 301 bp, Homo sapiens
  chr11:1446149-1446450
  hypo
cgggaggggtgttctccccgcctccatgggcaaagaatctggggcccttgtcagagaccgcggggtcagtgggattggcgcccaggccctgctgtgacgccacgtgtttcccactcagcgaggctgttcctgccaggcgtggggactcggaccctggtcctgagtgctgccccgaggcccgtgatgggaagcctgacgtctgcatcgtcctgcgctgcgtggccggtcggtcccggcgctctcagcacttggagtctcagctccccgggtcatcagtccaagccactcagcaggtggcttc

SEQ ID NO: 33033 - DNA, 79 bp, Homo sapiens
  chr11:1795210-1795289
  hypo
cgcagctcactgtcccccaagcttggttggggactcttccttcatattttaacaaaatccacggcacctctgggatgcc

SEQ ID NO: 33034 - DNA, 189 bp, Homo sapiens; identical to SEQ ID NO: 29743
  chr11:1795707-1795896
  hypo

SEQ ID NO: 33035 - DNA, 150 bp, Homo sapiens; identical to SEQ ID NO: 29744
  chr11:1800836-1800986
  hypo

SEQ ID NO: 33036 - DNA, 400 bp, Homo sapiens; identical to SEQ ID NO: 29745
  chr11:1824649-1825049
  hypo

SEQ ID NO: 33037 - DNA, 115 bp, Homo sapiens
  chr11:1825144-1825259
  hypo
cgctctgggcctcgccacccacatagaagtccttctgacccatgcccaccgtcatgccctggtgtctggggcaccccacgatggaggggaagacggcccagggggcatcgtcgtc

SEQ ID NO: 33038 - DNA, 813 bp, Homo sapiens
  chr11:1957569-1958382
  hypo
cgctcaggatgctggcggcagggggcctggagccttcctcctgcccccgctctcccctcgtgcctgcagccgggggcttcccagtggccgctgccctgttggcaagcgaggaagggcccccaccttcccaggagctccgcctcaagccagcagcggccacagagtgcccctgggcacaggcacgagggcgggagcggctggcccaggagcagcagggccgttcggagctctgagctcagcggctgaagggagctggagctgagaaggaggggtccgcaggcctcacctgcaacccctccccagccccatccgtgctccgtaccccccgccccacatcctgccgcaggctgaaggtaagtggccagctacgggctgctgtgtgtggcagtccaggccagtacaggctggcgagagtaagtccaggcatgagcccaggggccacgggacggtgtccccctgcacaaggagccaggagacagtaagggagccgaggagccctcatgggggcccagcagccctgggtcgcgcagcccagcccaccctgcggtggagacaggccttcacccagtacacgcaggcctggccctcgggtcgtcgcagtgagtcactcatgttgttcacagatcaccacgctcaggagccgcattgaccaggcccagaagcagtgagtagccctgccgtcctcgctccgcactgggcacaggggcccttggggccagccgctgtagccagtccctaacaagggccggtggtggctggcctcggcagggcagtaacgagactaacccggccaggccacccaggccagcatgc

SEQ ID NO: 33039 - DNA, 282 bp, Homo sapiens; identical to SEQ ID NO: 29746
  chr11:2026733-2027015
  hypo

SEQ ID NO: 33040 - DNA, 157 bp, Homo sapiens
  chr11:2108016-2108173
  hypo
cgaggaatgcacgtcagaaccagtaggacagctgccatcccaaagccagaccacggcaagcgctgggcgtgggggagtcggagctgcctgtgctgctggggatgggccgtggtgccaacgctatggggccgtgggctcctcacacatgtaaacctac

SEQ ID NO: 33041 - DNA, 331 bp, Homo sapiens; identical to SEQ ID NO: 29749
  chr11:2117541-2117872
  hypo

SEQ ID NO: 33042 - DNA, 166 bp, Homo sapiens
  chr11:2122369-2122535
  hypo
cgagcagcgggagggaccaccctgccaggccaagggaggaagacccggggcctccagacacagtgtaccagaggagaacccttcccatccagcatggccaagcgggacccgtgtggcacttgaagctgggtccctggactcaccaccttccctcactggacccctc

SEQ ID NO: 33043 - DNA, 450 bp, Homo sapiens; identical to SEQ ID NO: 29751
  chr11:2124971-2125421
  hypo

SEQ ID NO: 33044 - DNA, 339 bp, Homo sapiens; identical to SEQ ID NO: 29752
  chr11:2334660-2334999
  hypo

SEQ ID NO: 33045 - DNA, 380 bp, Homo sapiens; identical to SEQ ID NO: 29753
  chr11:2337172-2337552
  hypo

SEQ ID NO: 33046 - DNA, 174 bp, Homo sapiens; identical to SEQ ID NO: 29754
  chr11:2362566-2362740
  hypo

SEQ ID NO: 33047 - DNA, 558 bp, Homo sapiens; identical to SEQ ID NO: 29755
  chr11:2412921-2413479
  hypo

SEQ ID NO: 33048 - DNA, 1510 bp, Homo sapiens
  chr11:2435237-2436747
  hypo
cgcccgcccaccccaccccctggcagctctcctcgaggacagctggcactcacctgaacgccgtcgtgggcaaagaaggccttggcgtcagcctcggtggccaggtgcaggcaggtggtcttgctccagcagcggttccggcgcaccagcagggcgaaggcgcgggcctcactgttgctgtagcactcggagaagaggtctgcccccggaggccctggccgctaggacgagacgccgatgcccggcccggcccccgacgcccctcctccatcccctgcccagacctgggctctgcagccgcaccctgcgttcaacacgcagggcccagccaggccttctgccccctccggcctgctccgggcccttcctgaacctccgtccttctccggctctgtccctcccccagcaggacaaagggaacctctgccacgctaaatgtccctcgtcctgcggcagggcccagtgtatgcccggggtgtgaggctgtatcgtcctcaccacgtgcacagcggtcccacactcagggtctggggccgcctccaccccaggcagagccgtctgtcctctcctatggaggaggcccctgagggcacctggagccccacggcggtaacaggcagccctggcgaggcccaggacccttcgtccgacccctccgtcacatcctcccccgcgcgcgggcccggccccagccgccggtcactcaccaagggccagccgctcgtatttcgcctcgcgcgtggctcgggccgcctcggcctccgtctccaggtgcgacatctctttgaggattttgcaggcggccagtgcggctgccacaccttcctggccctacgagacctggtctcaggaggccgcccctcccctgcccccgcgctgggcccgcggcctgggctcaccatggcccagaagtaggtggccatctcgtggcggttctgcagcacggcccacaggaacaggtcccgccaggggttctcgctcttctggttcaggtccagcagccacttctggcccgtgggccgcttggccgggcccttctcctggaggacacgggcgtcggcctcctgctgcggccccagcctcgccctccatccccacggagcccccgctcaccgccctcctgcggtcccctggccggccgtcctggtagaagcctcggcaggcgtcctgcaggaagtccttgagtacgcgggagacctcgtgcagggagaaggccggtggccccgcgggtggctcccgggcctgctgggtgcccaggccggccagcgtcagccgggcctcctcctgcttccgctgcagcaggtcgaagagcaggctcttgcgtgacacggagcggtagagctcctgcagccgcccatacgtcaggaagtcggccacgtctgcgccgttgtccacaaagaggcgcacaaactcgggcttgttgctgaccagggcgtccaccatcacctcctccaggtcacaggacttggcggccatgggcacccgagggaagggggacaagagagtgagc

SEQ ID NO: 33049 - DNA, 716 bp, Homo sapiens; identical to SEQ ID NO: 29759
  chr11:3243313-3244029
  hypo

SEQ ID NO: 33050 - DNA, 236 bp, Homo sapiens
  chr11:3249619-3249855
  hypo
cgtgggcggcggcacgagtaccaggctgggaagagggcggccaggcactgctccacgctgacggccgccaggagactcaggcccacgatgtagcagaagaagcgcagcgttgccaggctggtctgcacgaagcccgggaagtccagccggccttgcagcaagtcggggacgatggccaccatgtggcagccaaggaagatgagatccgcgcaggccacgtccaggaggtagatggc

SEQ ID NO: 33051 - DNA, 142 bp, Homo sapiens; identical to SEQ ID NO: 29760
  chr11:44608911-44609053
  hypo

SEQ ID NO: 33052 - DNA, 151 bp, Homo sapiens; identical to SEQ ID NO: 29761
  chr11:44621715-44621866
  hypo

SEQ ID NO: 33053 - DNA, 237 bp, Homo sapiens; identical to SEQ ID NO: 29762
  chr11:44625100-44625337
  hypo

SEQ ID NO: 33054 - DNA, 457 bp, Homo sapiens; identical to SEQ ID NO: 29763
  chr11:44639755-44640212
  hypo

SEQ ID NO: 33055 - DNA, 495 bp, Homo sapiens; identical to SEQ ID NO: 29764
  chr11:44640545-44641040
  hypo

SEQ ID NO: 33056 - DNA, 128 bp, Homo sapiens
  chr11:44941378-44941506
  hypo
cggggtcaacgggcctgaagactttaagtttgcatctgtgtttcgactcctgaccctggatagtgaagaggtgccggaggcctgctgccggagggaaccccaaagtcgggacggggtcctgctgagcc

SEQ ID NO: 33057 - DNA, 541 bp, Homo sapiens; identical to SEQ ID NO: 29765
  chr11:46337908-46338449
  hypo

SEQ ID NO: 33058 - DNA, 365 bp, Homo sapiens; identical to SEQ ID NO: 29766
  chr11:57182515-57182880
  hypo

SEQ ID NO: 33059 - DNA, 233 bp, Homo sapiens; identical to SEQ ID NO: 29767
  chr11:57188507-57188740
  hypo

SEQ ID NO: 33060 - DNA, 169 bp, Homo sapiens; identical to SEQ ID NO: 29768
  chr11:61490202-61490371
  hypo

SEQ ID NO: 33061 - DNA, 591 bp, Homo sapiens; identical to SEQ ID NO: 29769
  chr11:61511518-61512109
  hypo

SEQ ID NO: 33062 - DNA, 309 bp, Homo sapiens; identical to SEQ ID NO: 29770
  chr11:61640585-61640894
  hypo

SEQ ID NO: 33063 - DNA, 459 bp, Homo sapiens
  chr11:61664527-61664986
  hypo
cggggagagggaggcctggctcatcccccagtaacccacagccctctgaatactaagggaggactcaaatagtcctccccacagcaagtaagtggtgatggcggaggtggggtggcttcaggatttgggtttaatcccaagcacgagggcgggcagggaaaggatttggtttcattccttcagatgcccaagccttggccagagccccagggtgcaggagtgagggcgcgtggccacccagcctgtaccaacaaagcctgcctttattaaatagagatcgcgttacattccatccaaagaaggaaatccggacgtggtgagggatgcgtccaggtgggagctccgaacgctggtcctgagtgggctctgatgggtgggagggcccaggtcctgcctgcccacccaggccccacatgccagggcgcgtgtctgcatggccacccacagctgaaaacaggc

SEQ ID NO: 33064 - DNA, 200 bp, Homo sapiens; identical to SEQ ID NO: 29771
  chr11:61668820-61669020
  hypo

SEQ ID NO: 33065 - DNA, 214 bp, Homo sapiens; identical to SEQ ID NO: 29772
  chr11:61672924-61673138
  hypo

SEQ ID NO: 33066 - DNA, 371 bp, Homo sapiens; identical to SEQ ID NO: 29773
  chr11:61673908-61674279
  hypo

SEQ ID NO: 33067 - DNA, 425 bp, Homo sapiens
  chr11:61674760-61675185
  hypo
cgggccaggtgagcgtccactcgggcagcaaagctcagtgctcgctgagccgggaggcagggggggtgcctgggctggcctgggcaggcggggatgggcctcaccttgccccgagcctccttcagctgcttttctgatgccgcctgcttcatgttggcttctcgaaccatcttgtgagcttcctaggaagaaggcagtccctgcgtgagtggtgaggagccaacggacgcccagatgacccattccccaagttgttcccgcgcccagccggtgtacctcaaacaggctggccgtcagctcttccagctcctgttctagctgctcccgcaccttggacagccgctcacattcctcgtcctttagcttcagctcctggaggaaaagaggcaggcacttgagcacctcagcatccccaggcctggcac

SEQ ID NO: 33068 - DNA, 563 bp, Homo sapiens
  chr11:64323500-64324063
  hypo
cggaggcgtgggcctcttccagaccctgcaggtgctcaccttcatcctcccctgcctcatgataccttcccagatgctcctggagaacttctcagccgccatcccaggccaccgatgctggacacacatgctggacaatggctctgcggtttccacaaacatgacccccaaggcccttctgaccatctccatcccgccaggccccaaccaggggccccaccagtgccgccgcttccgccagccacagtggcagctcttggaccccaatgccacggccaccagctggagcgaagctgacacggagccgtgtgtggacggctgggtctatgaccgcagcgtcttcacctccaccatcgtggccaaggtagggcctcccccagagccactcgagtcccgtcaccttggaggtcagagtcatggatcaggttggttggactccaaggtccagtcctgggagggacccgcctcctctcgagcctctcagcccctcgtcagccacacacaggggagtgggcggcagggatcagtctacagatggggccagcccaggctcctggtagtgc

SEQ ID NO: 33069 - DNA, 328 bp, Homo sapiens; identical to SEQ ID NO: 29778
  chr11:66655218-66655546
  hypo

SEQ ID NO: 33070 - DNA, 250 bp, Homo sapiens; identical to SEQ ID NO: 29779
  chr11:67432668-67432918
  hypo

SEQ ID NO: 33071 - DNA, 134 bp, Homo sapiens; identical to SEQ ID NO: 29780
  chr11:68772692-68772826
  hypo

SEQ ID NO: 33072 - DNA, 267 bp, Homo sapiens; identical to SEQ ID NO: 29781
  chr11:69931095-69931362
  hypo

SEQ ID NO: 33073 - DNA, 476 bp, Homo sapiens; identical to SEQ ID NO: 29782
  chr11:69946965-69947441
  hypo

SEQ ID NO: 33074 - DNA, 422 bp, Homo sapiens; identical to SEQ ID NO: 29783
  chr11:69962357-69962779
  hypo

SEQ ID NO: 33075 - DNA, 540 bp, Homo sapiens; identical to SEQ ID NO: 29784
  chr11:69982802-69983342
  hypo

SEQ ID NO: 33076 - DNA, 227 bp, Homo sapiens
  chr11:70016958-70017185
  hypo
cggggtgctgactagcactgggctctctctgcagtcatccagtttggcttcgtcaccctgtttgtcgcctccttccccctggccccactgtttgcgctgctgaacaacatcatcgagatccgcctggacgccaaaaagtttgtcactgagctccgaaggccggtagctgtcagagccaaagacatcggtgagtgaccccacgggccggcagaaccggttccgagtgc

SEQ ID NO: 33077 - DNA, 196 bp, Homo sapiens; identical to SEQ ID NO: 29786
  chr11:70028548-70028744
  hypo

SEQ ID NO: 33078 - DNA, 297 bp, Homo sapiens; identical to SEQ ID NO: 29787
  chr11:70031529-70031826
  hypo

SEQ ID NO: 33079 - DNA, 202 bp, Homo sapiens; identical to SEQ ID NO: 29788
  chr11:73063854-73064056
  hypo

SEQ ID NO: 33080 - DNA, 233 bp, Homo sapiens; identical to SEQ ID NO: 29789
  chr11:74994376-74994609
  hypo

SEQ ID NO: 33081 - DNA, 304 bp, Homo sapiens
  chr11:85906179-85906483
  hypo
cggccaccgagggggtcggggaggctgcgcaaggcggtgagccccggcagctggagcagcccccgccccagccgcacccaccgctgccccaggagcagcacgaggaagagatggcagcagaggctggggaagccgtggcgtcccccatggacgacgggtttctgagcctggattcgccctcctatgtcccgtacagggacagaacagaatgggctgatacagatccagtgccgcagaatgatggccccaatcccgtggtccagatcatttatagtgacaaatttagagatgtttgattacttcc

SEQ ID NO: 33082 - DNA, 220 bp, Homo sapiens
  chr12:117531001-117531221
  hypo
cgcatctggtccaccctggtagcagaatatggcaattggtgaatgagccgaggccaccgtctgaggccacttaaagactttagaaccaagaagtattacccaggggcgagaacgcagtggagaaaccagcgccacccccaccagccacgcttggctacgccagtcctccctgccatctctagctccttctccaaatgagattagaccaggaatggaatcc

SEQ ID NO: 33083 - DNA, 557 bp, Homo sapiens
  chr12:129189650-129190207
  hypo
cgtggctgcagttcagtgatggctctgtgacgcccctggacatctacgacaccaaggacttctccctggcagccacctcccaggacgaggctgtcgtgtcagtcccccagccccgctctcccaggtggcccgttgtggtggccgaaggggaaggccagggcccactgatccgagtggacatgacgatcgccgaggcctgccagaaatctaaacgcaagagcatcctggctgtgggcgtcggcaacgtcagggtcaagttcggacagaacgatgctgactccagccccggcggggactatgaggaagatgagatcaagaaccacgccagcgaccgccggcagaagggccagcaccatgagcgcacaggccaagatgggcacctctatggcagctctcccgtggagcgtgaggaaggggctctccgaagagccactaccacggccaggtccctgctggacaacaaagtggtgaagaacagtcgggcagacgggggcaggctggcaggagaggggcagctgcagaacatccccattgacttcaccaacttccctgcccac

SEQ ID NO: 33084 - DNA, 701 bp, Homo sapiens
  chr12:130909511-130910212
  hypo
cgaggggggggaagcatgcgtctactcaggccgggggcatgccgtggagggctctgcaatgaaaacagaatgggttacggggctggggcggggtggaggctgaggcagagcacacgcagagccagcgggccgggcaggagccagcgccatgcatccagccaaggagagggcaggtgagatcccggcggcacatcaggccccacagtgcccacggtaccgctgctgtagatggtgggtgtggccacggtgccaggggagactgcccgggggctacatcctcagaaaccctgagggcagctgccactggaggccgtgtgtgactggagacagttcaccagacacggagcctgacccgtccctgtccatccactgggccaacttcccttccagcgctcggcaccctctgcaggactttctagttaggctgacgtgtcacccttctccctaagatacaagctgcgtgaaaccacgccatccccggccccaccaacagcgcccgcacaccatcgtgcagagtctgtgtcagcaaaggactggggtccgcctgtctcctctgcatcctgcatcaagtccctgagagccacacttgagccatcacagtctccagtgggtggcacagagctggccacaccgggagctgcttaaccagaccagtgtccatgacttttatactgcccgtctgcacgccatcactctctgcc

SEQ ID NO: 33085 - DNA, 429 bp, Homo sapiens; identical to SEQ ID NO: 29798
  chr12:131095743-131096172
  hypo

SEQ ID NO: 33086 - DNA, 454 bp, Homo sapiens; identical to SEQ ID NO: 29799
  chr12:1943616-1944070
  hypo

SEQ ID NO: 33087 - DNA, 155 bp, Homo sapiens; identical to SEQ ID NO: 29800
  chr12:1992067-1992222
  hypo

SEQ ID NO: 33088 - DNA, 75 bp, Homo sapiens; identical to SEQ ID NO: 29801
  chr12:2023599-2023674
  hypo

SEQ ID NO: 33089 - DNA, 116 bp, Homo sapiens; identical to SEQ ID NO: 29802
  chr12:2613903-2614019
  hypo

SEQ ID NO: 33090 - DNA, 482 bp, Homo sapiens; identical to SEQ ID NO: 29803
  chr12:3103789-3104271
  hypo

SEQ ID NO: 33091 - DNA, 144 bp, Homo sapiens; identical to SEQ ID NO: 29804
  chr12:53007462-53007606
  hypo

SEQ ID NO: 33092 - DNA, 181 bp, Homo sapiens
  chr12:53189528-53189709
  hypo
cgctcccaaagccacctccatagccacctgcaaaggcacagctgctccgccctcccccaaagcctccagcccgggagccgccagctgccacgctgatggagatgctcttgttgccgcccaggttgtagaggctgcgactgccaaagccacctgctccgctccggaagccataggcccctcc

SEQ ID NO: 33093 - DNA, 112 bp, Homo sapiens
  chr12:5335923-5336035
  hypo
cgcctgttaatagcacaagtgacacatcatagatcactcgctgacaggctgaactgggcgccatcttgaagaacgtaggctgcatgctaatgacgcccaggaggagctgcgc

SEQ ID NO: 33094 - DNA, 617 bp, Homo sapiens; identical to SEQ ID NO: 29805
  chr13:106912373-106912990
  hypo

SEQ ID NO: 33095 - DNA, 319 bp, Homo sapiens
  chr13:113797753-113798072
  hypo
cgcacacgcccagcacttgggttctcctgttggcatcctccggccagatgcattcatcccatttcgcccggcccgtttgtctctgtccatccgtcaagctttcttgacttcttggtgcattttcaggcaaaccgcagacgccaacactcccctcgctgcctgggttgctgcctggcgtccattgttcacaggcggtcacctgaggggaggccaacgctcggacagctgcgctcacctgcagatccgacccctgccgacgacgtggggcctcgccctgcaagcccgctgcccctccgggtgcccctgcgctctgcctccc

SEQ ID NO: 33096 - DNA, 150 bp, Homo sapiens; identical to SEQ ID NO: 29808
  chr14:101134041-101134191
  hypo

SEQ ID NO: 33097 - DNA, 415 bp, Homo sapiens; identical to SEQ ID NO: 29809
  chr14:101489771-101490186
  hypo

SEQ ID NO: 33098 - DNA, 495 bp, Homo sapiens; identical to SEQ ID NO: 29810
  chr14:102068306-102068801
  hypo

SEQ ID NO: 33099 - DNA, 1219 bp, Homo sapiens
  chr14:104617597-104618816
  hypo
cgtttctagaacccagtctcagggttctagagaaacctgtgtgtccccccagttcagggaagggggcagtcaccaaacagggtgcatcccagcgtacagctcagacctgggtgggggagctggtggagtgtgcggcggggggtggggccctgggctgtacccgatcctgcggctcttgcgccccttcggtgagctcatgtgccctctaggagcgtctccgagggaggccttcgcttctgttgacacctttacagcagcactgatttgattttccacctgccccaccggggctggagacctgaagaggaagggagagggtctcctgcccctggctctgccttgagtgagtgtgggtgagggaggccctcgtggctctgaagagacgttgcttttaaggggccctgcttcttgccagtctcctgcgtgtccccggccaggcggccttagctgacagtggtccggttgtccgggagccgcaaacctgccttgttagccgcaggccggggcgcttaatgacggctggggaaggtggacagttaacaaggacattgtgagcctcacgatgaagcccgatcattattttcctgctgggcttgtgtgggtgaaagtgtttgggcttattaatctgttacggatggtgcggtggccaggcgggagctcgcagcgtcatggacggtgagagtgctggtgggctctgggtgccggccctccctccccaggcactgaccctgcctttgtcccttgctgtcctcaggatccttgcctctctgccctgcttctcgacaagctaccagcacctggggccctgccagcctgtcgcccagaggccgagcgccgctgtgacgtctgcgccacacacctgcagcagctcacacgggaggccatgcacctgctgcaggcccctgccagccatgaggaccttgacgccccccatggaggccccagcctcgcaccccccagcaccacgaccagctcgagggacacgccaggaccagcgggtcctgcagggaggcagccaggacgagctgggccagacaggaccaaggggctggcctggtcccccgggcccagtgtccaggtgtctgtagcacctgcgggtcttggaggggcgctgagcacggtcaccatccaggcccagcagtgcctggagggcatgtggagtgtctcgcgggtcaacagcttcctcccgccggcgtgcctggtgagtgtcttgctcagc

SEQ ID NO: 33100 - DNA, 266 bp, Homo sapiens
  chr14:104619100-104619366
  hypo
cgatgcacagggcaccgtgtgtagatcggggctcacgaggcagatggagtaggagggcccttgtggcagagcgagggcctgtgtggaggcctgggggtgtgaggcgtccatggacgtcgggcgggggaccggcagttgcaattgctggagatgcgttgcctgcccctgtggcaccctgggggcagagggacatgtgggtggctgtgaagagccgtgtttctgcctggtacactgtctagtcaccacacagcgaccagcacaagctc

SEQ ID NO: 33101 - DNA, 932 bp, Homo sapiens
  chr14:104622929-104623861
  hypo
cggccatgggttgggcagggtgagccggccatgggttgggcagggtgagccctccatggtggtgaggagggatactgtctgggatggcagggcctctgtctggagtgtccctcctgggtcccggggcggcttgttctgctgacgtgccgtgcctggcctctggcctgtgccacttgggacaccctgaggacgctgggccttccagaccagcccacgtcccctcagcacggggaccccagtcctctgctagcctgggtacaaaggacgcctcgggcagtggttatcgactggacacttggggccgaatgacgcttggcacctgggtgaccgtgacctgaccaggccacggtgcccaagggggtccttggagagcttggggcactgggcccttggggaaggggccggggcgaggggtggccaggctgaagcaggctgccttccctgccttgcctggggttgcatccccccacgccgcccaggaccaggtttggcctgagggttcggggtcccacgtgtctgggaatggaacgtgcggaggtggagctcacgtttgctgggctgtcccgggcgtttaattacgtttgtgcttcattatgaggaggcctccctttctgggatttatttgagctaatgagttggaaatgccagggtagtatttcagatgagggagcgccacacatcaccgtacgtggggcaattagtgttcctgccaaatagttatcgtggtttcttctctaattacgccgctgggtgctcccaggaggctcaggggtgagagggtggggggtctgtgtccatcggtcttgaccagtgtggtcgctgcgattctggagtttgatgggggagaggcggaaagtctggcttctggaccaccatctgcctccctctctgcctccaaggagtcctgctggggcagaccgcccacacacccc

SEQ ID NO: 33102 - DNA, 226 bp, Homo sapiens; identical to SEQ ID NO: 29813
  chr14:104633637-104633863
  hypo

SEQ ID NO: 33103 - DNA, 825 bp, Homo sapiens
  chr14:104639065-104639890
  hypo
cggtggttgctggcagcttctgatgggaaaggaggctggtcctacacatgggccgtggtgggcatatggggtgaggggcttgtggagaggaagctgaacccctgccgaactgaaaggcagagggcttaggatggatccaaagaggcccctgagatctcggtgcccctggttggcccccggggacgccagtagccataaaggctccttgcgtggtgtgtggtggggcctgacgcctgcgtggcccccaggcaagtcgtacaccatgatcgggaaggacagctcaccccagagcctgggcatcgtgccctgcgccatctcctggctcttcaggctcatcgaggagcgcagggagaggacgggcacccgcttctccgtccgggtctcagccgtggaggtgtgcgggcgcgaccagagcctgcgggacctgctggccgaggtggcccctggcagcctccaggacacccagtctccgggagtgtacctgcgggaggaccccgtgtgtggggcgcaggtgcgcctgcctactgtcccaccttgggggaggggggctgcacttggccctgagccactgaagacgccgctgcctctgcctttcctgcagctccagaaccaaagcgagctgcgggcacccacggccgagaaggcggctttctacctggatgcggccctggcggcccgcagcaccagccgagcgggctgtggcgaggacgcccgacgcagctcccacatgttgttcacgctgcacgtctaccagtaccgcatggagaagtgcggccggggaggaagtaggtgccacacccgcactcccgggcccctgtgggatgc

SEQ ID NO: 33104 - DNA, 637 bp, Homo sapiens
  chr14:104640046-104640683
  hypo
cggaggccgcagccgcctgcacctcatcgacctgggcagctgtgaggcggcggctggcagggccggggaggctgctgggggtcccctgtgtctgtccctgtcggccctgggcagcgtcatcttggccctggtcaacggagccaagcatgtgccgtatcggtgagtgtagggcctgggcaggtgccgaccagggtggccccttggtgacctggtaaatccgtgtctggtgtgcccggtgctgctgtggcccccagctcctcagggctttgctcctccaccacctgacaggcctcgctgcccgtgggctgcctggggccccacgctgggctggtgccggagctgggtgggaaccagactgatcccagggctgcccttggccagcctgtccccgaagctcccttcccaaggccttggcatctgaaccgcctcgacccgcagggaccacaggctcaccatgctgctgcgtgaatccctggccaccgctggctgccgcaccaccatgatcgcccacgtgtcggatgcgccagcccagcacgcagagacactcagcaccgtgcagctcgccgcccgcatccaccgcctgcgcaggaagaaggccaaggtgctccccacctcctgcccgccccatctcggggcc

SEQ ID NO: 33105 - DNA, 657 bp, Homo sapiens
  chr14:104641166-104641823
  hypo
cgctcccagcgtttggtgggacatggttggtggtgcctgctgtagttttcatcacagtgaccgcagcattggccctgtgctctggggagggtcggggaagcgggggcgtgtaggggagactgggctcggcagctccacttttcttcccccagtacgcctccagctcctctggcggggagagctcctgtgaggaaggccgggcccgtcggcccccgcacctgcggcccttccacccacgcactgtggccctggaccccgaccgcacgcctccctgcctgcccggtgaccccgattactcctccagcagcgagcagtcctgtgacacggtcatctacgtggggcccggtggggcggcgctgtcagaccgggagctcaccgacaacgaaggtccgcctgacttcgtgcccatcatccctgccctgagccgccaccggccctccaagggtccccgagacgcagaccacttccgctgcagcaccttcgcggagctgcaggagcggctggaatgcatggacggcaacgagggtccctcaggaggtccaggtggcaccgacggagctcaggccagccccgcccgagggggccggaagccctcgccaccagaggctgcatcccccaggaaggccgtgggcaccccgatggctgccagcacccctc

SEQ ID NO: 33106 - DNA, 805 bp, Homo sapiens
  chr14:104642056-104642861
  hypo
cggacccctcccgtgggcatgagtgggcaggtggctgggtccccgatgcttcctggggccacctgcccccgcctggctgctggcagtcgctgtccggagcggggcctgctcaccaccacagtgaccctgcagcggccagtggagctcaacggcgaggacgagctggtgttcacggtggtggaggagctgtccctgggggcgcttgccggagctgggcggcccaccagcctggctagcttcgacagtgactgctccctgcgggccctggcctcggggtcccggccagtcagcatcatcagcagcatcaatgatgagtttgacgcctacacctctcaggcccctgagggggggcccctggagggggcagcctgggccggcagcagtcacggctcctccatcagctcctggctcagcgaggtcagcgtctgcactgccgacagccgtgaccccacgccgcagccccgcttcagccccgactcgctggcagggcttgaccctgggggcccccctgccctggatggttccctgggggatggaagctctgggttcctggggccagacagacctgacagtcctgggccaacctggggtccgtgccctggggaagtggctgcagtggccccatcccgacccggcagggagccccaggccgggccctcgcggtgggcatccgcagcccagaccatccactccagcctcccccggaaaccgaggactgcctctgccaccacccgtgtgggctgtgctcgcctgggccagagcccacctggccgtggaggcctgtttgaggacccatggctgctcc

SEQ ID NO: 33107 - DNA, 1242 bp, Homo sapiens
  chr14:104643028-104644270
  hypo
cggatcccaccgctgcggaggggtgccaccacgctgggtgtgacaacgccagctgtgtcctggggagatgctcccacggaggtggtggcctgctcggggagcctgaaggcctcccccaccagcaagaagggtctggctcccaaggcgggcttcctcccgaggcccagtggggcggcccccccggccccacccacgcggaagtccagcctggagcagaggagcagcccggcctcggcccctccgcatgctgtgaacccggcgcgggtcggggctgctgctgtccttcgaggggaggaggagcccagacccagcagccgggctgaccactctgtccccagggccacgtccagcctgaaggcccgggccagcaaggtagaagcagcacaccgtcttgccggacacgcgtctctggagcggtacgaaggcctggcgcacagcagcagcaagggccgggaagcccctgggcggcctccccgggctgtacccaagctgggtgtgccaccctccagccccacacacggtccagctcccgcctgtaggagcggcgcagccaaggctgtgggggcccccaagccccctgttggtggaggcaagggccgtggcctagtggctggtgggtcgcgggctctggggccttcggtgaagctgtctacggcctctgtgacgggcaggagccctggcggccctgtggccggtcccagagcagccccacgggccgggcccagtgtcggggcgaaggctggccggggtaccgtcatgggcacaaagcaggcgctccgggctgctcacagccgcgtccatgagctgtcagccagtggagccccgggccgaggtggctcctcgtggggctcggcggactcagacagcggccatgacagcggcgtgaacgtgggggaggagcggccacccacgggcccggccctgccctccccctacagcaaggtgaccgccccacggcggccccagcgctacagcagcggccatggcagcgacaacagcagcgtgctgagtggagagctgccgcccgccatgggccgcaccgcccttttccaccacagcggtggcagcagtggctatgagagcctgcggcgcgacagcgaggccaccggcagcgcctcctccgcccctgactccatgagcgagagtggggctgcctccccaggcgcccgcacccgcagcctcaagtcccccaagaagagggccacaggtgggtgcagaggtgcacagccctctacagtttac

SEQ ID NO: 33108 - DNA, 1156 bp, Homo sapiens
  chr14:104645553-104646709
  hypo
cgcccgccctgcctcccagggtctggcgtgcgtcagtacaaggctgcggctggcggagcgcaggcagcagcggctgcgggaggtgcaggccaagcacaagcacctgtgtgaggagctggccgagacccagggccggctgatgctggagcctggccgctggctggagcagtgtgagtcccgcccgcccacggacccagcccggcccaccgtgtgccctgacagctgccctcccctcccagagccctgttgctctcctgtacctcgtggtgggaaggctggaaggcagggtcggccgggccaagatgcctttcctggggcctctggggggccaggtggctgcccccagcctcgggcctgacgcaggtgcccctcccctctcctcccctccccagttgaggtggacccggagctggagcccgagtcggccgagtacctggcggccctggagcgagccacggcggccctggagcagtgcgtgaacctgtgcaaggcgcacgtcatgatggtcacctgcttcgacatcagcgttgcagccagtgctgccatcccggggccgcaggaggtggacgtctgaggctgggcgccggacaagaggagggggcgtgcagcgggctggaggacgggacgtgggacggagcgaggatgtggtgggggctgcggggggaggatgcggaggggtttctgtgcaggacgggagtctcagagaggagacggagtgtgggggagggagggccggccacgcggtggacagagcgagggtgccagggtgaccagaagaccgtcaccacccgacagcaacgcaagtgcctttgaccttgatttggacttttctcccttttgcatttggtgctacagacttgagacaccagcagaagttgtgttcagcccggccccgctgcgcctgtccgggccggggctggcgccggttgtgtttgtgtccaccttgccttctttgcagccaagcagtttttgtggagtggagtgggacttacctgcacgccccaggggtctttcaggattcaggatgacttttcttttacaatggtttcctctcggcagagcccgggttgtgggggatctgtgtggggttctcaacgcagatccatcctggggtctcccgggcagggatggctgacctcgagtcccctcccttccc

SEQ ID NO: 33109 - DNA, 563 bp, Homo sapiens; identical to SEQ ID NO: 29820
  chr14:104746303-104746866
  hypo

SEQ ID NO: 33110 - DNA, 786 bp, Homo sapiens; identical to SEQ ID NO: 29821
  chr14:105517526-105518312
  hypo

SEQ ID NO: 33111 - DNA, 897 bp, Homo sapiens; identical to SEQ ID NO: 29822
  chr14:62162333-62163230
  binary

SEQ ID NO: 33112 - DNA, 227 bp, Homo sapiens; identical to SEQ ID NO: 29823
  chr14:65207965-65208192
  hypo

SEQ ID NO: 33113 - DNA, 245 bp, Homo sapiens
  chr14:65209843-65210088
  hypo
cgcctgggggccggccctccgcccggagccccctcagccccacagagaccttcagctggcccgacgtccgtgagctctgctccaagtatgcctcccgcgatgaggcacgccgagcagggggcggccggccccgcggcccacccgtcaacaggagccactcggtgccggagaacatggtagagccacctctgtcgggcagggtgggccgctgccgcagcctgagcaccaagaggggccggggaggc

SEQ ID NO: 33114 - DNA, 127 bp, Homo sapiens; identical to SEQ ID NO: 29825
  chr14:65236155-65236282
  hypo

SEQ ID NO: 33115 - DNA, 567 bp, Homo sapiens
  chr14:65239277-65239844
  hypo
cggcagggggctgaaggtacctggacacccagcaggtggagctcccgctcgaaggctgtgtgcacccggtggaaggactcggccgtgctggcgtccagccccacgtcctcgggcagctcgcggtgcttctcgtcgatgaggcccaggatctcggcacccgtgtagaagtagcggtgcaggtcataggaggcggccagcagctgcatgcgcgtgtcaatgagctccaggaggtctgcccacatctcgttcagcccgtccttccactcggcgatggtggccgcctcgctgtggcccgcgtcgatgagtcgctcgatgaaggcattcacattgtccacccgctcctgcccaatcgccccggtctcccgggcaaagtcccggaacttgtcccgcagaagctaggcatggggcagacagaaatgtggttatggggggcacaggggttacaggtgtcaccagcttagccaaagactttcccaggcagcaactgcagctccgggagctgcgctgtcacaccttccccagggcaggcctgcatcggctggtcccgcctcacactggggaggttac

SEQ ID NO: 33116 - DNA, 185 bp, Homo sapiens; identical to SEQ ID NO: 29827
  chr14:65271617-65271802
  hypo

SEQ ID NO: 33117 - DNA, 409 bp, Homo sapiens; identical to SEQ ID NO: 29828
  chr15:101910626-101911035
  hypo

SEQ ID NO: 33118 - DNA, 247 bp, Homo sapiens; identical to SEQ ID NO: 29829
  chr15:101938625-101938872
  hypo

SEQ ID NO: 33119 - DNA, 216 bp, Homo sapiens; identical to SEQ ID NO: 29830
  chr15:102020345-102020561
  hypo

SEQ ID NO: 33120 - DNA, 544 bp, Homo sapiens; identical to SEQ ID NO: 29831
  chr15:102076822-102077366
  hypo

SEQ ID NO: 33121 - DNA, 203 bp, Homo sapiens; identical to SEQ ID NO: 29832
  chr15:26026151-26026354
  hypo

SEQ ID NO: 33122 - DNA, 268 bp, Homo sapiens
  chr15:29133551-29133819
  hypo
cggcggtggctgtggtgagggctgttggagtggggagagtgggggttgagcctggcttcagagaccccctcgaggcctcagctcctctccggcgctcctggctgtcctctgccacgcatacctgccccggtgactcaacaggtgtgggcctcaggtgacaccatggtccgaagtcgtggagaaacctttactgtccaggggaggagaggactggcggtcggtggggatcgagacccagcacacatcactgggtggctcgaatgtcttc

SEQ ID NO: 33123 - DNA, 137 bp, Homo sapiens
  chr15:29145339-29145476
  hypo
cgcctggactcaggcttcttcgggctcatcagacctgaacagcctggcagtgtggctgtgtgggaatgggtgacaggtgctgttctccccagtgcaaatcaccaatgctgggcaccgtgcatcagcgtcgtggtgac

SEQ ID NO: 33124 - DNA, 273 bp, Homo sapiens; identical to SEQ ID NO: 29833
  chr15:29415573-29415846
  hypo

SEQ ID NO: 33125 - DNA, 245 bp, Homo sapiens; identical to SEQ ID NO: 29834
  chr15:29417894-29418139
  hypo

SEQ ID NO: 33126 - DNA, 67 bp, Homo sapiens; identical to SEQ ID NO: 29835
  chr15:29418595-29418662
  hypo

SEQ ID NO: 33127 - DNA, 139 bp, Homo sapiens; identical to SEQ ID NO: 29836
  chr15:31453201-31453340
  hypo

SEQ ID NO: 33128 - DNA, 497 bp, Homo sapiens; identical to SEQ ID NO: 29837
  chr15:62753676-62754173
  hypo

SEQ ID NO: 33129 - DNA, 310 bp, Homo sapiens; identical to SEQ ID NO: 29838
  chr15:62993112-62993422
  hypo

SEQ ID NO: 33130 - DNA, 222 bp, Homo sapiens; identical to SEQ ID NO: 29839
  chr15:63000769-63000991
  hypo

SEQ ID NO: 33131 - DNA, 220 bp, Homo sapiens; identical to SEQ ID NO: 29840
  chr15:63029125-63029345
  hypo

SEQ ID NO: 33132 - DNA, 290 bp, Homo sapiens; identical to SEQ ID NO: 29841
  chr15:63030480-63030770
  hypo

SEQ ID NO: 33133 - DNA, 67 bp, Homo sapiens; identical to SEQ ID NO: 29842
  chr15:63059828-63059895
  hypo

SEQ ID NO: 33134 - DNA, 131 bp, Homo sapiens; identical to SEQ ID NO: 29843
  chr15:63072875-63073006
  hypo

SEQ ID NO: 33135 - DNA, 374 bp, Homo sapiens; identical to SEQ ID NO: 29844
  chr15:63075618-63075992
  hypo

SEQ ID NO: 33136 - DNA, 222 bp, Homo sapiens; identical to SEQ ID NO: 29845
  chr15:63088341-63088563
  hypo

SEQ ID NO: 33137 - DNA, 142 bp, Homo sapiens; identical to SEQ ID NO: 29846
  chr15:63115985-63116127
  hypo

SEQ ID NO: 33138 - DNA, 1024 bp, Homo sapiens; identical to SEQ ID NO: 29847
  chr15:63132478-63133502
  hypo

SEQ ID NO: 33139 - DNA, 421 bp, Homo sapiens; identical to SEQ ID NO: 29848
  chr15:66946036-66946457
  hypo

SEQ ID NO: 33140 - DNA, 115 bp, Homo sapiens; identical to SEQ ID NO: 29849
  chr15:68888212-68888327
  hypo

SEQ ID NO: 33141 - DNA, 99 bp, Homo sapiens; identical to SEQ ID NO: 29850
  chr15:68893753-68893852
  hypo

SEQ ID NO: 33142 - DNA, 174 bp, Homo sapiens; identical to SEQ ID NO: 29851
  chr15:68937507-68937681
  hypo

SEQ ID NO: 33143 - DNA, 274 bp, Homo sapiens; identical to SEQ ID NO: 29852
  chr15:78010517-78010791
  hypo

SEQ ID NO: 33144 - DNA, 173 bp, Homo sapiens
  chr15:79081981-79082154
  hypo
cgagggtgaagctcggctctcagtgtagcaatgggggcaggcacagtacctgtgcccgagctcgtgggctacagtgaaggccagcggcaggcccgtgtcctcgttgatgctgcagctgcggtgcggctggcacatgcccgccacatgggacagtcccagggtctcacagggcc

SEQ ID NO: 33145 - DNA, 121 bp, Homo sapiens; identical to SEQ ID NO: 29854
  chr15:89386721-89386842
  hypo

SEQ ID NO: 33146 - DNA, 773 bp, Homo sapiens
  chr15:93594856-93595629
  hypo
cgcagtggcctcgtggggccgctcagaatatgccaggttctggagtcacccgggcctggggcaaattctagctcagcattccagctgactacgcacttggggtgggaaggtcacttggcctcttagagcatcaggctccccatttgtgaagtggagctatgcctgccaggccgggctggctcgaggaaggagggaggaagctgagacccacccccttgggatgctcagggagggtgctcctgtgtccccgctccgctccgtcttcccccattcccaggcacccgaggccctctcagcctctcagtgtccacgcagggcagagacaaagggcagggctgtgccctacagccgccccctcccccttaccttgctggtggcagtggccgctgagccgggcagcacaggcgtgttggtgacctgcacgttcaggtaattattgtcgatgagcggccaggcgccctgcaccttgcaggtctggaagcggtcggtgaaagtcctgaggtgtgggtccccgaagaggccacagtgcgtgtagttgggggtggccgagtgcttgtgaaagctcttctcgtaatggcagatctcggggctgtccgagcgctcctggctgtctccggccggtgggagcgtgcgcaggcgtggctgcgaggtggggccatccttggagcagttgtgctggctcatgaggtcctctatgccatggacggccgagtggtaggccaggtcaccccggcaggtgcgggccgtccgccgcgtgcacagggcgtagctgc

SEQ ID NO: 33147 - DNA, 716 bp, Homo sapiens
  chr16:1270065-1270781
  hypo
cggtgaggccggtgacccaggggggctccctgcagtccccaccacgctccccacggcccgccagcgtccgcactcgtaagcataccttcggacagcgctgcgtctccagccggccggcggccccaggcggagaggaggccgaggcctcggacccagccgacgaggaggtcagccacatcaccagctccgcctgcccctggcagcccacagccgagccccatggccccgaagcctctccggtggccggcggcgagcgggacctgcgcaggctctacagcgtggatgctcagggcttcctggacaagccgggccgggcagacgagcagtggcggccctcggcggagctgggcagcggggagcctggggaggcgaaggcctggggccctgaggccgagcccgctctgggtgcgcgcagaaagaagaagatgagccccccctgcatctcggtggaaccccctgcggaggacgagggctctgcgcggccctccgcggcagagggcggcagcaccacactgaggcgcaggaccccgtcctgtgaggccacgcctcacagggactccctggagcccacagagggctcaggcgccgggggggaccctgcagccaagggggagcgctggggccaggcctcctgccgggctgagcacctgaccgtccccagctttgcctttgagccgctggacctcggggtccccagtggagaccctttcttggac

SEQ ID NO: 33148 - DNA, 84 bp, Homo sapiens
  chr16:15604275-15604359
  hypo
cgaggattaaaagaggtgatgggcagagcaggtgcggcggtcataacgagggcaattgcaagcatatattaaacgtgacgtgcc

SEQ ID NO: 33149 - DNA, 157 bp, Homo sapiens; identical to SEQ ID NO: 29859
  chr16:58078950-58079107
  hypo

SEQ ID NO: 33150 - DNA, 177 bp, Homo sapiens; identical to SEQ ID NO: 29860
  chr16:67221106-67221283
  hypo

SEQ ID NO: 33151 - DNA, 477 bp, Homo sapiens; identical to SEQ ID NO: 29861
  chr16:72991953-72992430
  hypo

SEQ ID NO: 33152 - DNA, 166 bp, Homo sapiens; identical to SEQ ID NO: 29862
  chr16:75127929-75128095
  hypo

SEQ ID NO: 33153 - DNA, 368 bp, Homo sapiens; identical to SEQ ID NO: 29863
  chr16:80646305-80646673
  hypo

SEQ ID NO: 33154 - DNA, 257 bp, Homo sapiens; identical to SEQ ID NO: 29864
  chr16:85407706-85407963
  hypo

SEQ ID NO: 33155 - DNA, 469 bp, Homo sapiens
  chr16:89189500-89189969
  binary
cgggaacatttccagttcagccaaggagtcggtgcagcaggtggagtacagctgccctgcggggcctggctccaccaggggccaagacccttcgtggggaggagcacagcctgagggcctcagggtttgtgccctccgacacctgagattcagggctcccagaggggtgggtgggcgccccaggacaaccaggtgatgatgggcgctgtgaactctgaaaagccccagcatcagagacctgctgctctctcatgtgaagggactccccaccccacgctcacactcgcagacgcacttggtactttcatctgagtctcacgcagtagcccttctctccacagcatcccagaacccgagggtgcccctcactaccacggtcccggatccacgtggctcaagtgaggctgtggccgacagctgggctgtccgatccactcttgtctgtgccgaggcgtgggtcccggccagc

SEQ ID NO: 33156 - DNA, 199 bp, Homo sapiens; identical to SEQ ID NO: 29866
  chr17:17637969-17638168
  hypo

SEQ ID NO: 33157 - DNA, 508 bp, Homo sapiens; identical to SEQ ID NO: 29867
  chr17:39658629-39659137
  hypo

SEQ ID NO: 33158 - DNA, 104 bp, Homo sapiens; identical to SEQ ID NO: 29868
  chr17:39659216-39659320
  hypo

SEQ ID NO: 33159 - DNA, 206 bp, Homo sapiens
  chr17:39788221-39788427
  hypo
cggcagagacccacccagcccccatctccttgctcgggaggctttgggggcacagcgagggtcggctgtgaaaacacggagagaatgcgtgtagggtgactcgaggcacagccctggtgcgtgctgcgcggcggggttggtgatgaggtgctggctgatcccgaagatcaggagcactgactcaccagggctcccctgggttcccc

SEQ ID NO: 33160 - DNA, 649 bp, Homo sapiens; identical to SEQ ID NO: 29870
  chr17:40371760-40372409
  hypo

SEQ ID NO: 33161 - DNA, 139 bp, Homo sapiens; identical to SEQ ID NO: 29871
  chr17:40372634-40372773
  hypo

SEQ ID NO: 33162 - DNA, 418 bp, Homo sapiens; identical to SEQ ID NO: 29872
  chr17:40375292-40375710
  hypo

SEQ ID NO: 33163 - DNA, 249 bp, Homo sapiens; identical to SEQ ID NO: 29873
  chr17:42334648-42334897
  hypo

SEQ ID NO: 33164 - DNA, 136 bp, Homo sapiens
  chr17:42335362-42335498
  hypo
cgccgaaggtgatggcgggtgacagtgcagcaaagtagatgaagatgacggcagccaggacctgggggctgaatgcatctgtgatgtcactcaggtaataggggtagcggcgccggatatcacgcaccaggccccc

SEQ ID NO: 33165 - DNA, 99 bp, Homo sapiens; identical to SEQ ID NO: 29875
  chr17:42338019-42338118
  hypo

SEQ ID NO: 33166 - DNA, 336 bp, Homo sapiens; identical to SEQ ID NO: 29876
  chr17:4392128-4392464
  hypo

SEQ ID NO: 33167 - DNA, 520 bp, Homo sapiens; identical to SEQ ID NO: 29877
  chr17:4500096-4500616
  hypo

SEQ ID NO: 33168 - DNA, 294 bp, Homo sapiens
  chr17:56435251-56435545
  hypo
cgtcaactgggccaggggctggctcagggagggccctggggcactgtgggttagagagccgccccgaaggggctgctgagttggatctggtgacttgctgatcaggagaaggtggctctggctggggctgtgtccgaggaataggaggcctggactgggggactccggtttctgggccaggcttcctgccatgccactggaaccgctttttgtagtggtggtgccggtggcggtggtagtggacatggctggaaacctgggtttcccctgtgggcaccaccgagtccaaggaac

SEQ ID NO: 33169 - DNA, 80 bp, Homo sapiens; identical to SEQ ID NO: 29880
  chr17:56439864-56439944
  hypo

SEQ ID NO: 33170 - DNA, 229 bp, Homo sapiens
  chr17:60754637-60754866
  hypo
cgtgggggctgcgtggcgctggccactggcagcgccatggggctgtgggaggtgaagaactgtacctcgttccgggcccgctacatctgccggcagagcctgggcactccagtgacgccggagctgccggggccagatcccacgcccagcctcactggctcctgtccccagggctgggcctcggacaccaaactccggtattgctataaggtagggcagcctgttggcc

SEQ ID NO: 33171 - DNA, 207 bp, Homo sapiens; identical to SEQ ID NO: 29882
  chr17:60766578-60766785
  hypo

SEQ ID NO: 33172 - DNA, 499 bp, Homo sapiens
  chr17:60766832-60767331
  hypo
cggggtgagggaagcagagcccagcctgaaccctgaccccttccctgtagacccctccctgagcccgtccccagcagcgctgccccccgccccgggcactgagctctcctacctcaacggcaccttccggctgcttcagaagccgctgcgctggcacgatgccctcctgctgtgtgagagccgcaatgccagcctggcctacgtgcccgacccctacacccaggccttcctcacgcaggctgcccgagggctgcgcacgccgctctggattgggctggctggcgaggaggtgggctcccgacacttttgccctgggccccagccttgcccgggttcccctccctgccccttcctgcccccgccttatccgcaccctatcctgactattcccttcctcccaccccatggccccccatgcccagggctctcggcggtactcctgggtctcagaggagccgctgaactacgtgggctggcaggacggggagccgcagcagcc

SEQ ID NO: 33173 - DNA, 256 bp, Homo sapiens; identical to SEQ ID NO: 29885
  chr17:71431621-71431877
  hypo

SEQ ID NO: 33174 - DNA, 194 bp, Homo sapiens; identical to SEQ ID NO: 29886
  chr17:74013689-74013883
  hypo

SEQ ID NO: 33175 - DNA, 127 bp, Homo sapiens; identical to SEQ ID NO: 29887
  chr17:74019389-74019516
  hypo

SEQ ID NO: 33176 - DNA, 269 bp, Homo sapiens; identical to SEQ ID NO: 29888
  chr17:74621445-74621714
  hypo

SEQ ID NO: 33177 - DNA, 119 bp, Homo sapiens; identical to SEQ ID NO: 29889
  chr17:74625074-74625193
  hypo

SEQ ID NO: 33178 - DNA, 668 bp, Homo sapiens
  chr17:77126804-77127472
  hypo
cgataccgagcagtcttctgacacagtccctggaacgagtggagtgccctgtccttcagcccgggcttggtgcgggatggggcctgccatgctctaagctctggcctccctgcctggaggcgggacctggcccaagcctcaaagccgaagcacaaattcctcatcagtgaagatccagagccgccgtggtgctaggacacggtgcgcgggaatcagccccgcacctgcaaggcagcgtgctctgcgtgccctgcgtgtgccccatgtgtactgtgtgccccgtgtgtgagcatgtgtgccccatgtgtgctgtgcccccatgtacttgtgtgtaccgtgagccatgtgctgcgtgtcccgtgtgtgctgtgtgccccgtgtgtgcacatgtgcgccccgtgtgtgctgtgtgacccgtgtgcttgtgtgtaccgtgtgtgagccatgtgctgcgtgtgctgtatgctgtgtgctccgtgtgttctgtgcactgtgtgtgccctgcgtgtactgtgtgctctgtgcccatgtgtgctccgctcagtctccatgtgccctccgtgtgtattccatgtgccctccgtgtgctgtgctctgtgcacgctgggaacagcgctagagcgtctgtgcttctggacaggaaaacaagcccctcgtctaccttcacc

SEQ ID NO: 33179 - DNA, 741 bp, Homo sapiens; identical to SEQ ID NO: 29893
  chr17:77914408-77915149
  hypo

SEQ ID NO: 33180 - DNA, 445 bp, Homo sapiens; identical to SEQ ID NO: 29894
  chr17:77928738-77929183
  hypo

SEQ ID NO: 33181 - DNA, 75 bp, Homo sapiens; identical to SEQ ID NO: 29895
  chr17:77930343-77930418
  hypo

SEQ ID NO: 33182 - DNA, 431 bp, Homo sapiens; identical to SEQ ID NO: 29896
  chr17:79048174-79048605
  hypo

SEQ ID NO: 33183 - DNA, 403 bp, Homo sapiens; identical to SEQ ID NO: 29897
  chr17:79053502-79053905
  hypo

SEQ ID NO: 33184 - DNA, 196 bp, Homo sapiens; identical to SEQ ID NO: 29898
  chr17:79060680-79060876
  hypo

SEQ ID NO: 33185 - DNA, 264 bp, Homo sapiens; identical to SEQ ID NO: 29899
  chr17:79072884-79073148
  hypo

SEQ ID NO: 33186 - DNA, 257 bp, Homo sapiens; identical to SEQ ID NO: 29900
  chr17:79074754-79075011
  hypo

SEQ ID NO: 33187 - DNA, 659 bp, Homo sapiens; identical to SEQ ID NO: 29901
  chr17:79077368-79078027
  hypo

SEQ ID NO: 33188 - DNA, 508 bp, Homo sapiens; identical to SEQ ID NO: 29902
  chr17:79082625-79083133
  hypo

SEQ ID NO: 33189 - DNA, 241 bp, Homo sapiens; identical to SEQ ID NO: 29903
  chr17:79084476-79084717
  hypo

SEQ ID NO: 33190 - DNA, 168 bp, Homo sapiens; identical to SEQ ID NO: 29904
  chr17:79086354-79086522
  hypo

SEQ ID NO: 33191 - DNA, 158 bp, Homo sapiens; identical to SEQ ID NO: 29905
  chr17:79086890-79087048
  hypo

SEQ ID NO: 33192 - DNA, 206 bp, Homo sapiens; identical to SEQ ID NO: 29906
  chr17:7951722-7951928
  hypo

SEQ ID NO: 33193 - DNA, 462 bp, Homo sapiens
  chr17:79612376-79612838
  hypo
cgcagtgagcctggctggctacctgggcgccctctgtgagaacacctgcctgttacgtggcttctctgggggcatccttgccttcctggtgcttgaggccgtggcgggggccctggtggtggccctctggggcccgctgcaagacagcctggagcacaccctgcgtgtggccatcgcccactaccaggacgacccagacctgcgcttcctcctcgaccaagtccagctcgggctgaggtgctgcggagctgcctcctaccaggactggcagcagaacctgtgagtcttggagtgggcgagggacagggccaccacagggtcgcagaggccacacacccttgtgcgtgtacacacagtcactcacacgtacatactcattcgtgcatgcccacatgcatgcacacgtatacccacatgtacacgcatatccacactggcacgtctcgtgctcacaggtttcac

SEQ ID NO: 33194 - DNA, 196 bp, Homo sapiens; identical to SEQ ID NO: 29908
  chr17:9631380-9631576
  hypo

SEQ ID NO: 33195 - DNA, 477 bp, Homo sapiens; identical to SEQ ID NO: 29909
  chr18:10165791-10166268
  hypo

SEQ ID NO: 33196 - DNA, 257 bp, Homo sapiens; identical to SEQ ID NO: 29910
  chr18:10485485-10485742
  hypo

SEQ ID NO: 33197 - DNA, 2276 bp, Homo sapiens; identical to SEQ ID NO: 29911
  chr18:3449180-3451456
  binary

SEQ ID NO: 33198 - DNA, 414 bp, Homo sapiens; identical to SEQ ID NO: 29912
  chr18:35249615-35250029
  hypo

SEQ ID NO: 33199 - DNA, 132 bp, Homo sapiens
  chr18:3616275-3616407
  hypo
cgtattttaggatgtgtggatcattcgctgtctgacctgactactctatcactgtggcacagccctgggcgatgtgtacatgtacagccttgtttgtgtttgagaggtgagcccattcggtggtctgagggc

SEQ ID NO: 33200 - DNA, 486 bp, Homo sapiens; identical to SEQ ID NO: 29913
  chr18:59483218-59483704
  hypo

SEQ ID NO: 33201 - DNA, 164 bp, Homo sapiens; identical to SEQ ID NO: 29914
  chr18:60120657-60120821
  hypo

SEQ ID NO: 33202 - DNA, 115 bp, Homo sapiens; identical to SEQ ID NO: 29915
  chr18:74068664-74068779
  hypo

SEQ ID NO: 33203 - DNA, 153 bp, Homo sapiens; identical to SEQ ID NO: 29916
  chr18:74069268-74069421
  hypo

SEQ ID NO: 33204 - DNA, 163 bp, Homo sapiens; identical to SEQ ID NO: 29917
  chr18:74073695-74073858
  hypo

SEQ ID NO: 33205 - DNA, 684 bp, Homo sapiens; identical to SEQ ID NO: 29918
  chr18:74083302-74083986
  hypo

SEQ ID NO: 33206 - DNA, 1404 bp, Homo sapiens; identical to SEQ ID NO: 29919
  chr18:74090923-74092327
  hypo

SEQ ID NO: 33207 - DNA, 874 bp, Homo sapiens; identical to SEQ ID NO: 29920
  chr18:74096607-74097481
  hypo

SEQ ID NO: 33208 - DNA, 451 bp, Homo sapiens; identical to SEQ ID NO: 29921
  chr18:74120305-74120756
  hypo

SEQ ID NO: 33209 - DNA, 158 bp, Homo sapiens; identical to SEQ ID NO: 29922
  chr18:74134955-74135113
  hypo

SEQ ID NO: 33210 - DNA, 1161 bp, Homo sapiens; identical to SEQ ID NO: 29923
  chr18:74144952-74146113
  hypo

SEQ ID NO: 33211 - DNA, 266 bp, Homo sapiens; identical to SEQ ID NO: 29924
  chr18:74148373-74148639
  hypo

SEQ ID NO: 33212 - DNA, 308 bp, Homo sapiens; identical to SEQ ID NO: 29925
  chr18:74170482-74170790
  hypo

SEQ ID NO: 33213 - DNA, 510 bp, Homo sapiens
  chr18:74171117-74171627
  hypo
cgctgcagcagtaacggggcgccgggcccacctgctgcccctctcctgtgcatagggcgctctctccctgccccgagcttcggcttctcctccatgcacggtcactgctggaggcacactggacccagtgccagctcgggaaatcctgggccggtgacagccctgacccgtggccaccatccactcaacatcattgagccctcccacaggcacccaagctctctgaggacagccgtcctagcttccttcgtgggagaaaactctggccctccactgccggccagggaggcctcgcgtgccaagctggccctgagctcagcccaggatttgtgccattcaggacgtggcggccgtgtgcaccccatcgggcaccgcgtcgcctccctcggaatgtattccagcactgtctgccatgatgccaacagcaacacttctcaacaccaagcctttaaatgtccagcagctccacagcccgagtcagagtggcccagcctcccctggacctgatgc

SEQ ID NO: 33214 - DNA, 177 bp, Homo sapiens; identical to SEQ ID NO: 29928
  chr18:74175495-74175672
  hypo

SEQ ID NO: 33215 - DNA, 124 bp, Homo sapiens; identical to SEQ ID NO: 29929
  chr18:74176907-74177031
  hypo

SEQ ID NO: 33216 - DNA, 147 bp, Homo sapiens; identical to SEQ ID NO: 29930
  chr18:74183568-74183715
  hypo

SEQ ID NO: 33217 - DNA, 427 bp, Homo sapiens; identical to SEQ ID NO: 29931
  chr18:74194245-74194672
  hypo

SEQ ID NO: 33218 - DNA, 608 bp, Homo sapiens
  chr18:74325503-74326111
  hypo
cggtctcgtgcaagccccgcctctcccttactagcaaagttgtgaggacagcgcctgcacgcaacacttgcttactaacttgtaactgttattacagaaagcgtggagccaaacagatggcagaggcccaaggaagagcgcgctaaacccgaagtagatctgatttcacatcttgacttggcgattgtttagctgggtcagggtaaatgcctcactgttcctcgtctgtaaatgaacacgggtgctgaggttggggtgagcgcctcaccgagcctcagtttctcatctgtaaaatggacacctgtgcgcgcctcgcggcaggggctgctgagcacgcggatgggtcctctggaggctgggccgccaagaggcggcggctgcaccatctgatgctagagaacgagaaccgcagtgcgtgcccgacacaaagggaaggacaggggacactggaacaggggagacgacatggaagaaatctgggggagccaaaagccgccatgccgagaagggggtcggaggaggcgcgggagagaaaagcccagggctgtacactcgcatccctctgctgccggcccttcgggtacattcaaatactgggcatgagtccc

SEQ ID NO: 33219 - DNA, 155 bp, Homo sapiens
  chr18:74721775-74721930
  hypo
cgatgggtgaggacccgccggcgtcttaccttgtacatgttgcacagcccaggctggctgcgggcatgagagggcagagggctccggcccggctttagccagggtacctgccgggggacacagagtgggctgcgtgagtccgggtgggcgccgcc

SEQ ID NO: 33220 - DNA, 1775 bp, Homo sapiens; identical to SEQ ID NO: 29935
  chr18:74736601-74738376
  hypo

SEQ ID NO: 33221 - DNA, 533 bp, Homo sapiens
  chr18:74755425-74755958
  hypo
cgtggcatctgaaaatgtaaataagtgatgtaccctgtggggtagctctgctgcaggcaccccggggacctgctggtgaccctgcccttctcctgctgcgatcatcccaggccagcgtgacactcagcagcgtggacgtctctctgcaaacgcccaaatgcagtgtatgaaatgtcatccctagaaatggcttcatttgggataaagctttgaacttgcgtgcgtgccccgcaccccgtggcggactgagtcactgctttgctgttgcggcgtggtgagtaaaactttcccaggggagccggagttgagtgagaaagggatgcaggacacgcaggagctgacacatctctatggatttaagtcgctgtttccacaaatgctactcacatgcccacacgtgtagggcaggactgtcacgcgtccactctgctcagctttccaggccggatctggtcccagccattctacctgacccagactccccgcacccctgccattcccccagctgccgtcctgtgtctcctgatttctgc

SEQ ID NO: 33222 - DNA, 337 bp, Homo sapiens; identical to SEQ ID NO: 29938
  chr18:74759077-74759414
  hypo

SEQ ID NO: 33223 - DNA, 636 bp, Homo sapiens; identical to SEQ ID NO: 29939
  chr18:74763734-74764370
  hypo

SEQ ID NO: 33224 - DNA, 75 bp, Homo sapiens; identical to SEQ ID NO: 29940
  chr18:74806376-74806451
  hypo

SEQ ID NO: 33225 - DNA, 337 bp, Homo sapiens
  chr18:76123588-76123925
  hypo
cgtgatccacagaaatgattgctacgttccctgcagaacggacggcagtcgctggacagggccccagagcgcctgggtgcggtcagctccgcggactccccccgggacacctgcccagctgcggccgaccccggggcgcacaccctccgggatgaagacggcacgcctgctgcgcacggtggctgtgctgtgctttccagagacaccaaagatccagcaagccccggtttgtgtcgagtgtcacgggaatggagatgccttaaggctccggcttggacggcctgttgttcgcgtgctgagtgcactctgtgggcccgagcgccgagggtcccatttc

SEQ ID NO: 33226 - DNA, 466 bp, Homo sapiens
  chr18:76189679-76190145
  hypo
cgtgggacccatgacgcagagaggcaggtccctacccaccgggccgtgggccgctgagcacagagcgtggagccctgcggcggggtcgttcctgggccccgcgtgccatcctggggttgtgcatggtggcggcgaaggcacccagcgctgggaccccagcgaggcgacccggggccaccgggcaggcccaagagctccctgtctgcgggccccttgctttccgcagcagccggcctgtcggtcctcggcgggagcctctcgttccccagccacggggccttcccggggtgcggccgagtcaggcggagaccccctggggtgggtggcgggagcggggccgcagcaacagggcggcgtggagggggagaaacaccttacccagccggcggccccctccagcgtgcagctggaacgggaagctgtctgctcagccgtcagaaggatgcgagaaattacctagctcccc

SEQ ID NO: 33227 - DNA, 586 bp, Homo sapiens
  chr18:76486313-76486899
  hypo
cgagtgatggcgcaaagcaggccggtgaagcctcggcgctgggcccggcctggcactgcgcatccttggccttcgggacccgggctcccgcccccgtgcccagcctcacggagcccgcccaggcctgctgtcccccgagctccaggcccactgcccgccagaaccttctggtcttgcctcgcttcccgcctgcacttttctttcccggcctggcagagacatctataccagtgggaaaggcgagccactccggcagcgctgccaggttgcactccagcacctcacactcgcttctcccgggacttaaatttaaactcctcgagcgtcatgtccccatggctgtctggggccatcattgccacctcgtactcctctcttcactgccacaagaccaagagacagatgcgtcccggggtccttccacagcgttcccaggggaggaggagggcgcctggagccctggggaaggcgagcccgagccagcgcacgtggagactccctcggagacctctgcgcacatggagacccgcgcgcacgtggagactcgcgcgcaaaaggagaccccagtgcacatggagacttccac

SEQ ID NO: 33228 - DNA, 266 bp, Homo sapiens
  chr19:13119777-13120043
  hypo
cgctgtagccaggtcctcaccgaggtagatttgcgggggtctcccagtcccagtcccacacactgcctcatccccactcacagtcaacgcccgcaacaccccgccacccgcagtctgtcgcgcagtgacagcctgtcacaagcaccgccgcacaccggcacaatctgtcgtccacgcacagtctcacacacaacctgtcacacacgcacacacacacacagcggcacagtcgcacacacagccagcctcacgcgatcacaccaagc

SEQ ID NO: 33229 - DNA, 229 bp, Homo sapiens; identical to SEQ ID NO: 29947
  chr19:13156427-13156656
  hypo

SEQ ID NO: 33230 - DNA, 73 bp, Homo sapiens; identical to SEQ ID NO: 29948
  chr19:13181444-13181517
  hypo

SEQ ID NO: 33231 - DNA, 420 bp, Homo sapiens; identical to SEQ ID NO: 29949
  chr19:13186075-13186495
  hypo

SEQ ID NO: 33232 - DNA, 119 bp, Homo sapiens; identical to SEQ ID NO: 29950
  chr19:13194593-13194712
  hypo

SEQ ID NO: 33233 - DNA, 55 bp, Homo sapiens
  chr19:13201116-13201171
  hypo
cgcaacgacaggcgcctcctctgccaaccggtttgtcagcatcggaccccgggac

SEQ ID NO: 33234 - DNA, 155 bp, Homo sapiens; identical to SEQ ID NO: 29952
  chr19:14522737-14522892
  hypo

SEQ ID NO: 33235 - DNA, 366 bp, Homo sapiens; identical to SEQ ID NO: 29953
  chr19:15302345-15302711
  hypo

SEQ ID NO: 33236 - DNA, 367 bp, Homo sapiens; identical to SEQ ID NO: 29954
  chr19:1785308-1785675
  hypo

SEQ ID NO: 33237 - DNA, 287 bp, Homo sapiens; identical to SEQ ID NO: 29955
  chr19:18123660-18123947
  hypo

SEQ ID NO: 33238 - DNA, 183 bp, Homo sapiens; identical to SEQ ID NO: 29956
  chr19:2997586-2997769
  hypo

SEQ ID NO: 33239 - DNA, 760 bp, Homo sapiens
  chr19:31769887-31770647
  hypo
cgtcttccttcccttccatttccagcaaggagcgtttgcgaggcttggaccagcgcttggggttgttgttatcggtctcatggttgtcgtcgcggtaatgccccgtctcgttcatgtgcaccgtcaactccaccagggtgtcgtaggcagcgctgcagtccttacagcggaacttgctggcccccgtgaagatggagccatagagcttgctgctctgccggtacagctgcacggtgctgaagaggctgggctccgggagcatgcggctctgtgacacctgctgcagcgtcttagccatggcgctctggtgccagtcgaagctcccgctgccacagctgctgctgctgctactgctgctgctgctgctgccgttgttcttctccgaggagggctggtgcaggttgaggttgaggttggaccagtaggagttggagaggaagttgttgtacacggccttcatctgctccaggctatccgacacagtcgtgtcttccagtgggaccgtgacctccttggtctcctcttcgttcttgatggagccgctttcaaagtcagccattcggtcactggtctcactgatgtgtgactcgctgtccatttcatggcaggaaaactcggcggccggggagttctggtagctggggcaggccctggcgagctccttctccgggcacatgtacttggccgagggctctccatctgccgtatgctcctctgggtctaaaccttcgtccaccagggcagcagcctttaactcttc

SEQ ID NO: 33240 - DNA, 476 bp, Homo sapiens; identical to SEQ ID NO: 29959
  chr19:34303771-34304247
  hypo

SEQ ID NO: 33241 - DNA, 450 bp, Homo sapiens; identical to SEQ ID NO: 29960
  chr19:35551123-35551573
  hypo

SEQ ID NO: 33242 - DNA, 344 bp, Homo sapiens
  chr19:38964022-38964366
  hypo
cgagtggacggcactgtggacacgcccccctgcctgcgcctgacccaccgcacctggggctcccagaacagcctggtggagatgcttttcctgcggctgagcctcccagtccagttccaccagcacttccgctgcactgcaggggccaccccgctggcacctcctggcctgcagccccccgccgaggacgaggcccgggcggcggaacccgaccctgactacgaaaacctgcgccgctcagctgggggctggagcgaggcagagaacggcaaagaagggactgcgaaggagggcgcccccgggggcaccccgcaggcggggggagaggcgcagcccgccagggc

SEQ ID NO: 33243 - DNA, 257 bp, Homo sapiens; identical to SEQ ID NO: 29962
  chr19:39015907-39016164
  hypo

SEQ ID NO: 33244 - DNA, 162 bp, Homo sapiens; identical to SEQ ID NO: 29963
  chr19:41643155-41643317
  hypo

SEQ ID NO: 33245 - DNA, 782 bp, Homo sapiens; identical to SEQ ID NO: 29964
  chr19:45004129-45004911
  binary

SEQ ID NO: 33246 - DNA, 373 bp, Homo sapiens; identical to SEQ ID NO: 29965
  chr19:45314498-45314871
  hypo

SEQ ID NO: 33247 - DNA, 300 bp, Homo sapiens; identical to SEQ ID NO: 29966
  chr19:45315421-45315721
  hypo

SEQ ID NO: 33248 - DNA, 292 bp, Homo sapiens; identical to SEQ ID NO: 29967
  chr19:45322448-45322740
  hypo

SEQ ID NO: 33249 - DNA, 362 bp, Homo sapiens; identical to SEQ ID NO: 29968
  chr19:45377472-45377834
  hypo

SEQ ID NO: 33250 - DNA, 352 bp, Homo sapiens
  chr19:4550735-4551087
  hypo
cggaagccccagccctcggccctggggatcaggacctcatccgggcatgtgactcaggatggagggggttctcaccggggtcgaggcacctgatcctccggcaccggcgtccagatggactcgggggacttctgctctcggaagcggccttcaaacacagctgccacctgtgtcaggtcaaaggcgcagacagccgagccagggatgctgaggggttgggatgaaagagtttggtgagcccggtgggaggccccatctcggacaagtgcgtgcaggagcctctgtctgcaggagccagtgaatcttcagtcttcctaggccagagatgtcccctgtccctcccgcatctgtc

SEQ ID NO: 33251 - DNA, 510 bp, Homo sapiens; identical to SEQ ID NO: 29970
  chr19:46330394-46330904
  hypo

SEQ ID NO: 33252 - DNA, 112 bp, Homo sapiens; identical to SEQ ID NO: 29971
  chr19:50774482-50774594
  hypo

SEQ ID NO: 33253 - DNA, 230 bp, Homo sapiens; identical to SEQ ID NO: 29972
  chr19:50784855-50785085
  hypo

SEQ ID NO: 33254 - DNA, 231 bp, Homo sapiens
  chr19:50789768-50789999
  hypo
cgggcagtggaggaacgtgagcgggccgaggcagagggccgggagcgtgaggctcgggccctgtcactgacacgggcactggaggaggagcaggaggcacgtgaggagctggagcggcagaaccgggccctgcgggctgagctggaggcactgctgagcagcaaggatgacgtcggcaagagcgtgagcagggcccccgctccccgggacacactgggtgaggggagacac

SEQ ID NO: 33255 - DNA, 143 bp, Homo sapiens; identical to SEQ ID NO: 29974
  chr19:53806012-53806155
  hypo

SEQ ID NO: 33256 - DNA, 286 bp, Homo sapiens
  chr19:557055-557341
  hypo
cgtgagttttggggggcaccgttctccctgggaagacgcagacgcttgtcgtcccgtggtaaatgccagaaggcctcatctgatgcccacgtacgccctgaggtggggaagctgctgtcctcatccttgctgagcgtggggccccaggattctcaggcagctggatgagcctgtggagaggccggtgcccaggctcggtcccagaacaaagcgcagaggcacgatggtcgctgacaaagtgggggccccgggaccccaaacagaaaggtccacaaaggctgaggtc

SEQ ID NO: 33257 - DNA, 922 bp, Homo sapiens; identical to SEQ ID NO: 29975
  chr19:5994773-5995695
  hypo

SEQ ID NO: 33258 - DNA, 487 bp, Homo sapiens; identical to SEQ ID NO: 29976
  chr19:6001747-6002234
  hypo

SEQ ID NO: 33259 - DNA, 449 bp, Homo sapiens; identical to SEQ ID NO: 29977
  chr19:6004120-6004569
  hypo

SEQ ID NO: 33260 - DNA, 328 bp, Homo sapiens; identical to SEQ ID NO: 29978
  chr19:6005196-6005524
  hypo

SEQ ID NO: 33261 - DNA, 462 bp, Homo sapiens; identical to SEQ ID NO: 29979
  chr19:6006891-6007353
  hypo

SEQ ID NO: 33262 - DNA, 385 bp, Homo sapiens; identical to SEQ ID NO: 29980
  chr19:6017219-6017604
  hypo

SEQ ID NO: 33263 - DNA, 111 bp, Homo sapiens; identical to SEQ ID NO: 29981
  chr19:6024069-6024180
  hypo

SEQ ID NO: 33264 - DNA, 510 bp, Homo sapiens; identical to SEQ ID NO: 29982
  chr19:6024679-6025189
  hypo

SEQ ID NO: 33265 - DNA, 127 bp, Homo sapiens; identical to SEQ ID NO: 29983
  chr19:6033089-6033216
  hypo

SEQ ID NO: 33266 - DNA, 313 bp, Homo sapiens; identical to SEQ ID NO: 29984
  chr19:6044422-6044735
  hypo

SEQ ID NO: 33267 - DNA, 653 bp, Homo sapiens; identical to SEQ ID NO: 29985
  chr19:6045007-6045660
  hypo

SEQ ID NO: 33268 - DNA, 124 bp, Homo sapiens; identical to SEQ ID NO: 29986
  chr19:6064123-6064247
  hypo

SEQ ID NO: 33269 - DNA, 257 bp, Homo sapiens; identical to SEQ ID NO: 29987
  chr19:6105459-6105716
  hypo

SEQ ID NO: 33270 - DNA, 185 bp, Homo sapiens; identical to SEQ ID NO: 29988
  chr19:8606663-8606848
  hypo

SEQ ID NO: 33271 - DNA, 231 bp, Homo sapiens; identical to SEQ ID NO: 29989
  chr2:102486147-102486378
  hypo

SEQ ID NO: 33272 - DNA, 143 bp, Homo sapiens; identical to SEQ ID NO: 29990
  chr2:102683385-102683528
  hypo

SEQ ID NO: 33273 - DNA, 205 bp, Homo sapiens; identical to SEQ ID NO: 29991
  chr2:110011299-110011504
  hypo

SEQ ID NO: 33274 - DNA, 342 bp, Homo sapiens
  chr2:110015134-110015476
  hypo
cggcgctgtggccagcgtggccccaagtcccactttaagcagctcaggggcggtcagtgcctttcagcggcgtgtggatggcaagaagaacaccaagaaacgccactccttcaccgcgctcagtgtgacgcacagatcctcccaggctgccagccacaggcattccatggaaattagtgctccagtgttgatcagctccagcgatccccgagccgcggccaggattggagaccttgctcatctgtcgtgcgctgctcccacccaggtaacatcccgcgggccagggcaggcatccctgggttctctggggttctatcctcagctccgtgttcagtgtccccc

SEQ ID NO: 33275 - DNA, 215 bp, Homo sapiens; identical to SEQ ID NO: 29994
  chr2:110016725-110016940
  hypo

SEQ ID NO: 33276 - DNA, 134 bp, Homo sapiens; identical to SEQ ID NO: 29995
  chr2:110017061-110017195
  hypo

SEQ ID NO: 33277 - DNA, 452 bp, Homo sapiens; identical to SEQ ID NO: 29996
  chr2:110021654-110022106
  hypo

SEQ ID NO: 33278 - DNA, 73 bp, Homo sapiens; identical to SEQ ID NO: 29997
  chr2:110022456-110022529
  hypo

SEQ ID NO: 33279 - DNA, 124 bp, Homo sapiens; identical to SEQ ID NO: 29998
  chr2:110028510-110028634
  hypo

SEQ ID NO: 33280 - DNA, 146 bp, Homo sapiens; identical to SEQ ID NO: 29999
  chr2:110048964-110049110
  hypo

SEQ ID NO: 33281 - DNA, 213 bp, Homo sapiens; identical to SEQ ID NO: 30000
  chr2:121549381-121549594
  hypo

SEQ ID NO: 33282 - DNA, 325 bp, Homo sapiens; identical to SEQ ID NO: 30001
  chr2:121742106-121742431
  hypo

SEQ ID NO: 33283 - DNA, 140 bp, Homo sapiens; identical to SEQ ID NO: 30002
  chr2:122010702-122010842
  hypo

SEQ ID NO: 33284 - DNA, 231 bp, Homo sapiens; identical to SEQ ID NO: 30003
  chr2:122011463-122011694
  hypo

SEQ ID NO: 33285 - DNA, 96 bp, Homo sapiens; identical to SEQ ID NO: 30004
  chr2:130669922-130670018
  hypo

SEQ ID NO: 33286 - DNA, 230 bp, Homo sapiens; identical to SEQ ID NO: 30005
  chr2:1488408-1488638
  hypo

SEQ ID NO: 33287 - DNA, 605 bp, Homo sapiens; identical to SEQ ID NO: 30006
  chr2:1863600-1864205
  hypo

SEQ ID NO: 33288 - DNA, 502 bp, Homo sapiens; identical to SEQ ID NO: 30007
  chr2:217528438-217528940
  hypo

SEQ ID NO: 33289 - DNA, 180 bp, Homo sapiens; identical to SEQ ID NO: 30008
  chr2:217674486-217674666
  hypo

SEQ ID NO: 33290 - DNA, 248 bp, Homo sapiens
  chr2:217674965-217675213
  hypo
cgacgctctggtgtgggcagcccgagaggtgatggggtttcagtaaatcatggcggggagttcaggccaccgccggagtccagtgggtagggctctctacggccggaggtggctgtgggggagacgggcgggaggcccagaccggcagggagctttctgcagggaagctggaaggatggtggggccggtaacccaacatggggcccaggagcgggagacatggccggaggggcggcgaggaacgcacc

SEQ ID NO: 33291 - DNA, 181 bp, Homo sapiens; identical to SEQ ID NO: 30010
  chr2:217691004-217691185
  hypo

SEQ ID NO: 33292 - DNA, 93 bp, Homo sapiens; identical to SEQ ID NO: 30011
  chr2:218678441-218678534
  hypo

SEQ ID NO: 33293 - DNA, 839 bp, Homo sapiens; identical to SEQ ID NO: 30012
  chr2:218682490-218683329
  hypo

SEQ ID NO: 33294 - DNA, 138 bp, Homo sapiens; identical to SEQ ID NO: 30013
  chr2:218686231-218686369
  hypo

SEQ ID NO: 33295 - DNA, 267 bp, Homo sapiens; identical to SEQ ID NO: 30014
  chr2:218694781-218695048
  hypo

SEQ ID NO: 33296 - DNA, 282 bp, Homo sapiens
  chr2:218697833-218698115
  hypo
cggtcattcatggaataaccacgaagcagccccagcccacaggtacgcgcatgtttaaccaactggtgcagcggaggcgcaggtgggcccgtgaggaggtgaagcggacgagaggaccagacagggcaggagctctctcttggttcctcccttgttcacctccagctcctgaattcctcgttcccccagttcctgggcaattgggcccttctgctgaggcagatgagtgggcgacgctaaagccaggcaagtcttttgcttcctgagagaaaaattccacac

SEQ ID NO: 33297 - DNA, 79 bp, Homo sapiens; identical to SEQ ID NO: 30017
  chr2:218700747-218700826
  hypo

SEQ ID NO: 33298 - DNA, 288 bp, Homo sapiens; identical to SEQ ID NO: 30018
  chr2:218704299-218704587
  hypo

SEQ ID NO: 33299 - DNA, 1042 bp, Homo sapiens; identical to SEQ ID NO: 30019
  chr2:218712694-218713736
  hypo

SEQ ID NO: 33300 - DNA, 171 bp, Homo sapiens; identical to SEQ ID NO: 30020
  chr2:218765473-218765644
  hypo

SEQ ID NO: 33301 - DNA, 360 bp, Homo sapiens; identical to SEQ ID NO: 30021
  chr2:220427099-220427459
  hypo

SEQ ID NO: 33302 - DNA, 123 bp, Homo sapiens; identical to SEQ ID NO: 30022
  chr2:220428136-220428259
  hypo

SEQ ID NO: 33303 - DNA, 160 bp, Homo sapiens; identical to SEQ ID NO: 30023
  chr2:236672645-236672805
  hypo

SEQ ID NO: 33304 - DNA, 181 bp, Homo sapiens; identical to SEQ ID NO: 30024
  chr2:236675966-236676147
  hypo

SEQ ID NO: 33305 - DNA, 366 bp, Homo sapiens; identical to SEQ ID NO: 30025
  chr2:236685979-236686345
  hypo

SEQ ID NO: 33306 - DNA, 137 bp, Homo sapiens; identical to SEQ ID NO: 30026
  chr2:236722564-236722701
  hypo

SEQ ID NO: 33307 - DNA, 317 bp, Homo sapiens; identical to SEQ ID NO: 30027
  chr2:236801881-236802198
  hypo

SEQ ID NO: 33308 - DNA, 348 bp, Homo sapiens; identical to SEQ ID NO: 30028
  chr2:236826196-236826544
  hypo

SEQ ID NO: 33309 - DNA, 544 bp, Homo sapiens; identical to SEQ ID NO: 30029
  chr2:236839051-236839595
  hypo

SEQ ID NO: 33310 - DNA, 96 bp, Homo sapiens; identical to SEQ ID NO: 30030
  chr2:236840424-236840520
  hypo

SEQ ID NO: 33311 - DNA, 139 bp, Homo sapiens; identical to SEQ ID NO: 30031
  chr2:237018173-237018312
  hypo

SEQ ID NO: 33312 - DNA, 391 bp, Homo sapiens; identical to SEQ ID NO: 30032
  chr2:237032663-237033054
  hypo

SEQ ID NO: 33313 - DNA, 314 bp, Homo sapiens; identical to SEQ ID NO: 30033
  chr2:23785024-23785338
  hypo

SEQ ID NO: 33314 - DNA, 615 bp, Homo sapiens
  chr2:238280432-238281047
  hypo
cgtgatgggcgtcagcagtttctgctccaggctgggcagctcccggaaggtgctcaccgagaacacatattcggggctcagcgagatcttcaccagctcctcctggtctgcgttcctggcgatcgtgaaaggggccacgccaaactgcttgagctccaccgccgggtcgtccacctcatcgtcagactttccagacgagatgaggaccaggaactgcgggacgccctcttcaatgcggctccccaggggcctcttgaagatgttcctggacacgtactccagggcattgcccacgttgatctgccgccctcccttgggcctcagccgctgcaccgcgttctgcacttcatccttgctggaatgggcgttcagcaggaactccaccttggggtcatcgctgaactggatgacagccacccgggtggtgtcaaagcccacgtccaggtagtcaaccagcctctctatgagggtgcgaacgtactggaactcaggcccggcactttgggacccatcgatgagaaagaccacgtccctcttgccaccaacacctgcgaaacaaatgtgagcatggcttcaccttcatcgtcaccaaattcttagcgttcatgagccacc

SEQ ID NO: 33315 - DNA, 339 bp, Homo sapiens; identical to SEQ ID NO: 30036
  chr2:238793969-238794308
  hypo

SEQ ID NO: 33316 - DNA, 451 bp, Homo sapiens
  chr2:239888414-239888865
  hypo
cgtggctccccgtccctccggtgaccaggtgggcactggctcctgatggttcgaagccccggtcagcccccgccatccctaaactagtgacttccacttgcgttctcccccagggtcttcggggcaccccacgggagagagcacctgcaaggaccataacacgtgaggctgtgctgagtcctacgacaggcaggaacttgtacttggcccccggcgacccgggcgatttgcgggtcttcctcttggtttaacgaaggctctagcccggttccggagcccaccaagacgctgaagccatcagttcttggcttgcatttctagagccacccgtgtagttgcgagacagtgagaaagttcgcccgagttgcaatcctgcccgtgcctctgtctaggagcgactgtggcttcgggttaagcctctgtctttacctgtagtgggagatgtctgctc

SEQ ID NO: 33317 - DNA, 298 bp, Homo sapiens; identical to SEQ ID NO: 30039
  chr2:241689824-241690122
  hypo

SEQ ID NO: 33318 - DNA, 136 bp, Homo sapiens; identical to SEQ ID NO: 30040
  chr2:241697788-241697924
  hypo

SEQ ID NO: 33319 - DNA, 433 bp, Homo sapiens; identical to SEQ ID NO: 30041
  chr2:241724232-241724665
  hypo

SEQ ID NO: 33320 - DNA, 276 bp, Homo sapiens
  chr2:2673043-2673319
  hypo
cgaggagtcagggcccccgaatctctgggaggacgcatcctaggggatttcctccacggtgttggaattgaaggacttaatgacgtcccttcccatgcgcacagtgtcccaggcacgtgcctcagcctcacatgccggggcacagggctgccctgcgaggtgggaggaagacctaggtgaggacccggagccaagggctttcctgaccgtgaaattgcaggtgaggacctggagccgagggccggttctagctgctccaagcgcccgagggccaac

SEQ ID NO: 33321 - DNA, 379 bp, Homo sapiens
  chr2:2854244-2854623
  hypo
cggggaagccttcctcagggtttctgcagaagccctgcccactgccccctgcagagagccatcctgccacagagatgcgccccagatgcgtcctggatggatcaagtcactgcgtgtcagggaacggctcctctgctgctcctgatgcctggccacccgtcccggtccacccctcgcgaggaaggccaggcctccgctcctctgcggagcctttcaggaacatgaggccgcctgtgtcagccatcagggtacccaccggcgctgctcatccacctgccacccccacctgccacttactcctagcacaagcaggtgccccatgaatcccgcggaatgagttatttcaggatccgcggaacacacgtaaccagaccccccc

SEQ ID NO: 33322 - DNA, 346 bp, Homo sapiens; identical to SEQ ID NO: 30046
  chr2:72359340-72359686
  hypo

SEQ ID NO: 33323 - DNA, 348 bp, Homo sapiens; identical to SEQ ID NO: 30047
  chr2:9078588-9078936
  hypo

SEQ ID NO: 33324 - DNA, 783 bp, Homo sapiens; identical to SEQ ID NO: 30048
  chr2:9236530-9237313
  hypo

SEQ ID NO: 33325 - DNA, 234 bp, Homo sapiens; identical to SEQ ID NO: 30049
  chr2:9245045-9245279
  hypo

SEQ ID NO: 33326 - DNA, 436 bp, Homo sapiens; identical to SEQ ID NO: 30050
  chr2:97544651-97545087
  hypo

SEQ ID NO: 33327 - DNA, 200 bp, Homo sapiens; identical to SEQ ID NO: 30051
  chr2:97545395-97545595
  hypo

SEQ ID NO: 33328 - DNA, 305 bp, Homo sapiens; identical to SEQ ID NO: 30052
  chr2:97576055-97576360
  hypo

SEQ ID NO: 33329 - DNA, 439 bp, Homo sapiens; identical to SEQ ID NO: 30053
  chr2:97587010-97587449
  hypo

SEQ ID NO: 33330 - DNA, 249 bp, Homo sapiens; identical to SEQ ID NO: 30054
  chr2:97589058-97589307
  hypo

SEQ ID NO: 33331 - DNA, 264 bp, Homo sapiens; identical to SEQ ID NO: 30055
  chr20:23015064-23015328
  hypo

SEQ ID NO: 33332 - DNA, 233 bp, Homo sapiens
  chr20:23092311-23092544
  hypo
cggggcgaaccaaagatgggagaggagcatcagtgcccccctccccatcaccacattagaatcctgcgggaactggctgggttctcgaaggcgttgttatcgccctgtgctcacacataaggaccctgagacccagggccactagggtgaggcgacagggcagggcctgatgcacctgtcgaaatccacttctagctcccaccctgcccccagagacatgcgccccatgggcc

SEQ ID NO: 33333 - DNA, 758 bp, Homo sapiens
  chr20:30584452-30585210
  hypo
cgcccgcggcctggccttcgcgctcttcgccagcgtctacaagctctattttggcatcttcatcgtggcccactggtgcgtcatgaccttctgggtcatccaaggggagacggacttctgcatgtccaagtgggaggagatcatctacaacatggtcgtgggcatcatctacatcttctgctggttcaacgtcaaggagggccgcagccgccgccgcatgaccctctaccactgcatcgtcctgctggagaacgccgcgctcaccggcttctggtactccagccgcaacttctcaaccgacttctactcgctcatcatggtctgcgtagtggcctccagctttgcgctgggcatattcttcatgtgtgtctactactgtctcctgcaccccaatgggcccatgctgggtccccaggcacctggttgcatcttccgtaaggcctcagagccctgtggcccacccgctgacgccatcacgagtccccccaggtccctgccaaggactacaggtgctgagcgggatggggcctcggcgggagagcgtgcagggacccccaccccacctgtcttccaggtgcggcctggcttgcctcccacaccagtggcccgcaccttgcggacagaggggcctgtcatccggattgacttgcctcgcaagaagtacccggcctgggatgctcattttattgaccgccggctccggaagaccatcctggcactggagtactcctcacctgccacgccccggttgcagtacc

SEQ ID NO: 33334 - DNA, 564 bp, Homo sapiens
  chr20:36760815-36761379
  hypo
cgaggagggcccgcaccttgatgaggttggactccgtaaggcagtcacggtatttctcatagaggatgcaaagaggaacgctcttctctgcagaaggggagaaaggagggtgctcatgatgcagaatcacccctcccaactctcttgcaactccaagaggcacagagaggggaaggaatgtgcttggggtcacacagcgggggaatggctgggcggatccctgaactccccactgtggctccagggttcccagcgaggagctggagagtggacactgagcagcgggtagaggacgcacttggactcccacgggccttggttctaatcctgcctttgcctcttctaatgggtgaccccgcgtgagccactccacctcccaggtcctcgatgtttggatctgcgtggcacaggcactcctaaggctgtgggaggatgagctgagcgagtgtcccggaagagcctggtgcgctcgggactcagggtgtgtgagccgcgggcccttcatcctggggaggatcagagccgacatctgcttgctgcaccaggcactgcacttcccacggc

SEQ ID NO: 33335 - DNA, 270 bp, Homo sapiens
  chr20:36764040-36764310
  hypo
cggactctcggggcctggatgagcagcgagggccgggtcctttctacaccaccgaggtgtcagggacacaggaacccccgagcccagggctgacaccactgcctgggacagaaggtgttcaggaaaggtcccgggcttctcgcctccccacgcctcttagcactcgcactcagggaggagtgagggccccaccgtgtgctggtgctgctgtgccctttccagatacctcctgagcacgcatcctctccctcagtcctcacggctgcgggc

SEQ ID NO: 33336 - DNA, 186 bp, Homo sapiens; identical to SEQ ID NO: 30063
  chr20:36765901-36766087
  hypo

SEQ ID NO: 33337 - DNA, 278 bp, Homo sapiens; identical to SEQ ID NO: 30064
  chr20:36766589-36766867
  hypo

SEQ ID NO: 33338 - DNA, 336 bp, Homo sapiens
  chr20:36767690-36768026
  hypo
cggggccattgctgtacgtaggctaccaattaaaacacacgcacacacatacacgagcctgccgggctgggaaaactggatgcttatcttcaaggctgcattaaagactctgagggcacataccctctgggtatttgtaggtgtgggtgatatcctcccgctcgtctcggcccacgctcttagtgctgatcttcagcccaacgatcagggaacggttgatggatttgtgcacagacccatcgtcctgctggatccagtctaccacgtcggcattgacctccgcaaagacaaagggcgcatcgtacttggtgctcaggtcgccctccttgatggcac

SEQ ID NO: 33339 - DNA, 477 bp, Homo sapiens; identical to SEQ ID NO: 30067
  chr20:49223746-49224223
  hypo

SEQ ID NO: 33340 - DNA, 581 bp, Homo sapiens; identical to SEQ ID NO: 30068
  chr20:49224897-49225478
  binary

SEQ ID NO: 33341 - DNA, 305 bp, Homo sapiens; identical to SEQ ID NO: 30069
  chr20:49225991-49226296
  binary

SEQ ID NO: 33342 - DNA, 159 bp, Homo sapiens; identical to SEQ ID NO: 30070
  chr20:49236444-49236603
  hypo

SEQ ID NO: 33343 - DNA, 146 bp, Homo sapiens; identical to SEQ ID NO: 30071
  chr20:49240816-49240962
  hypo

SEQ ID NO: 33344 - DNA, 141 bp, Homo sapiens; identical to SEQ ID NO: 30072
  chr20:49247308-49247449
  hypo

SEQ ID NO: 33345 - DNA, 377 bp, Homo sapiens
  chr20:49261776-49262153
  hypo
cggccaaaagctcgctacccctgcccaggaaggcaggagcaccgttgtgtcccgttcctatccctcaaaaataaatcacagccagctcatgtcataggacagagcctgttcgcaatccatcctgtgtctgcggattctcccaggtctgtaaggcagcagggagatgcggcctctcccactccacccaacacgtagccagggcgaggtggggccgggggagaggctgacattcaaaggcatctgagtggtaagaggtgagcgagtgaggtgaatggggactacgttagaaggaccctacgttagaagggtgaggcgctagggccatagcctaagggcactgggaaccctgtgggcatgcgcagttcaagcccatcccc

SEQ ID NO: 33346 - DNA, 433 bp, Homo sapiens; identical to SEQ ID NO: 30073
  chr20:59872770-59873203
  hypo

SEQ ID NO: 33347 - DNA, 211 bp, Homo sapiens; identical to SEQ ID NO: 30074
  chr20:60094644-60094855
  hypo

SEQ ID NO: 33348 - DNA, 146 bp, Homo sapiens; identical to SEQ ID NO: 30075
  chr20:60173821-60173967
  hypo

SEQ ID NO: 33349 - DNA, 428 bp, Homo sapiens; identical to SEQ ID NO: 30076
  chr20:60226081-60226509
  hypo

SEQ ID NO: 33350 - DNA, 738 bp, Homo sapiens
  chr20:60238306-60239044
  hypo
cgagggcttggcgcccacgacaaatgagtccacgcaggaaaggagtggcacccgcaggaggcctgtgctgcggagctcctgggagggtgacgctggggcaggggctgctgcggacaagcgttgggaggcctctctgaggaggcagtgtttgcgctgaaacctagaaaaagagctgcgtaaaagacaataattctgaaggctctgggtcgggggcatttcaggcgagggtcctagaaatgccaatgctggggatgccgccgagtgggtcagaggggccggaggaaggtgaacagggcagggggcagtggggctggattttatcccaagtgagtcgggagctgctgggacggcaggaccgggtgtgtgtgtccaagagaccatcttggctgcccaggggaagcggggactcgaggagagcagggagtgctgtcttcccggcgggagctggcggtactgaggaaggacgtgcagaaccaggcagggctgacagacgcggggtcgggggaagatcaggagctcccggtgtccaggctgcacaatgtgggcaccactgaacacggggtaaaccaatcaccagtcactcccacgctgggtcttccagctccctcgaggccgccctggccctccacactcccaccgctggcgccagcatctgtgcccgcggcagtttagagtgacactgtcctctgtccagcaccggtccacgttgaggtgtctgtgtgccaccgggacccttcc

SEQ ID NO: 33351 - DNA, 508 bp, Homo sapiens
  chr20:60272973-60273481
  hypo
cggagtaagtgcctccctgcagagccagggctgggcagcagaagtcagagatggagccaggagaagagggttctggcctggccggccattccttggctgttttgctcaggctcatcactgagctggcaccatcttgggcctgtctcacactgccacactgcccgagacagcagccattagccgcacgttgctggacagcacagacctggcacgtgtcgtccaccctcggaggggtccccttgcacgggctccactccggacggtccctgagactctcccgccctcacgcctgctctctaagccaagcacaaagccaagtgcagcccccactgaccattccagcccatgccggcgtctgccccaggccccagatccgtcctgctggtgcgattgagggcacagagtcgagccttcaagtaggtcttctaatatggctccattcatgcagaaacctcccagtggggctgtgccaggcacttggaaagtgggagccgcagccctgccgtcc

SEQ ID NO: 33352 - DNA, 546 bp, Homo sapiens; identical to SEQ ID NO: 30079
  chr20:60275663-60276209
  hypo

SEQ ID NO: 33353 - DNA, 489 bp, Homo sapiens
  chr20:60281418-60281907
  hypo
cgaggcaccgacaactgacagaaaactgcagccggcctcatttgccgcagacccccttctctcaacaataacatgtggggcacggtcttaacaaacatgatgagagaaaaggctgtagccaaaggcagctgttcaggaacggagaaagtttagctacgacgaagactccggggaggaagaacggatggaaaggccagcccaaatggaagttggagtttgctgagctgaggacagggcctgtgggatctgctggaagagaggcgaaccaagaccaaagggatcggtttctcccgagctgcacacagtggcaccgactccctgatccccgatgtgtagaaaccaccttggctgaattctcccgagcccgctgcaggccagtgggaacagtggttgggaatctcaccggaactggctcgggcaggacgttcatggtgaggttccaaccggaatgagtcatgtgaccgtcagcatccgacctccacattagcc

SEQ ID NO: 33354 - DNA, 249 bp, Homo sapiens; identical to SEQ ID NO: 30080
  chr20:60313847-60314096
  hypo

SEQ ID NO: 33355 - DNA, 178 bp, Homo sapiens; identical to SEQ ID NO: 30081
  chr20:60316318-60316496
  hypo

SEQ ID NO: 33356 - DNA, 350 bp, Homo sapiens; identical to SEQ ID NO: 30082
  chr20:60373188-60373538
  hypo

SEQ ID NO: 33357 - DNA, 410 bp, Homo sapiens
  chr20:60448652-60449062
  hypo
cgagaggaagggggttccgctacgccagactcacggagagctctgtggtcggggggctctgcccaggtgtgtgcgggggtggcagcctgtgtggcaggccatccccatctgagctgctgtctccgttccaggcacctacgtgatgaccgtcacggccaacgatgctgacgacagcaccacggccaacgggatggtgcggtaccggatcgtgacccagaccccacagagcccgtcccagaatatgttcaccatcaacagcgagactggagatatcgtcacagtggcggctggcctggaccgagaggtgaggcggggtggggtctgcgtgcaggcgggtgagctcctggtccccgcaggacacccacaggaccctcggggagcctctccagtggcgccgtcggggagtgatc

SEQ ID NO: 33358 - DNA, 597 bp, Homo sapiens; identical to SEQ ID NO: 30084
  chr20:61000254-61000851
  hypo

SEQ ID NO: 33359 - DNA, 342 bp, Homo sapiens
  chr20:61749643-61749985
  hypo
cgctgtgtcctgctgcattgctgggcagtgtccactgcacgtcgctcgctgcattgctgggcagtgtccgcggcatgtcgctctctgcattgctgggcagtgtctactgcacgccgcttgctgcattgctgggcagtgtctactgcacgccgctcgctgcattgctggggagtgtccgctgcatgtcgctcgctgcattgctgggcagtgtccgctgcacgccgctcgttgcattgctgggcagtgtctactgcacggtggacgctcctgcactcatggatgctcaggctgcttcccgttggacgcgattgtgagtgacgctgctgtgagcctccaggtacc

SEQ ID NO: 33360 - DNA, 453 bp, Homo sapiens
  chr20:62031988-62032441
  hypo
cggcgcaaatggggaagctgcagccaccgtcacggccagaggatggcagactgcaatggcgtggggcgcgggcatggcgggcacacgtgggccgtgtggatcccgggcagagggatggcgtccagcgggaccaccagctctgggcgcctcagtgcgagacccctccgtgagacccctcctgccctgcgcgtgtctctggagcccgtcccttgggcccctcgcccgccccacctgttcgcagggtccagggcgtccgtacctggcacagccagggggcatggggcgacctcagggagttcctgtccacatgcattaaggcaacgactttgtaaaacccaggcggagttggcgtgtggcgatggcgatgtgcacgtgcctgcctggtagccccggggaccggcccctccttgctggcgcctggccgagagtcagacgctgaggacctctcaggac

SEQ ID NO: 33361 - DNA, 387 bp, Homo sapiens
  chr20:62046195-62046582
  hypo
cgtggccaccacatccatccccggagaggatggaccaggagaggatgcggccacacccaccttctgagttctgccgtgacgcggcacccttgatgcggaaagcctggcgtgcccggctgcggtccccgaagctccagctcttgggcaccttgctggggctgtcctcgaggctctggtcggcgctgggtgaccgcctcacagtctgggcctgcggggaccccttccccttggcagccacgcctcgggggctggagaagacacgatctttcaaactgaccttctggctgctcccacgggaaccgacagacagacagaaaaacagggagagaagtcactctgcaaagaacacaggccgtgtctgctcatggccgacgccgcccatgcgcc

SEQ ID NO: 33362 - DNA, 419 bp, Homo sapiens; identical to SEQ ID NO: 30087
  chr21:33370937-33371356
  hypo

SEQ ID NO: 33363 - DNA, 270 bp, Homo sapiens; identical to SEQ ID NO: 30088
  chr21:33781936-33782206
  hypo

SEQ ID NO: 33364 - DNA, 749 bp, Homo sapiens; identical to SEQ ID NO: 30089
  chr21:40316188-40316937
  hypo

SEQ ID NO: 33365 - DNA, 168 bp, Homo sapiens; identical to SEQ ID NO: 30090
  chr21:40348667-40348835
  hypo

SEQ ID NO: 33366 - DNA, 338 bp, Homo sapiens; identical to SEQ ID NO: 30091
  chr21:40506192-40506530
  hypo

SEQ ID NO: 33367 - DNA, 238 bp, Homo sapiens; identical to SEQ ID NO: 30092
  chr21:42572234-42572472
  hypo

SEQ ID NO: 33368 - DNA, 128 bp, Homo sapiens
  chr21:42572671-42572799
  hypo
cgcagagggaccgccatgtgaagaagcagcaagaggagcaagaggacggccatctgcaagccaagggggaagccacctgcccacaccttgatctgagacttccggcctccacaaccgtgagaagatac

SEQ ID NO: 33369 - DNA, 151 bp, Homo sapiens; identical to SEQ ID NO: 30093
  chr21:42593821-42593972
  hypo

SEQ ID NO: 33370 - DNA, 270 bp, Homo sapiens
  chr21:42617817-42618087
  hypo
cggctagagccacgtggggcggggagcgccactgtcactcacgcacctttccctttctctcccggttcaagtataacgcagacaaggccatcgtggacagtggcaccacgctgctgcgcctgccccagaaggtgtttgatgcggtggtggaagctgtggcccgcgcatctctggtgagtcctcgggacactcacgggtccccgagttgctgagttacagtcacctgctgaggagcagcactgcgtgttctgagcatctctgaactattgc

SEQ ID NO: 33371 - DNA, 211 bp, Homo sapiens; identical to SEQ ID NO: 30096
  chr21:42629074-42629285
  hypo

SEQ ID NO: 33372 - DNA, 129 bp, Homo sapiens
  chr21:42649187-42649316
  hypo
cgtggaggccacgtcggcttgtcatggtgtcctggaagactctccagcagccagaagaaccttctgtgctgttttcactagagaagatttgagttgcagcctcttggaaagaacatgacggcacggaac

SEQ ID NO: 33373 - DNA, 824 bp, Homo sapiens; identical to SEQ ID NO: 30098
  chr21:43160967-43161791
  hypo

SEQ ID NO: 33374 - DNA, 283 bp, Homo sapiens; identical to SEQ ID NO: 30099
  chr21:43161857-43162140
  hypo

SEQ ID NO: 33375 - DNA, 317 bp, Homo sapiens; identical to SEQ ID NO: 30100
  chr21:43162557-43162874
  hypo

SEQ ID NO: 33376 - DNA, 364 bp, Homo sapiens; identical to SEQ ID NO: 30101
  chr21:43165727-43166091
  hypo

SEQ ID NO: 33377 - DNA, 297 bp, Homo sapiens; identical to SEQ ID NO: 30102
  chr21:43166652-43166949
  hypo

SEQ ID NO: 33378 - DNA, 157 bp, Homo sapiens; identical to SEQ ID NO: 30103
  chr21:43168170-43168327
  hypo

SEQ ID NO: 33379 - DNA, 516 bp, Homo sapiens; identical to SEQ ID NO: 30104
  chr21:43791392-43791908
  hypo

SEQ ID NO: 33380 - DNA, 562 bp, Homo sapiens; identical to SEQ ID NO: 30105
  chr21:44112757-44113319
  hypo

SEQ ID NO: 33381 - DNA, 467 bp, Homo sapiens; identical to SEQ ID NO: 30106
  chr21:44180227-44180694
  hypo

SEQ ID NO: 33382 - DNA, 401 bp, Homo sapiens; identical to SEQ ID NO: 30107
  chr21:44190679-44191080
  hypo

SEQ ID NO: 33383 - DNA, 321 bp, Homo sapiens; identical to SEQ ID NO: 30108
  chr21:44205103-44205424
  hypo

SEQ ID NO: 33384 - DNA, 468 bp, Homo sapiens; identical to SEQ ID NO: 30109
  chr21:45941802-45942270
  hypo

SEQ ID NO: 33385 - DNA, 557 bp, Homo sapiens
  chr21:46316870-46317427
  hypo
cgtcatggccacctacagatgggacacagggctgtgacatcctgaccagcaggtggtctctgtggatgtccggccccagccctgccctgcgctgacccactgtcccggcagcctgaccagctctgggtgcccactcggagggtcccccagacacctgcccccatcccgtgtctcccgcagggtcctgctcccactccagagcccggggaacctatggcaggaaccgctggtctcgctgtcggccccaacacaccacgaggttgagcttgtagctgggatacgggcctgacaatggatccctgtagttcagcaaatgttcactttacaaaagcagcggccctcccgggcactttccttccccaaaccccgagtatgtctcctcagcctaagcagcagggcaggggctgtgaggctgcccagctgggcagagccccaggcagggggaagagggggccctggtttcctgcgtgccattttgaagaagatggcggtgatggccctggaatggccagcaggtcggtcactgtccggatgaggataatcgggccctttagggc

SEQ ID NO: 33386 - DNA, 643 bp, Homo sapiens; identical to SEQ ID NO: 30112
  chr21:46320233-46320876
  hypo

SEQ ID NO: 33387 - DNA, 218 bp, Homo sapiens; identical to SEQ ID NO: 30113
  chr21:46324938-46325156
  hypo

SEQ ID NO: 33388 - DNA, 422 bp, Homo sapiens; identical to SEQ ID NO: 30114
  chr21:46326574-46326996
  hypo

SEQ ID NO: 33389 - DNA, 262 bp, Homo sapiens; identical to SEQ ID NO: 30115
  chr21:46748053-46748315
  hypo

SEQ ID NO: 33390 - DNA, 634 bp, Homo sapiens; identical to SEQ ID NO: 30116
  chr21:46779388-46780022
  hypo

SEQ ID NO: 33391 - DNA, 184 bp, Homo sapiens; identical to SEQ ID NO: 30117
  chr21:46799934-46800118
  hypo

SEQ ID NO: 33392 - DNA, 681 bp, Homo sapiens
  chr21:46800403-46801084
  binary
cgtccgtccgtgcacacacgctcacctcgcacccagcgtccgtccgtgcacacgctcacctcgcacccagcgtccgtccgtgcacacgctcacctcgtacccagcgtccgtctgtgcacacatgctcccctcgcaccgagcgtctgtccgtgcacacgcttacctcacacccagcatccatctgtgcacacacgctcccctcgcacccagcatccgtgcacacgctcacctcgcacccagcatctgtccatgcacacactcccctcgcacctagcgtccgtccatgcacatactcaccttgcacccagcatccatctgtgcacacaccctcacctcgcacccagcatctgtccgtgcacacacgctcacctcacacacactcccctcgcacccagcgtccgtcggtgcacacacgctcacctcccgcacctcccgtggaggcggcatccaggcagggaagcaaggacactctgcgtccattcctctctctaaacaccaaggcccccgcaatccgaggaatatatttgacagaaacaagaaaaaaggatgaaagtggccaagacaagccgatcccttctatctgttttcaggaacatgattttgtggccccaaactccttgaagcccgatgcttccacctccctcccactccactctcccccgacacatccgtccagctccc

SEQ ID NO: 33393 - DNA, 214 bp, Homo sapiens; identical to SEQ ID NO: 30120
  chr21:46801338-46801552
  binary

SEQ ID NO: 33394 - DNA, 571 bp, Homo sapiens; identical to SEQ ID NO: 30121
  chr21:46801817-46802388
  hypo

SEQ ID NO: 33395 - DNA, 177 bp, Homo sapiens; identical to SEQ ID NO: 30122
  chr21:46802668-46802845
  hypo

SEQ ID NO: 33396 - DNA, 73 bp, Homo sapiens
  chr21:46805775-46805848
  hypo
cgtggctgcctctccgtgagccgcacgggcagcgtgctaggcctgcgtgcctcgccggagggagggctgagtc

SEQ ID NO: 33397 - DNA, 156 bp, Homo sapiens
  chr21:46808694-46808850
  hypo
cgcagggcgaggtcgggggaatggactcccctgggtttctccctgccgatcgctgtagtggttgagtcctccactgagcacagccactcctgtaggcttaccccgctgcagctcgctctcggatcctaataaacaagtgagtcctccactgagcac

SEQ ID NO: 33398 - DNA, 339 bp, Homo sapiens; identical to SEQ ID NO: 30124
  chr21:46811012-46811351
  hypo

SEQ ID NO: 33399 - DNA, 333 bp, Homo sapiens; identical to SEQ ID NO: 30125
  chr21:46811998-46812331
  hypo

SEQ ID NO: 33400 - DNA, 303 bp, Homo sapiens
  chr21:46812995-46813298
  hypo
cggcacgaggccgcccgcctgcagcaggcccgcaggggcacggtgggtccccgcccgctcctcatgccttgagcgcgtcatccttcccggggttcacggcctctgacagccagacctcaacacggccagcacggtgtgcatggtgtgcacgcctcctgcgccggggccaccagagtgggctctcaccggaggagaaagacagtcggggagagcagcgctgtctgtcacgctttgtcacgctttgccggtgtcatctgagaagtggtgcaggggacaaggggggcgtgacaggactggtcctgc

SEQ ID NO: 33401 - DNA, 265 bp, Homo sapiens; identical to SEQ ID NO: 30128
  chr21:46813682-46813947
  hypo

SEQ ID NO: 33402 - DNA, 391 bp, Homo sapiens; identical to SEQ ID NO: 30129
  chr21:46834432-46834823
  hypo

SEQ ID NO: 33403 - DNA, 499 bp, Homo sapiens; identical to SEQ ID NO: 30130
  chr21:46835379-46835878
  hypo

SEQ ID NO: 33404 - DNA, 192 bp, Homo sapiens; identical to SEQ ID NO: 30131
  chr21:46837296-46837488
  hypo

SEQ ID NO: 33405 - DNA, 168 bp, Homo sapiens; identical to SEQ ID NO: 30132
  chr21:46838491-46838659
  hypo

SEQ ID NO: 33406 - DNA, 456 bp, Homo sapiens
  chr21:46839054-46839510
  hypo
cgatgccgtgtgtagtgacatgcaattccatgtagtgacgtgattccgtgtagtaaggcgatgccgtgtgtggtgacgtgcagttccgtgtagtgacgtgatgccgtgtgtggtgacatgcagttccgtgtagtgacgtgatgccgggtagtgacgtgatgccgtgtagtgacgcaatgccgtgtagttacatgatgctgtgtgtagtgatgcgcgatgccgtgtgtggtgacacgatgccgtgtgtggtgacacttaatgtcatgtagtgacacgctcgcaggatcgccaaggccaggctggctccaaaggcttgggtctggcttcctggggccactgggtgctctctgaggccgcccatcactgttcgggccctggggtgggagctgggctgcaaagtggcctggactttatgtcctgccaggtacagtgtttccctcagcagatttatcaggc

SEQ ID NO: 33407 - DNA, 139 bp, Homo sapiens; identical to SEQ ID NO: 30134
  chr21:46842404-46842543
  hypo

SEQ ID NO: 33408 - DNA, 947 bp, Homo sapiens
  chr21:46844304-46845251
  hypo
cgcctggagcgcagctctgctgtgggttagccgtgggtctctgggcgagggttcccgggatacagacacctgccccaaggtgccccacagaggatgacccccagggcagccgtgcctgagcctgcgtggtcacctcccacagtgccaaggcgctcccccaaggcccctgcggcccacctgaccagtggagaactcgcgagcactcggccagtggtgcctccaatttgcagcctccaatccctggtcagaggtgtgacctgaccctggaccagagcgctgggccaggtcctggtggcttctgcccttcagcttggaagctcctgaaaaccggctcccttccggggcagcccttggcccccactgaccctccctcagtcctaggtgtgcagtggcgtggggaccctgggaggcccgtggcgcagccccttcccgcctcctgcccgtcggtttccattgctcaggcactgcctcgcccgcgcctctttctcccagacctgagccaccgctgccaggatccttccccagctggttttccttctctttgatgtgtttccactgagggtccaaaccggtccaggcgcgggttccagaactttcttcagatctctcgcacctgaaaatttcctctgtagccattcgcaggaggtttctcagatgccccgggctcgggggccagtcagtctcatgaggacggggtgggtctgacttgtggcatcgcggcctctccatcggtgctgctgggcctgtgagccaatgggtgggcagcaccacccaccgcctccttcctcacaccagtcttgggctgcgcagagccccagccatgtgtgtgctgagtgcagtgtgaccgcgtccgcccgtctccccggacacgcctgttggagccccggccgtgtgtgtgtgtgtgctgtgagtgcagtgtgaccgcgtccacctgtctccctggacac

SEQ ID NO: 33409 - DNA, 232 bp, Homo sapiens
  chr21:46847366-46847598
  hypo
cgcctggcactgaccagactgtgtgcccgggtgccgtgcccatgggctccgcctcccccaggcaggccccctcttgctccgcggccacccctgctcttgacctcacacctctgcggtgtgtctggacacaccagcaccacggcgggcggggagcggaattctccaggtggggtgggcaggccggcgggtgttgaggtctctgtgcatgcttgtgcgtaccctggactttgcc

SEQ ID NO: 33410 - DNA, 160 bp, Homo sapiens
  chr21:46848031-46848191
  hypo
cgagtgtgcatcttgagtgctgtgcaggttggggtccggcgctcctgcaggcaggcggcgtctgggcctgggggctctcagagtttgaggagcgtgtggtgagggtggcctcgggcctcaaagacgcagcgctgtgggaaccgggagactggctgagccc

SEQ ID NO: 33411 - DNA, 285 bp, Homo sapiens
  chr21:46848505-46848790
  hypo
cgccggagagagggagccctgggccatcacgcagccaccgcccggccccaagaacctgcgagtccactttccacctctggatcggcggttctggacgttcatgcaggtggttcccgcagtgcgaggccttttgtttcgggctcctctcacaagcctcacgtttccaggtacgtcgtggtgttgtgcagacccacaattcatcccttttcatgggtgtgtaatagtccaccatagattctctacgttttaaagcatgttttatgtgcctgaaatgtctctgcactc

SEQ ID NO: 33412 - DNA, 670 bp, Homo sapiens; identical to SEQ ID NO: 30138
  chr21:46849594-46850264
  hypo

SEQ ID NO: 33413 - DNA, 125 bp, Homo sapiens
  chr21:46859943-46860068
  hypo
cggaggctggcaggccgtgggccgcatgggcggaggggccggtcctccgatgatggggcaaacgtctccggcctagcccccgacgctcggggatgtaagggcaagggctgcggggtcggaacgtc

SEQ ID NO: 33414 - DNA, 786 bp, Homo sapiens; identical to SEQ ID NO: 30139
  chr21:46861383-46862169
  hypo

SEQ ID NO: 33415 - DNA, 107 bp, Homo sapiens; identical to SEQ ID NO: 30140
  chr21:46862420-46862527
  hypo

SEQ ID NO: 33416 - DNA, 457 bp, Homo sapiens
  chr21:46863364-46863821
  hypo
cggcatcgcagcagagtcccggtggtggagatgctttgccactggccacccagagctaggagcctcggccaagggctccctccttgcactgtggtctctcgggacctaggaggtcccggggtgtggactgtgctgaactgttctccgacaggcggccctttttctcccacgtgggcgaaaagtgaagcctctgggtggtcctgtacctgtctgtcacatcccgggctgcagccgggtccccagggaggcctccgtgaaaacacaaatcaagtgccaatttcctggtgaagagtctttatgagagcaatgcggccccgtgcccctttacgcggctctgctggtggagaggaatagctgagctgcagcactaaggagagatgcctgctgcatgatcccctagatgcgtccgagggacactggacatctggtggccctccagactcctaggaaggggacc

SEQ ID NO: 33417 - DNA, 361 bp, Homo sapiens
  chr21:46864076-46864437
  hypo
cgctccatggtacctcctgcctcccgaaatcacctctaagttcactttgtgccaggttttgttctccagcgcatcttcagtgctgcgagcaggctgggcttgcagcaggagcacgggtgtgcgtgtggagtgaatgaagggccgtgtgcccgagtaggtggcgtgcaggggtgtagtgaggtgcgtgcaggggtgtagtgaggtgtgggatgtgcagagtgaatgaaggacgttgtgctcgtgtgggtgatgtgcggggttgtggtgaggcgtagggctggggtcagctggtcgtccggacttttggttttctggctgtaaaatgcacatgccaggatagttgtgaggtgcacgctcactc

SEQ ID NO: 33418 - DNA, 297 bp, Homo sapiens; identical to SEQ ID NO: 30144
  chr21:46870768-46871065
  hypo

SEQ ID NO: 33419 - DNA, 307 bp, Homo sapiens; identical to SEQ ID NO: 30145
  chr21:46885721-46886028
  hypo

SEQ ID NO: 33420 - DNA, 274 bp, Homo sapiens; identical to SEQ ID NO: 30146
  chr21:46886377-46886651
  hypo

SEQ ID NO: 33421 - DNA, 222 bp, Homo sapiens; identical to SEQ ID NO: 30147
  chr21:46893658-46893880
  hypo

SEQ ID NO: 33422 - DNA, 1817 bp, Homo sapiens
  chr21:46894494-46896311
  hypo
cgtgtgtgttggtggggtgtgtggaatcacgtggtacccaaggggagaatcccccagccccaggtgtgaggaacagcagggaattctcactcaggggcccagatcacaacatgccccacgtgaacatggacccacagcctcgctcctgggggcgtgggcaggagacgccgtggacgtggacccacagcctcgctcctgggggcgtgggcaggagacaccgtggctggactgtgggcagtgtgtgaacatccatgttactttcatgctttttctttattttgcccaataagcccgttgtttttgcctggaacatgccagaagacgccagatcgttcacatggcggccatgacaaggctgcgccctgggacagcttgctgggtgcggggggtcgccgaggcgccgcacccctcccctggcctgtcttgccctcaggggtcagtagcggtccctgaggatgtttctcctccgggttttcctgaagtttaaaacatccagccgccttggcgcgtgttcggcccagccgggcgtgcgctggggaaacctgtgcggggagcatctgcggtgcggcctcctccagggcagggctctggccagaagagaggagcgcgttccccctcccgcctccgcatgtctgaccaccggccgaggcaggttcagaagcgtcactgtcctcgacccgattggacacgacttactgaagctcagatggtgcctgggcagggaaggccagcgtgcccaccccagcggccccccggagagcaccagagagggctggacgaggcgagagggggcctggaggaggcgagagcagcgtcctttgcttcccaggcctgccgggctcggggcctggcctggctgccatctctccagcctttcccttttcaaactcctcaggcatccggagactctggcagcgggctcggggacgcccgggagcttctcagggaggagacggtgagtagccggacggggcccagcccacgctgcagggtcccgggagagcccctcccagcagtggggtgacacatgtgcacacgcaggtgtggctccaagagctccctctatgccacgaagacatattcctggctggggacagggatgctgggctgggcagacgctcggagcctgggcacaggccccgctccggccctgcctggccgccgcgtgtctctggtgagaggatattcctttaaaacgaggtcctgccctgcacactccttggtcttcgaggcaaccttggccttcccttcgccccatccctccgttagctcgtgcgtggccatcagggaatgaacgcgtgtgtgagcctgacgaccaggaggagaaggcggcgcagggagcgcgcggaaggctttccccagctcgggccacctgagaaaacacaggaggggcggggagtggggaggccccagccgcgggactgaggcgcggtgctgtccgtgagagacgggtgcgggaacgtgttccctgcggggaccctctgcagattcacatcagcttcccagcatggcctgtcgggcgccgggaggcctctgtggtgacggcaggcgcggtcctgggtcctggggagccggggagcccacaggcggccacacccctgcggcccacggaaggaagcccctcgcgcacggccctggagcaccctcctgtttcagaggatttttctttatctttcttgcgatcttaagtatttcatttcacaaaccaagcaagtctccaccgggcatctgccggccgaataacaggccacctcccctctcgtcctccagggcgcggccctaaaacccaggctccccgcgccaccccccgtcaccac

SEQ ID NO: 33423 - DNA, 866 bp, Homo sapiens; identical to SEQ ID NO: 30152
  chr21:46900291-46901157
  hypo

SEQ ID NO: 33424 - DNA, 251 bp, Homo sapiens; identical to SEQ ID NO: 30153
  chr21:46901458-46901709
  hypo

SEQ ID NO: 33425 - DNA, 1234 bp, Homo sapiens; identical to SEQ ID NO: 30154
  chr21:46906455-46907689
  hypo

SEQ ID NO: 33426 - DNA, 310 bp, Homo sapiens; identical to SEQ ID NO: 30155
  chr21:46910337-46910647
  hypo

SEQ ID NO: 33427 - DNA, 616 bp, Homo sapiens; identical to SEQ ID NO: 30156
  chr21:46911022-46911638
  hypo

SEQ ID NO: 33428 - DNA, 1607 bp, Homo sapiens
  chr21:46912072-46913679
  hypo
cgggaggcaggggcagcccgagaggccacagggacctcggcgtgacggtcaagacatcagaacatcagaaaagcctcccgtaggccgagccacctccgccggcaagcaagggagcgtctagcagaggcaggagcattttaaaacaaaatggaagtaaaaaccatggcccttagggcgtctggagtctgcatccagctgctctgagctgaggggcgtctgtgctgcaggagggatgccccaggcccaggaagactggaaagcaacattttccttgaatttcctggtttggtgttttgttgatctgtaagtcgctcgagtccagttgaattttaaacgcggctctttgtttccgatttttccttttgctcgtggacagggatccgtcctgagcgtgccgggacctgaggtatgtgcctgcccagcttctaagagacgggcctgcggggacctgggtacaaggctgggtggggtccgggcaggcgcgagggtgcgtgatgaccccagctgacgccgtccctctttccccagggccggccgggtttcgcaggctttcccgtgagtaacctggtgccagagctgcatgctgcccggctggggaggggtctccacctggtagcacagagcagcccggtcgagctggggtgggccttgtcaggcccgagggatagcgacagtcactgcccccaaggaaatgatgggagtgggatgtgggcgagagccgctggcaggccctgtgctgggtgggcacccgtgagggtgaggcagctccttgcacctgcagaggcctgcagtgtccagagtgaggctggggccgggaggtgtcctggtgggggtcacctgcggaggcctgcagtgtccagagtgaggctggggccgcgaggggccctggtcgggctgtcgaggcaggcatattgcggggggcagctgtcgggggagatggagcagccgtcggggatgggggagatgccagccgctcgggcctcacggcctggcctccattccagggacctgcaggacccaagggcaacctgggctctaagggcgaacgaggctccccgggacccaaggtaaggggctcaggtgctgtccctcaaccccctttgtgacccaggggtggctccagcctgcccagatgaccactgttgggagggacctgggaccccccggctgctgctgtgacacgtgaggggtacatccctgctcgggccgtccctgtggtcacctcccgtgaaaggacccagcctgcgaggcccagtcacagcggccctgccttcggggctctgggtgaggctttgtggggaaggagctggccctgactctgctggacctcctgccattccagggtgagaagggtgaaccgggcagcatcttcagccccgacggcggtgccctgggccctgcccagaaaggagccaaggtgagggccgggcagcctccttccggcaggcgtgggggctcctggggctgtggagacagcctggggagggtcttcctgagggtctggctcctgatgcacgagcctctcccaagcagggctctaccatccaggcctggccctggtggcccctcctttctcgcacccatgtcggcggttccgccggcccctc

SEQ ID NO: 33429 - DNA, 469 bp, Homo sapiens; identical to SEQ ID NO: 30159
  chr21:46914465-46914934
  hypo

SEQ ID NO: 33430 - DNA, 395 bp, Homo sapiens; identical to SEQ ID NO: 30160
  chr21:46918218-46918613
  hypo

SEQ ID NO: 33431 - DNA, 481 bp, Homo sapiens
  chr21:46918891-46919372
  hypo
cgagggctccgagggctctagagggaacagtgtttgcaggcggaatggctgatgctcttccaaagccaaggaaggctcagagcattcccctcattcgaaggatcaacaattagagtgacgagatttctcaacaaaacgggagaagccagaagaccataaatggtttccaaaatatccaagaaagtcaattgccagtgtagactccgacagccagtggtactcccgtggccttcagaacgaggatgacatgcaggccagccactccagacccgagctgtgtcggcagtggagggtatttcagggggaagacaaggccaagggaaaggagtgcagagatggggagagacaacgctggcaggaaccggcgtcccagcgacagggaggtcagaggctccctcgggaaccagcgtgggctgccccacatggcatcccaggaacagtggggtcagaggctcccgcgggaacccgtgtgggctgcccc

SEQ ID NO: 33432 - DNA, 580 bp, Homo sapiens
  chr21:47413791-47414371
  hypo
cgggtccacggagcttgctggagaagcagggatgcacgcagggacgcctctggggccccaggaggagctgccggcctcctgaatgaagatagccatagccagccacgccgatggccacgcacgtgggccgaggaaacgcttggcgaggccaggaaggggctgtgcggggagggaaggccggaacagcccagtgaccacctggacagcatgctgtggctcccagcgtgcccgggcagccatcctccccaaggatggcccagctccacactcacggctcgtttctcttcagggtgaagctggcccgcagggtgatcagggaagagaaggccccgttggtgtccctggagacccggtaggaagcgctgtggggttggggggcgttggccaatttgggttttgggggtagaagtgctccagcagctcacgcactgggggtctgttcatttccgtttgagggcctctgtgtttccgtagatctcgggggtgtccctgcgtgggagccggctgcagggggtgaggcgcggcctgggccgggctggtgtggattgttgagagcaggcccagcgcccgggggcctgac

SEQ ID NO: 33433 - DNA, 209 bp, Homo sapiens; identical to SEQ ID NO: 30165
  chr21:47414718-47414927
  hypo

SEQ ID NO: 33434 - DNA, 195 bp, Homo sapiens; identical to SEQ ID NO: 30166
  chr21:47484109-47484304
  hypo

SEQ ID NO: 33435 - DNA, 254 bp, Homo sapiens
  chr21:47489821-47490075
  hypo
cgatggcactttctgtaggccgcagaggtaggggccgcagagccaagcttgctagcatccatgggacgctgaggccccaaataatagagaccagatggcagcgcttacccccagggccgagctgagggggcggccagaggcgcttggcctgcagggagccgtggaggctggcggagcacggcaccctgggaaaggtggcaggggcaagagggtcacacaggtcataggccagcccagcgggcagggccctgcac

SEQ ID NO: 33436 - DNA, 172 bp, Homo sapiens; identical to SEQ ID NO: 30168
  chr21:47497763-47497935
  hypo

SEQ ID NO: 33437 - DNA, 419 bp, Homo sapiens
  chr22:24179789-24180208
  hypo
cgtgtcctgaggggagtggccagcctggggcggactagatgtaccgggaggctcacccagcaggtccacgaggatggagttgcccagcagcagcgagaagcccatgagcgcccaaggcaggaacggtgcctggaaagtgagcaggccgaagaagttgaccctcacccgagggctgcggcggctccacacgtacaccagcatggccatgagggcctggcccaggaagaacaggctgcccaggagtcccagcagctgggccagagtcaaggtgctccggtgcaggcctcagcccaagcccagggcccctctgacttcccaagaccctggaattcttcccctcatctcccctatgtgctattccctcatcaagatgagccagtccaataaaggcgacacactccacgggcttcaggtcccac

SEQ ID NO: 33438 - DNA, 305 bp, Homo sapiens; identical to SEQ ID NO: 30171
  chr22:25561932-25562237
  hypo

SEQ ID NO: 33439 - DNA, 122 bp, Homo sapiens; identical to SEQ ID NO: 30172
  chr22:25570292-25570414
  hypo

SEQ ID NO: 33440 - DNA, 352 bp, Homo sapiens; identical to SEQ ID NO: 30173
  chr22:25602982-25603334
  hypo

SEQ ID NO: 33441 - DNA, 414 bp, Homo sapiens
  chr22:30857299-30857713
  hypo
cgccggcctctgagcaggtgaggttcccatcctcgggcaccatgtgggcgttatagcgctggctgggtagaacatctgtcatctcccctgcccgctgtcgctcccccatcttggtcttcaggaaaactccgaagccgatgtccgcaccatcagatgagaactgccacctgtcagggggagggggaggagacaggttgctgctcagcctgatgggtctctgaggggttagggcctgcccctacctgagaacgcagcctggaaataggatctcgtattccacttggtgtgatgagccgcggttgatctgcaccgagtgctcgtactgagtcttcacctggtcccgcacgtacatggacttggggatctccccgccatagttaatctgcggacatgggatgagatgggcttgcttcc

SEQ ID NO: 33442 - DNA, 496 bp, Homo sapiens; identical to SEQ ID NO: 30174
  chr22:30939634-30940130
  hypo

SEQ ID NO: 33443 - DNA, 147 bp, Homo sapiens
  chr22:30940917-30941064
  hypo
cgtgaaaaaaagaaagtccactccagcgcccggtcgccacccttctttgccccgggaaccccatcccggcacctcccaccccgcatacaccacctaccccatgcaaaaccctatgatggcaggaatcgagacctccaaggacccgtc

SEQ ID NO: 33444 - DNA, 99 bp, Homo sapiens; identical to SEQ ID NO: 30176
  chr22:31260817-31260916
  hypo

SEQ ID NO: 33445 - DNA, 688 bp, Homo sapiens; identical to SEQ ID NO: 30177
  chr22:31266269-31266957
  hypo

SEQ ID NO: 33446 - DNA, 389 bp, Homo sapiens; identical to SEQ ID NO: 30178
  chr22:32665378-32665767
  hypo

SEQ ID NO: 33447 - DNA, 121 bp, Homo sapiens; identical to SEQ ID NO: 30179
  chr22:40024720-40024841
  hypo

SEQ ID NO: 33448 - DNA, 733 bp, Homo sapiens
  chr22:40045208-40045941
  hypo
cggtcagcacggatgcgcgccctgcaccgtgctgggcccatcatgtgccttaagggagagaatcctcctacagcctgcatggtgggcgttcctgccccaacttctacaacaggggcagacaaagctcagagagctgcagccgcttccccaggcacccctgaccgcctttccaggctgggtcggctggttccaggcagacctgtgggcctgggagccaagcgcactcagggatgtgtcccagggtggattgggcctggtgtgggcaacgactctatgcccctctcatttgcttttcagagctgtgcccgcaacatagccccctggatgcgacgccccacaccctggtgcagcccatccccgccacgctggcttccgatcccgccagctgcccttgctgccagcatgaggacggccggcggccctcgggcctgggcagcaccgactcgggccaggagggctcgggctccgggagctccgctggtggcgaggacgaggcggatggggacggggcccggagcagcgaggacggagcctcctcagaactggggaaggaggaggaggaggaggagcaggcggatggggcggtctggctgtgcggggatgtgtggcgggagacgcgagccaagctgcgcggcatcgtggacagcaagtacttcaaccggggcatcatgatggccatcctggtcaacaccgtcagcatgggcatcgagcaccacgagcaggccagtgcagc

SEQ ID NO: 33449 - DNA, 328 bp, Homo sapiens; identical to SEQ ID NO: 30182
  chr22:45074483-45074811
  hypo

SEQ ID NO: 33450 - DNA, 392 bp, Homo sapiens; identical to SEQ ID NO: 30183
  chr22:45959040-45959432
  hypo

SEQ ID NO: 33451 - DNA, 167 bp, Homo sapiens; identical to SEQ ID NO: 30184
  chr3:124281735-124281902
  hypo

SEQ ID NO: 33452 - DNA, 360 bp, Homo sapiens; identical to SEQ ID NO: 30185
  chr3:124515276-124515636
  hypo

SEQ ID NO: 33453 - DNA, 788 bp, Homo sapiens
  chr3:13611739-13612527
  hypo
cgcgtgcgtgccggtgtgcaccgtgtctgtgtgtgcacacccagtactgacaggcttcctttctgattcccccagggtcttacaggagaggggaccgtcctgggctggcctggaccatggtgctgctctgggagcctgcaggagcctggcttgctctgggcctggccctggccctgggccccagcgtggccgcagctgcccctcggcaggactgcacgggcgtggagtgcccgccgctggagaactgcattgaggaggcgctggagccgggtgcctgctgtgccacgtgtgtgcagcagggctgcgcctgcgagggctaccagtactatgactgcctacagggtggcttcgtgcgcggccgcgtgcccgccggtcagtcctattttgtggacttcgggagcactgagtgctcctgcccaccaggcggcggcaagatcagctgccagttcatgctgtgcccggagctgccgcccaactgcatcgaggctgtagtggtggctgacagctgcccacagtgcggccaggtgggctgcgtccacgcgggccacaagtacgccgctggccacactgttcacctgccgccctgccgggcctgccactgccctgacgccggtggagagctcatctgctaccagctccccggttgccacgggaacttctcagatgccgaggagggtgaccccgagcgacactacgaagacccctacagctatgaccaggaggtggccgaggtggaagcagcaacagccctggggggtgaggtccaggcgggtgcagtccaggcaggc

SEQ ID NO: 33454 - DNA, 177 bp, Homo sapiens; identical to SEQ ID NO: 30188
  chr3:184225995-184226172
  hypo

SEQ ID NO: 33455 - DNA, 357 bp, Homo sapiens
  chr3:185362982-185363339
  hypo
cgttcacctatgttagttcaactaaaagggatagcgtcgtgggagttcaggagagatccgagtggatggtgaagtggatggctgaagcctgcagaagccctggggggcgggaggcggggctcggtggttctggcaaacctggctgaccttccccgcccctcctcggcccctggggttctcagggcctcggcagagtccctggccgcctccgcagacttctcattcctcagatggtctttggtttgctcccgatctggctggctgcgtttggtctcattctgtcaggtgttggaagggctacattcatccgttgttttgctggtgcctgtgggagcctcacttgctgcgctgtgaggc

SEQ ID NO: 33456 - DNA, 477 bp, Homo sapiens; identical to SEQ ID NO: 30190
  chr3:185374988-185375465
  hypo

SEQ ID NO: 33457 - DNA, 245 bp, Homo sapiens; identical to SEQ ID NO: 30191
  chr3:185407229-185407474
  hypo

SEQ ID NO: 33458 - DNA, 248 bp, Homo sapiens
  chr3:185445861-185446109
  hypo
cgttacgtatacctgaactatgtttgcgattcacacaaaataaagaattgaccaggaccaaccccagcctatgagaggcaaagttactgctgcccgctttaccccaccctagagcgccctctgatccacactctcacactgccttccagctttcccacggcgccagacccttgctgctcctgggccccttccccttgctcccttcatcaggcgctctccgctcctccagcccatcagcgccttgactc

SEQ ID NO: 33459 - DNA, 157 bp, Homo sapiens; identical to SEQ ID NO: 30193
  chr3:54237704-54237861
  hypo

SEQ ID NO: 33460 - DNA, 990 bp, Homo sapiens; identical to SEQ ID NO: 30194
  chr3:66550603-66551593
  binary

SEQ ID NO: 33461 - DNA, 223 bp, Homo sapiens; identical to SEQ ID NO: 30195
  chr3:8595841-8596064
  hypo

SEQ ID NO: 33462 - DNA, 213 bp, Homo sapiens
  chr4:3467319-3467532
  hypo
cgtttttctcaatcgtgagcacgtctttctgttatgacaaggtttagcgaatgaaagggaaacccttttatcaaagggctgctcagccacagcgcctggcatggccagtggacgtcgggccgtctgcctcggtgtgggactgcagggtgccctgcagtgggaccacgttcctcaatgtctccaccgcgtcctcactgcggaatgcgtgtctgc

SEQ ID NO: 33463 - DNA, 970 bp, Homo sapiens
  chr4:57180896-57181866
  hypo
cgcacctggaggactggagggggcagctcagtgagcttctgaacgactttgaggagaggctcgaagaccaggaacgcctgaaacccgaaggacaaagagaacactccgaggagccaggtatttgcgaggagcagaacccagaggccgagcggcgaagagagcagcagggaaggagcggggatttccagggggccgatcgtcctgggcccgaggaaaagagagaagaaggggacacggagcctctcctgaaacaagaggggccggtggaagccgcgcagcctccggtggagaggaaagaagccgccgcccttgaacaaggccgcaaggtggaggagctgcggtggcaggaggtggacgagagacagaccatgccccggccctacacgttccaggtgtcctccggagggaagcagattctctttcccaaagtcaacctgagccccgtgacgcccgcaaaggacacggggctcaccgctgctccccaggaaccaaaggcccccaaagccagcccagtccagcacgccctaccgtcgtccctgagcgttccccacaccgccattctggtcacgggcgcgcagctctgtggcccggcagtcaacctgagccagatcaaggacaccgcgtgcaagtccctcctgggcttggaggagaagaagcacgcggaagccccagctggggagaaccctccccgaggccccggcgacgcgagggcgggcagcgggaaggctaagccccgccaggagtctcccagcagcgcgtccgcactcgcagaatgggcttccattcggtccagaatcctgaagaacgcagagagtgacccgcgcagcagcgagagggaccagttgaggcccggtgatgagtccactcccaggggccggtgtgattcccgcgggaaccaacggaagactccgccagtcaatgcaaagttctctattatgcctgcctggcagaaattttccgatggtggcac

SEQ ID NO: 33464 - DNA, 886 bp, Homo sapiens
  chr4:57181886-57182772
  hypo
cggaagctgaaagcatacgaaaaagacccatgctgggacccagcgaagagacagccccccagcctcctcctgctggtgttcgcgagctcgggaagggtccggagaagtcggagatgcaccgggagcccgcagacaccaccgagggatgcaaatttgccaaagacctcccgtctttccttgtcccaagccttccttaccctccgcagaaagtggtggcccacacagagttcacgacctcgtcggacagcgagactgcaaacgggatagcaaagccagaccctgtgatgccaggtggagaggaaaaagcctcaccgtttggaataaaattgagaaggaccaactattccttgcgcttcaactgcgaccaacaggcagaacagaagaagaagaagaggcacagcagcaccggagacagcgcggatgcagggccgcctgcagcggggagcgctcgtggagagaaagagatggagggtgtggccctcaagcatggtccatccctcccccaagagcggaagcaagccccttccacccggagggactccgctgaaccttccagcagccgctctgttcctgtggcccaccctgggcctccaccggccagcagccagaccccggctccggagcacgacaaggcagcaaacaaaatgccactggcacaaaagccagcactggctcccaagcccaccagtcagaccccaccagcatccccactttccaaactgagcaggccctacttggtagagctgctgtctcgccgagcggggaggccggacccagagccaagtgagccgtccaaggaggaccaggagagcagtgaccgccggccaccctcgcccccaggccccgaggaaaggaagggacagaagagggacgaggaggaagaggc

SEQ ID NO: 33465 - DNA, 496 bp, Homo sapiens; identical to SEQ ID NO: 30200
  chr4:6733162-6733658
  hypo

SEQ ID NO: 33466 - DNA, 273 bp, Homo sapiens; identical to SEQ ID NO: 30201
  chr4:8070965-8071238
  hypo

SEQ ID NO: 33467 - DNA, 273 bp, Homo sapiens
  chr4:8615820-8616093
  hypo
cgccatctgcggatctgcaaagtggggatcatatggtccaccttgcagttgttcagcccctcagctgcaggaggggcgtctgtggcgagtacctgctgcactcacctgcctgctgggcacttggctgacaccccgacgtcccggctgtctctgcgcggctgacaccccggcgtcccggctgtctctgtgcggctgacacccctgacgtcccggctgtctctgtgcggctgacacccctgacgtccccgctgtctctgtgccacaggcatgtcc

SEQ ID NO: 33468 - DNA, 150 bp, Homo sapiens; identical to SEQ ID NO: 30203
  chr5:1032302-1032452
  hypo

SEQ ID NO: 33469 - DNA, 440 bp, Homo sapiens
  chr5:1033274-1033714
  hypo
cgtgggctggtgagaggagggcacacccggctgtggctggccgggatagggcctccctcccctccgcaggggtcccaagatcgggctctcagctcaggcccgtctggacaggatcatggtgtggtgaggggagagcagcgagggtccccaatggcgggccacatcctccatgtgccctctgccagccccttcgcctcctcttgtccccctagtggcactccccgctgagaaagctgagggccgcgagcacccgggacaactcctcagcgcagatgacggagagagggcagcaaaccgcgagggcccgcgaggaccgggcgggcagcgcctcaacattgacgtgggtctctctccggcctcacttgcgggaacacgtccctggggccgggggctcagggacaggcatgtgttgccctaaactgggcatctgtggacacggc

SEQ ID NO: 33470 - DNA, 637 bp, Homo sapiens
  chr5:1037852-1038489
  hypo
cgtttctgaggagatgggaacctgagcctgcactcccagggcctcacactctgacctgtgtccgcagggtcccctcctgtgcaagcaaagcaggagccccagggcagggcctcgcacctccaggcccggtcccgctcccaggagccagatacacatgccgtacaccaccgcaggtcacaggtgctggtggaacacgtcgtgccagcctcggagcctgctgcccgggccctggacacgcagccccggccgaaggggccggagaagcagttcctcaagtcccccaagggctccgggaagccgcctggggtgccagccagcagcaagtccgggaaagccttcagctactacctgccggccgtcctgccgccccaggcccctcaggacggccaccacctcccgcagcccccaccgccaccctacggccacaagcggtaccgccaaaagggcagggagggccactcgccactcaaggccccacacgctcagcctgccacagtggagcacgaggtggtgcgggacctgccgcccacgccagcaggagagggctacgcggtgccagtgatccagcggcacgagcaccaccaccaccacgagcaccaccaccaccaccaccaccaccacttccacccgtcctagc

SEQ ID NO: 33471 - DNA, 236 bp, Homo sapiens; identical to SEQ ID NO: 30208
  chr5:1049758-1049994
  hypo

SEQ ID NO: 33472 - DNA, 263 bp, Homo sapiens; identical to SEQ ID NO: 30209
  chr5:1051312-1051575
  hypo

SEQ ID NO: 33473 - DNA, 1232 bp, Homo sapiens; identical to SEQ ID NO: 30210
  chr5:1051905-1053137
  hypo

SEQ ID NO: 33474 - DNA, 1614 bp, Homo sapiens; identical to SEQ ID NO: 30211
  chr5:1053406-1055020
  hypo

SEQ ID NO: 33475 - DNA, 123 bp, Homo sapiens; identical to SEQ ID NO: 30212
  chr5:1055426-1055549
  hypo

SEQ ID NO: 33476 - DNA, 418 bp, Homo sapiens; identical to SEQ ID NO: 30213
  chr5:1055588-1056006
  hypo

SEQ ID NO: 33477 - DNA, 1823 bp, Homo sapiens; identical to SEQ ID NO: 30214
  chr5:1056108-1057931
  hypo

SEQ ID NO: 33478 - DNA, 1026 bp, Homo sapiens
  chr5:1058847-1059873
  hypo
cgcccggcccagcctaaatttcccatggccttgaacgtgaaaccagagcccaagggctgcccgctctcggcagagccagcgccgcccacctggcccgagggccaccgtgtaagtcactagagggtgtccacccagcgtctgcacagcagctcatccaaacccttctgcagagcggtgacacctccaacccccacctggcccaggaggggcccttcgagctcgagcttgctgttcccgctcccggtccctcctcggtcagcatttgctgactctccacactgaacttcccatgaagccatgggtggattcttgttcctagctggacccgggctgaacccttgtgacgccagggcgaccctgccggatctcagggacctggcctggacagaaaacagaggatgtgggtcctcccagacactcccggctgcccggacccccgtggaaggggtctctgtccacggacaagctgggcggccccccgtgtcctgcatctgtgcccaccctgacctgcccggggtctgggagtggacaggaccgcagctccacacgcctttctctgttgggggagagcagcagtcgctgcttagtgattccggctgtcagcacatatggccccacacgcagacccgtgtactgcaggttcctgctgaggccaaggccccagggcaggcaaatcccctgcccctgcctccgccgtcactgcagtctcagaaaaccaacacctgcacctggtctgcagacacacgtgtgtgataccagcctggtgggacccacgaagaccccatgaggccgtgacctcacagagctgagcatcccgctaccaggtgacccccgtgctgtcctccagtgcgaagtgaccacaaagacacctgcccttggggtctcacagtggccatggggcccaggccagtataactcaggtggatacacccagacgtcctcagcagcctacagttacccacggagccaaagccgctgcagccaggcggccagcttccacgcacggaggctgcacaggtctgtgtc

SEQ ID NO: 33479 - DNA, 97 bp, Homo sapiens; identical to SEQ ID NO: 30218
  chr5:1060676-1060773
  hypo

SEQ ID NO: 33480 - DNA, 342 bp, Homo sapiens; identical to SEQ ID NO: 30219
  chr5:1060864-1061206
  hypo

SEQ ID NO: 33481 - DNA, 207 bp, Homo sapiens; identical to SEQ ID NO: 30220
  chr5:1061585-1061792
  binary

SEQ ID NO: 33482 - DNA, 811 bp, Homo sapiens; identical to SEQ ID NO: 30221
  chr5:1062902-1063713
  hypo

SEQ ID NO: 33483 - DNA, 860 bp, Homo sapiens; identical to SEQ ID NO: 30222
  chr5:1064412-1065272
  binary

SEQ ID NO: 33484 - DNA, 890 bp, Homo sapiens; identical to SEQ ID NO: 30223
  chr5:1065329-1066219
  hypo

SEQ ID NO: 33485 - DNA, 1417 bp, Homo sapiens; identical to SEQ ID NO: 30224
  chr5:1068627-1070044
  hypo

SEQ ID NO: 33486 - DNA, 1355 bp, Homo sapiens
  chr5:1073840-1075195
  hypo
cgacgtgaaggacagcaggcgggggtgcttcacggcctgctccgcgtccaggttcagcatcaccagcacctggggcctgcagccagggtggggcggctgttaccacggcaacgcttaccagggcacggcccatcaacaggcagggcagatgggacgggcggggcacacgacacaggtgggacgggagatacatgacaggcgggacaggggacaaaaggggcaggtgacagatgggatggggaaacgtgacacacgtggggtaagttgaacaggtgacaggtgagacaggccacagaagccaggtgggacaggcagggccgatggacaggtgggcactagccaggcaggacaggagaacaggtaggttagacaggtgggacaggtgacatgctagacaggtgagacaatggcccaggacacacacctgaagcccccaccgaggccctgaggggacaatggcccggggcacacccgaggcccccgccgaggcccctgaggggacaatggcccggggcacacacctgaggcccccgccgaggccctgaggggcagaggcttcccaaagatggcctttgcttcagcaggagccaccctctcccaccccaagcccagggctgtgctggcagaggggccggctccccacacccccaccctgcagcagggacacccccggcccccagctgcgccatccgctctgcaccaggcagtgttcacaccccagaccttgcctgagcggctgaaggtgagaggcccctgagactcaaaggtccccactcaaaggccgacctcagaaacagctcttctgtgcgtctgaggaccacggggcatgggcggtgctcacctccagttcttggtgtgggggggaccgtgctccacgcgcagcagggcgtagcgggcggcgttcagggataggccacggatgccatcgccccactccttctcggccctgtgggaaaggaagtcggggtttgtccagccgcgtacctggaggctcctctcccacctgggaaaggggacttctgggggcaggtgagttggggcaaacaggacccccaggaaaagtccctggatgaggagggaggcctccatgcccacccttgccctgaagggagcccgtcctaggagccaccgggtcagagggtgctgtggctgtggagggaacgaggtctacgtccagcatgcgtgaggtgccttcctcacaggacgggggacaggaggcccatgacagggaagtggctggaccccgggcacgaggcgggtgcaggtggagggagggtgggtgctggggcacggggaaggacgcctgtggctgccgagtgagtacagacacaacctggggacacctcgcgagacac

SEQ ID NO: 33487 - DNA, 4905 bp, Homo sapiens; identical to SEQ ID NO: 30226
  chr5:1075478-1080383
  hypo

SEQ ID NO: 33488 - DNA, 69 bp, Homo sapiens; identical to SEQ ID NO: 30227
  chr5:1081429-1081498
  hypo

SEQ ID NO: 33489 - DNA, 304 bp, Homo sapiens; identical to SEQ ID NO: 30228
  chr5:1081824-1082128
  hypo

SEQ ID NO: 33490 - DNA, 708 bp, Homo sapiens; identical to SEQ ID NO: 30229
  chr5:1083641-1084349
  hypo

SEQ ID NO: 33491 - DNA, 545 bp, Homo sapiens; identical to SEQ ID NO: 30230
  chr5:1084386-1084931
  hypo

SEQ ID NO: 33492 - DNA, 1665 bp, Homo sapiens; identical to SEQ ID NO: 30231
  chr5:1085196-1086861
  hypo

SEQ ID NO: 33493 - DNA, 2187 bp, Homo sapiens; identical to SEQ ID NO: 30232
  chr5:1087088-1089275
  hypo

SEQ ID NO: 33494 - DNA, 212 bp, Homo sapiens; identical to SEQ ID NO: 30233
  chr5:1090437-1090649
  hypo

SEQ ID NO: 33495 - DNA, 247 bp, Homo sapiens; identical to SEQ ID NO: 30234
  chr5:1091634-1091881
  hypo

SEQ ID NO: 33496 - DNA, 157 bp, Homo sapiens
  chr5:1094026-1094183
  hypo
cgtggggccggagcaccctagatccaggaaggagcccagaaggcaccagccgaggagcacgtcccagctcaagtgcgggactgggcccccgccacagccttcaggacagggaggccccagttccttccacgtggtgtccagtcctgtgggaggcccc

SEQ ID NO: 33497 - DNA, 625 bp, Homo sapiens; identical to SEQ ID NO: 30236
  chr5:1094563-1095188
  hypo

SEQ ID NO: 33498 - DNA, 390 bp, Homo sapiens; identical to SEQ ID NO: 30237
  chr5:1095619-1096009
  hypo

SEQ ID NO: 33499 - DNA, 239 bp, Homo sapiens; identical to SEQ ID NO: 30238
  chr5:1114657-1114896
  hypo

SEQ ID NO: 33500 - DNA, 635 bp, Homo sapiens; identical to SEQ ID NO: 30239
  chr5:1115157-1115792
  hypo

SEQ ID NO: 33501 - DNA, 601 bp, Homo sapiens; identical to SEQ ID NO: 30240
  chr5:1116675-1117276
  hypo

SEQ ID NO: 33502 - DNA, 191 bp, Homo sapiens; identical to SEQ ID NO: 30241
  chr5:1120359-1120550
  hypo

SEQ ID NO: 33503 - DNA, 103 bp, Homo sapiens; identical to SEQ ID NO: 30242
  chr5:1120577-1120680
  hypo

SEQ ID NO: 33504 - DNA, 178 bp, Homo sapiens; identical to SEQ ID NO: 30243
  chr5:1122647-1122825
  hypo

SEQ ID NO: 33505 - DNA, 923 bp, Homo sapiens; identical to SEQ ID NO: 30244
  chr5:1143146-1144069
  hypo

SEQ ID NO: 33506 - DNA, 689 bp, Homo sapiens; identical to SEQ ID NO: 30245
  chr5:141248116-141248805
  hypo

SEQ ID NO: 33507 - DNA, 100 bp, Homo sapiens; identical to SEQ ID NO: 30246
  chr5:148821027-148821127
  hypo

SEQ ID NO: 33508 - DNA, 413 bp, Homo sapiens; identical to SEQ ID NO: 30247
  chr5:149323779-149324192
  hypo

SEQ ID NO: 33509 - DNA, 435 bp, Homo sapiens; identical to SEQ ID NO: 30248
  chr5:159691947-159692382
  hypo

SEQ ID NO: 33510 - DNA, 270 bp, Homo sapiens; identical to SEQ ID NO: 30249
  chr5:16794700-16794970
  hypo

SEQ ID NO: 33511 - DNA, 196 bp, Homo sapiens; identical to SEQ ID NO: 30250
  chr5:168112681-168112877
  hypo

SEQ ID NO: 33512 - DNA, 214 bp, Homo sapiens; identical to SEQ ID NO: 30251
  chr5:168189525-168189739
  hypo

SEQ ID NO: 33513 - DNA, 304 bp, Homo sapiens
  chr5:168195091-168195395
  hypo
cggtgctccagagcagaggagaggtgtccagcggtggtggcggcggtggcgggccatgctgcaggagagcacggtgctttccgcggtgcttgacagaaccatgttccgtttccatcgttccaccacatggttagatcaagcacaaaggaaagccccgcagcgactggtcagagtcaaggtcaggaagcagcgtcagagagaggacaggagcgctcagaggaagcagcgtggagaagcggaagccggagcaggcccccactgagcgtgattagtatcaggagtggggttccactggaacacttcc

SEQ ID NO: 33514 - DNA, 177 bp, Homo sapiens
  chr5:168233363-168233540
  hypo
cgctgatggcctagtgggtgatgggctgggacagggagctgaattctccggcgacagttgttgggggtgtcagacaggtgcacttacatttcgacgatgccctccggcaagttggcaggaatctccatcaagccctttcctcgacagtccacgatgttattgctgcacgtgcagggc

SEQ ID NO: 33515 - DNA, 144 bp, Homo sapiens; identical to SEQ ID NO: 30253
  chr5:168284824-168284968
  hypo

SEQ ID NO: 33516 - DNA, 277 bp, Homo sapiens; identical to SEQ ID NO: 30254
  chr5:1702104-1702381
  hypo

SEQ ID NO: 33517 - DNA, 465 bp, Homo sapiens; identical to SEQ ID NO: 30255
  chr5:171766390-171766855
  hypo

SEQ ID NO: 33518 - DNA, 224 bp, Homo sapiens; identical to SEQ ID NO: 30256
  chr5:172724564-172724788
  hypo

SEQ ID NO: 33519 - DNA, 501 bp, Homo sapiens; identical to SEQ ID NO: 30257
  chr5:172744598-172745099
  hypo

SEQ ID NO: 33520 - DNA, 117 bp, Homo sapiens; identical to SEQ ID NO: 30258
  chr5:177802468-177802585
  hypo

SEQ ID NO: 33521 - DNA, 174 bp, Homo sapiens
  chr5:177882646-177882820
  hypo
cgccatcgcttctgtgtgtttcctctctgccacgcggacggaccgcacctcaaggccgagagctggcacctatcccctgcccacccatcccaccaggctccacgaggaggtcagagcggaggaccagccctctacagtggccctatgtctgacactggctccctcagctcgccc

SEQ ID NO: 33522 - DNA, 421 bp, Homo sapiens; identical to SEQ ID NO: 30261
  chr5:177892711-177893132
  hypo

SEQ ID NO: 33523 - DNA, 102 bp, Homo sapiens; identical to SEQ ID NO: 30262
  chr5:178652545-178652647
  hypo

SEQ ID NO: 33524 - DNA, 280 bp, Homo sapiens; identical to SEQ ID NO: 30263
  chr5:180036597-180036877
  hypo

SEQ ID NO: 33525 - DNA, 366 bp, Homo sapiens; identical to SEQ ID NO: 30264
  chr5:180055788-180056154
  hypo

SEQ ID NO: 33526 - DNA, 335 bp, Homo sapiens; identical to SEQ ID NO: 30265
  chr5:1910394-1910729
  hypo

SEQ ID NO: 33527 - DNA, 295 bp, Homo sapiens
  chr5:1922827-1923122
  hypo
cgctgctgctcagggacccctcctcccattctggaaaccatcggcaaaacctcagcagaccacggggccattactgtgggctccggtttccagccactgcacttccagacttttctcttcggagccagtgggaatttagcaaatgactggatggggtctgggcaaccaggcatcacgaggcgccttctccttccactcggtggagcagggtctccagtgaatgcggcgtccacgcctgatcggggctcctgccagggcggccatgcctgctgctagagcctctgagaaaacagcc

SEQ ID NO: 33528 - DNA, 537 bp, Homo sapiens
  chr5:2261209-2261746
  hypo
cggaaagcctgctctccgggtggctctgtggctgagacgggcaacacctctcaaatggaaacacctgacgttgcaccagatctcagatgcgaagggcgggggtccctccagtgaggactcccaggggaccgagttttccacctgcgttctagatgttctccgtgaaagcatcacgtggtgtcccggtgaggggcctggctgagtgggcatcggcttgagcgcctggagcttgctggagaagagactcatgggcaccaccgggcccaccatgcagacttcagggaaagagagcagccggaatgcgttttaaatcctgcctgagagcgtggatgctacaggactcctggcgtggggaacccggcatctgtgtatgtgcccgtgggcatgtggtcagcgaggcaaccctcacaggaccacgaggccctggtcggacacaggctgcccgcagccccttcccacaggagcaccaccagtaaggcctttactgtccccttatcccttgctgtttccccaccgacaccctgacgctgagcagcc

SEQ ID NO: 33529 - DNA, 386 bp, Homo sapiens; identical to SEQ ID NO: 30269
  chr5:569858-570244
  hypo

SEQ ID NO: 33530 - DNA, 106 bp, Homo sapiens; identical to SEQ ID NO: 30270
  chr5:7825260-7825366
  hypo

SEQ ID NO: 33531 - DNA, 383 bp, Homo sapiens; identical to SEQ ID NO: 30271
  chr5:9122712-9123095
  hypo

SEQ ID NO: 33532 - DNA, 487 bp, Homo sapiens; identical to SEQ ID NO: 30272
  chr5:962533-963020
  hypo

SEQ ID NO: 33533 - DNA, 451 bp, Homo sapiens; identical to SEQ ID NO: 30273
  chr6:10319622-10320073
  hypo

SEQ ID NO: 33534 - DNA, 101 bp, Homo sapiens; identical to SEQ ID NO: 30274
  chr6:154727653-154727754
  hypo

SEQ ID NO: 33535 - DNA, 146 bp, Homo sapiens; identical to SEQ ID NO: 30275
  chr6:154826922-154827068
  hypo

SEQ ID NO: 33536 - DNA, 447 bp, Homo sapiens; identical to SEQ ID NO: 30276
  chr6:160679377-160679824
  hypo

SEQ ID NO: 33537 - DNA, 170 bp, Homo sapiens
  chr6:161585070-161585240
  hypo
cggtccctatgctgcaggtgggatgggcgtgctgttgacttgctttcccgccatcagcgctcccgcccttatgctcagagttgtaaagtgatcatggattcggaagcctttgggagcaaaaccctaaacggtgctgagattaaattcccgctccgtgaatgtctcttccc

SEQ ID NO: 33538 - DNA, 162 bp, Homo sapiens
  chr6:161685582-161685744
  hypo
cgtgcccgcgcatccctgccctgcaagtcttatccactgcgtgggaacccctcgctgaggcttccgtcttgccctctgggcagcaggctcctcaaaggcacttgcagggtcggctccctctttgtattcctgcgggctgaatgcacgggctccctaagaaac

SEQ ID NO: 33539 - DNA, 112 bp, Homo sapiens; identical to SEQ ID NO: 30278
  chr6:161725123-161725235
  hypo

SEQ ID NO: 33540 - DNA, 722 bp, Homo sapiens; identical to SEQ ID NO: 30279
  chr6:168062973-168063695
  hypo

SEQ ID NO: 33541 - DNA, 233 bp, Homo sapiens; identical to SEQ ID NO: 30280
  chr6:168137821-168138054
  hypo

SEQ ID NO: 33542 - DNA, 513 bp, Homo sapiens; identical to SEQ ID NO: 30281
  chr6:168529700-168530213
  hypo

SEQ ID NO: 33543 - DNA, 365 bp, Homo sapiens; identical to SEQ ID NO: 30282
  chr6:168672446-168672811
  hypo

SEQ ID NO: 33544 - DNA, 611 bp, Homo sapiens; identical to SEQ ID NO: 30283
  chr6:168709592-168710203
  hypo

SEQ ID NO: 33545 - DNA, 594 bp, Homo sapiens
  chr6:170339178-170339772
  hypo
cggggcctcccagcccttcacgcagcgctgacggggcctctgcccaccggccaccctggtctcaagacggagcccacgtctcctgcttgggctggatgagtgacccttccctgcggccatgaacagggagctttaaacgtgttgaggttggaccctgcccagcccggctgaaccccactctgtaggaggcgcaggcatcagacgccggggacgtcatggtggaggagactacccgtgagcccggtgacgtcacggtggagaccacccgcgaggctggtgacgtcacagtgcaggagaccaccgcgaacctggtgacgtcacggtgggggagaccaccccgagccctgtgacgtcacggtggaggagaccaccctgagcctggtgacgtcacgggtggaggagaccgccccgagccctgtgacttcacggtggaggagaccaccctgagcccggtgacgtcacgggtggaggagaccgccccgagccctgtgacttcacggtggaggagtccaccccgagcctggtgacatcatggtggaggagaccgcccctgagcccgggtgcccctgatcccaggcactggatgggatcccc

SEQ ID NO: 33546 - DNA, 1440 bp, Homo sapiens; identical to SEQ ID NO: 30286
  chr6:18263786-18265226
  binary

SEQ ID NO: 33547 - DNA, 199 bp, Homo sapiens; identical to SEQ ID NO: 30287
  chr6:3579868-3580067
  hypo

SEQ ID NO: 33548 - DNA, 504 bp, Homo sapiens; identical to SEQ ID NO: 30288
  chr6:3618094-3618598
  hypo

SEQ ID NO: 33549 - DNA, 349 bp, Homo sapiens; identical to SEQ ID NO: 30289
  chr6:3646980-3647329
  hypo

SEQ ID NO: 33550 - DNA, 307 bp, Homo sapiens; identical to SEQ ID NO: 30290
  chr6:3724319-3724626
  hypo

SEQ ID NO: 33551 - DNA, 416 bp, Homo sapiens; identical to SEQ ID NO: 30291
  chr6:3725763-3726179
  hypo

SEQ ID NO: 33552 - DNA, 802 bp, Homo sapiens; identical to SEQ ID NO: 30292
  chr6:39158588-39159390
  hypo

SEQ ID NO: 33553 - DNA, 707 bp, Homo sapiens; identical to SEQ ID NO: 30293
  chr6:40399988-40400695
  hypo

SEQ ID NO: 33554 - DNA, 204 bp, Homo sapiens; identical to SEQ ID NO: 30294
  chr6:44120364-44120568
  hypo

SEQ ID NO: 33555 - DNA, 115 bp, Homo sapiens; identical to SEQ ID NO: 30295
  chr6:53139871-53139986
  hypo

SEQ ID NO: 33556 - DNA, 348 bp, Homo sapiens; identical to SEQ ID NO: 30296
  chr6:7882630-7882978
  hypo

SEQ ID NO: 33557 - DNA, 327 bp, Homo sapiens; identical to SEQ ID NO: 30297
  chr6:7887548-7887875
  hypo

SEQ ID NO: 33558 - DNA, 861 bp, Homo sapiens; identical to SEQ ID NO: 30298
  chr6:7888481-7889342
  hypo

SEQ ID NO: 33559 - DNA, 188 bp, Homo sapiens; identical to SEQ ID NO: 30299
  chr6:7890532-7890720
  hypo

SEQ ID NO: 33560 - DNA, 242 bp, Homo sapiens; identical to SEQ ID NO: 30300
  chr6:7893721-7893963
  hypo

SEQ ID NO: 33561 - DNA, 181 bp, Homo sapiens; identical to SEQ ID NO: 30301
  chr6:7898587-7898768
  hypo

SEQ ID NO: 33562 - DNA, 217 bp, Homo sapiens; identical to SEQ ID NO: 30302
  chr7:100405032-100405249
  hypo

SEQ ID NO: 33563 - DNA, 380 bp, Homo sapiens; identical to SEQ ID NO: 30303
  chr7:100421158-100421538
  hypo

SEQ ID NO: 33564 - DNA, 387 bp, Homo sapiens
  chr7:1328507-1328894
  hypo
cggagaaagcagacaactcgtccgcgttgtcctggagatgcagccgacatcggcctgcttgtcctgctgccagggccgctgggggccccatcgatgtccacccggccagacacagctcccgtcattcaatatggcaaagtgtggtggtgctggctccgcagaccccactgtggaggcgaaaggtaagaagtcagggttcgaggttggggttccgtgaacacagccccgagaccgggtgtctaccccaccgagaggaggggtctcgtcggggggcctcgctgagcctccgtgtcccacccggagccagggtgggcaccctcccgtccccgcagccccggaagatctggcaggtggcatgacacccacccgggggccctggtcaccggc

SEQ ID NO: 33565 - DNA, 316 bp, Homo sapiens
  chr7:1460672-1460988
  hypo
cgtaacacgcatcccatgggcgtcccgtgccaggaattgagggggccacaccctactcaacgcgggggacagtctccgggctccgtggctcacggatggtggagcgtgtcatttcccgcatgtgacacagagtgcggactgtgcagaaggcggctctgtgcctcggaaggcagggtgcagaggcgtgcagcgctcaccacggggatgcggccggctcctgggacgggacctggaacgcggatgtggccggatgtttagtgggtgccgtgcacggtgtctgacacatcagatgtgatgtatacctcgcacgaaagac

SEQ ID NO: 33566 - DNA, 576 bp, Homo sapiens; identical to SEQ ID NO: 30306
  chr7:1473784-1474360
  hypo

SEQ ID NO: 33567 - DNA, 267 bp, Homo sapiens; identical to SEQ ID NO: 30307
  chr7:1475105-1475372
  hypo

SEQ ID NO: 33568 - DNA, 882 bp, Homo sapiens; identical to SEQ ID NO: 30308
  chr7:1476273-1477155
  hypo

SEQ ID NO: 33569 - DNA, 883 bp, Homo sapiens; identical to SEQ ID NO: 30309
  chr7:1477156-1478039
  hypo

SEQ ID NO: 33570 - DNA, 524 bp, Homo sapiens; identical to SEQ ID NO: 30310
  chr7:1479741-1480265
  hypo

SEQ ID NO: 33571 - DNA, 370 bp, Homo sapiens; identical to SEQ ID NO: 30311
  chr7:150889157-150889527
  hypo

SEQ ID NO: 33572 - DNA, 481 bp, Homo sapiens
  chr7:154541944-154542425
  hypo
cgtagatgaacaccctcgctctccagaagacaagaagcgggagtcgcagcctattgaagtgtagacatgatgtctacacagccaccctgtgtcctgcaagagcccaggctcagagcgtgtgcaccgtgagggccgcctgtgccggagcaggccgcttctccgtagcaaccacatcccacagtgtggaggttcccagcggcgggtagtgcggaaaacagggaaggcaggaaagaaacttagccaggcactgagtgcgtgggaaggcaaaacactcttttctcctcccacggcgggggcgctccctgggcgatgctcacggagagtgggagggcgtcccgcaccgggcagagctgaagggtggcgggggtcggcttcctcctctctgcctcttcccttccgccacgcttcctacccacaccagccagtctccagtaacagatatagaatgccttcatttggaacacggagagacaagcgtgcc

SEQ ID NO: 33573 - DNA, 731 bp, Homo sapiens
  chr7:155623733-155624464
  hypo
cgaagcgcctctgcgttccgggcaccaagggagagtgagttctgaccgggttgtcggggggtcagggactctgccctcagccactttggctgctggttctgccgagccactgcccgaacagcaccccggatgcacccgaggaggtgaggctctgcggaccgggtgccctgtgagtgacaggggagaggcccctgaggtttgcacagtgcctgtcacttctcaaagcacctccttcgttctggcaatttagtgagggaggctgggcagccggggctgtccattttatagaggaggacaccaagcctcagggagggagagggaagccggtggagccgggcagaagcctgtggagctgggtagaggccggcgggtttcccagcagcggtcttctgcatcttctggctgagtcctccgctgtcaggagaccccggcctgggccaggaggtccgattctgggatgcgaacgtggtggggctgttgccatagataccgatgtggtcaccagcctgaaacccttgagccacggagagatcagacggtggtccccactcctcagcctggagcctggcagagacgctcaaggaagagggtgggctgaccgcgcacgcctctcctttcttcatatcctgcgcggctcgggcgctgtgcaggaggcctgtgctcagcgaggagagagacagagagtgcagtgggaggagcgcggggtcggggggctctgcttcccacggtgc

SEQ ID NO: 33574 - DNA, 593 bp, Homo sapiens; identical to SEQ ID NO: 30315
  chr7:155679115-155679708
  hypo

SEQ ID NO: 33575 - DNA, 270 bp, Homo sapiens; identical to SEQ ID NO: 30316
  chr7:155913340-155913610
  hypo

SEQ ID NO: 33576 - DNA, 288 bp, Homo sapiens; identical to SEQ ID NO: 30317
  chr7:155916075-155916363
  hypo

SEQ ID NO: 33577 - DNA, 315 bp, Homo sapiens; identical to SEQ ID NO: 30318
  chr7:157410957-157411272
  hypo

SEQ ID NO: 33578 - DNA, 187 bp, Homo sapiens
  chr7:157464624-157464811
  hypo
cgctgtaccccaagaaggggacgggtggggcagcagccctggaggaaaacccgtgagcgagtcgtggagggagtgtgagggtttttggggagtgaactttgcagagggtgctgggagcagccggcccgaggacaccgctgactggggtacaggggccacgggtcgcacgtggggtgtcagctctgcc

SEQ ID NO: 33579 - DNA, 232 bp, Homo sapiens; identical to SEQ ID NO: 30320
  chr7:157507378-157507610
  hypo

SEQ ID NO: 33580 - DNA, 161 bp, Homo sapiens
  chr7:157511449-157511610
  hypo
cggggtgagtctcagcacgtccaggcgtccgcggtgacactgcagccactcttggtttctcagctgccgcaatcggtccttccagtgtccgacctctggggccctcagacccccaaacccaccttgtcgctgtggcctctccgcctcctgcaggtggcagc

SEQ ID NO: 33581 - DNA, 408 bp, Homo sapiens; identical to SEQ ID NO: 30322
  chr7:157513007-157513415
  hypo

SEQ ID NO: 33582 - DNA, 250 bp, Homo sapiens; identical to SEQ ID NO: 30323
  chr7:157589680-157589930
  hypo

SEQ ID NO: 33583 - DNA, 297 bp, Homo sapiens
  chr7:157607768-157608065
  hypo
cgcgggaggcagtggagacgtggaagcaggctccggctgctgggcctgcatgaccggtttccctgcagaagattctgcgcccttcagcctcaccgtcctcacctggcctgggtgctgctgtgggcaggcgctgggcacgctgggaagagcagggccagccgtttgcaggacgggaggctgaggctgtgtgcacctcctgagggctgggccacaggtgggctcaggcctgcgccctcccatggccgtggcctcttcctcggtcctttgccctccagggtgccaggcctaggcctccgc

SEQ ID NO: 33584 - DNA, 203 bp, Homo sapiens; identical to SEQ ID NO: 30325
  chr7:157642963-157643166
  hypo

SEQ ID NO: 33585 - DNA, 273 bp, Homo sapiens; identical to SEQ ID NO: 30326
  chr7:157738113-157738386
  hypo

SEQ ID NO: 33586 - DNA, 145 bp, Homo sapiens; identical to SEQ ID NO: 30327
  chr7:157744287-157744432
  hypo

SEQ ID NO: 33587 - DNA, 196 bp, Homo sapiens
  chr7:157934555-157934751
  hypo
cggacagagtcctttaaagtcaatctgtacacgaaatgtgtgacggacacgggcgttctgatcggagcgtgctgggcgttcactgccaccgatgtcccctgctggggtggccgagtgccccgctctggccgacgttgaggcctctgaattgttcggcagacagtggcggcttctttaccttcgggttgaagtgtcc

SEQ ID NO: 33588 - DNA, 264 bp, Homo sapiens; identical to SEQ ID NO: 30330
  chr7:158072920-158073184
  hypo

SEQ ID NO: 33589 - DNA, 840 bp, Homo sapiens
  chr7:1598548-1599388
  hypo
cggctgagccagatgcgccagctcgggaaccgtggaccaagtgtactggtctggggatgtcaggagcagggcctggtccccagggaggggcagtcgggaggttgaccgctctgccacctgctcacagggctcgccggctgatcgaggcctcacccggtgctggtgtcacagcctctgcgcccggtcacaggaggcggcagggccggctgggcctgatttttctggcgggggcgggacactgaccaagcccattgcaggacagacctgtctgcccagatccaggcgacggggccctctgaccattgttcactgcgtccaggtgcccagagctgtggggaggctgagaagccgcccagccagtcccacaccctggccctggcacagccacctcctcctgctctcatgagaaacccggctgagggcccatgagctgttgcctggttccaggccggctgccctgctagtgcccaccccgaccccctgcctgcccgtctctctgcagatgcggacaggcatggtgtacccccctgcctgcctccttcactgctgggtggaactcggggcgcccaggagccgcctcctcagggctggctcatttgatgtcccaggctgagctgcacactagggggatgaggtgaccggtgggcacccatctcagacacccggcttcccaggtcccgcggccctcccctgggggccctggccagcagttcaccaaggcagcagccccgggtgtgagcagggggtgacagggatggggctccacatcctcccggctctgcttctgggattcccccggctcctgtccacgggcacggcctcctgagagccgcgtggggc

SEQ ID NO: 33590 - DNA, 154 bp, Homo sapiens; identical to SEQ ID NO: 30331
  chr7:168483-168637
  hypo

SEQ ID NO: 33591 - DNA, 255 bp, Homo sapiens; identical to SEQ ID NO: 30332
  chr7:170034-170289
  hypo

SEQ ID NO: 33592 - DNA, 465 bp, Homo sapiens
  chr7:173194-173659
  hypo
cggaggacaggacccgccccgcgctgccagtgccgaagcttgggttctctgaggactgcgagggggtctcagcactgtgtccacagatggggcagggacctccgcagggaaccttctctcggctgggccagcccaccccaggggctgtagacgagggagttaatgaacacgggatgggttgagccgcctggtttgcccacagaggggcgaggaagggagtggggagtctgctgtgagcggagagaggacagcctgaggcctcaggaacgctggctgcctgcctgcagcgggagctaacggggcgtctgtcgggaaggggcacggccacaggatttaggggcagtttggacacactggtccggtgagcttgatttcagattccgggatctggtttcggagtggagttgtggactctccaggacccatcgctgaggagcaggaggttctccaggggccatggggccc

SEQ ID NO: 33593 - DNA, 736 bp, Homo sapiens; identical to SEQ ID NO: 30335
  chr7:286020-286756
  hypo

SEQ ID NO: 33594 - DNA, 1068 bp, Homo sapiens
  chr7:287728-288796
  hypo
cgagccgtctgacaggtggagggggagggtgctccacgcagaggcgtggtcgggccttgggtcccgggtcggccctggcagacggcccacgtccctccacacctggtcacctcgcctcacaggacaatcaccacgtcctccgtcagcaagaaaagctctcgccctgcattctccatttaattaagcgagtgggagcctgtggtgtggttcagaaggagttccattaaaagtggctcctttaatttaattttgttttaaatttagccctggaatgagggcaggctttagctatgcaggcagttggtgctgtgtgcccatcagtgaggcatcgccagccccagtccctcaggggcctctcccacccccatcaccgtggggccaggcagagccaccggacctagggctgggtttattcggaggcagggacacagaggcccgctgagccgcacagagcacagaccctcccctgccccgttcttatttggaggcagggacacagaggcccgctgagccgcacagagcacagaccattccccgcccgtttcttgccaggatcctggacttccgccgggtccctcccgtggccggcaggatggtcaacatgaccaaggagatccgggacgtcacacgggacaagaagctctggaggaccttcttcatctctccaggtagcctggcacgggggcccgcattcatctctccaggtagcctggcacgggggcccgcattcatctctccaggtagcctggcacggggagcccacattcatctcgccaggtagcctggcacgggggcccacattcacctctccaggtagcctggcacggggggccgcattcatctcttcaggtagcctggcacggggagcccacattcatctcgccaggtagcctggcacgggggcccacattcacctctccaggtagcctggcacgggggcccgcattcatctctccaggtagcctggcatggggagcccacattcacctccccaggtagcctggcacggggagaccacattcatctcgccaggtagcctggcacaggggcccgcattcatctctccac

SEQ ID NO: 33595 - DNA, 217 bp, Homo sapiens; identical to SEQ ID NO: 30338
  chr7:290557-290774
  hypo

SEQ ID NO: 33596 - DNA, 175 bp, Homo sapiens; identical to SEQ ID NO: 30339
  chr7:30972844-30973019
  hypo

SEQ ID NO: 33597 - DNA, 345 bp, Homo sapiens; identical to SEQ ID NO: 30340
  chr7:378637-378982
  hypo

SEQ ID NO: 33598 - DNA, 234 bp, Homo sapiens; identical to SEQ ID NO: 30341
  chr7:380956-381190
  hypo

SEQ ID NO: 33599 - DNA, 367 bp, Homo sapiens; identical to SEQ ID NO: 30342
  chr7:4153573-4153940
  hypo

SEQ ID NO: 33600 - DNA, 304 bp, Homo sapiens; identical to SEQ ID NO: 30343
  chr7:4349444-4349748
  hypo

SEQ ID NO: 33601 - DNA, 365 bp, Homo sapiens; identical to SEQ ID NO: 30344
  chr7:455747-456112
  hypo

SEQ ID NO: 33602 - DNA, 183 bp, Homo sapiens; identical to SEQ ID NO: 30345
  chr7:462339-462522
  hypo

SEQ ID NO: 33603 - DNA, 561 bp, Homo sapiens; identical to SEQ ID NO: 30346
  chr7:462752-463313
  hypo

SEQ ID NO: 33604 - DNA, 824 bp, Homo sapiens
  chr7:4855734-4856558
  hypo
cgctcagggagcaggaggccaaaaagggcagagccgcctccaggagctggcgagggaggcgccagcagccgtcatgtccaggaatgtgagcccccgacccctcaaccctgcacgaggccctcacccctgtcgaggagctggttgagaagcagtgtcccggagaagaagaagaggtaggcgagcatctgcgaggccacctcggggtgcacctgcagctgccgcaggaggtccagggctgcctggtacacagacaccacgcggcgcagctcctcgggcagttcgggggccgaggaccagctctcacggcgctccgtctggaatggcgggcactccaggagtgccgggaggcagatgtacagggactggcgggggcaagaggagaacagcaaccagcatttccaggagcgctggcggccgaacggggggcctgacccagcgagctccccacccacgcactgcttgcagggacccggcctcggtagcttcctgctggacaggccatggctttgcaaatgtccagtgtgggatgtggggacacaggagctgcctcctggggctgctgggagcagaggtggggtgcagggggctcagggggatctgctgtcggaggcacagatgaactcagaaggcgcacagaggtggcgcctggggggatgggctccaacaaaggggctccaacaaaatgacgggagagtcaccactcccccagaaagtggctcaccgcacccccgatgcaccccaagctggccagggccacagggggaccggcggcagcacctctggcacccgtgggtccagggtgacaacagggccatgtcccttgc

SEQ ID NO: 33605 - DNA, 452 bp, Homo sapiens
  chr7:4857860-4858312
  hypo
cggcgcctggtgagccaggccaacactcaccccagcgcgggcctcccaggagcacaggcccccagctgcccctctgccgggcagactgcaccggaggccggcccactcatggccaggacaatggtgcgccaagcccttggacaagcccctgtcactttcgctctgccgctcctggtgctcctccttcaggggcttggggctgcctggcccccacccaccaagcccgctccccaagaacctgtgaagccccccagtgcctgccccacagggtcacatctgggaaccaggcagggcagctggagggaccccggggtccggggcagtaaggggctctcgggctctgccaacctcaacactgtgcccagaagcctccaggcctgtggagacacacaaggtggcccgacggcgcccacagcgagtgccggcaaaggatattcacagccacggcaggc

SEQ ID NO: 33606 - DNA, 258 bp, Homo sapiens; identical to SEQ ID NO: 30350
  chr7:4913172-4913430
  hypo

SEQ ID NO: 33607 - DNA, 527 bp, Homo sapiens; identical to SEQ ID NO: 30351
  chr7:4917102-4917629
  hypo

SEQ ID NO: 33608 - DNA, 590 bp, Homo sapiens; identical to SEQ ID NO: 30352
  chr7:50660402-50660992
  hypo

SEQ ID NO: 33609 - DNA, 178 bp, Homo sapiens; identical to SEQ ID NO: 30353
  chr7:50687526-50687704
  hypo

SEQ ID NO: 33610 - DNA, 177 bp, Homo sapiens; identical to SEQ ID NO: 30354
  chr7:50715837-50716014
  hypo

SEQ ID NO: 33611 - DNA, 88 bp, Homo sapiens; identical to SEQ ID NO: 30355
  chr7:50823307-50823395
  hypo

SEQ ID NO: 33612 - DNA, 332 bp, Homo sapiens; identical to SEQ ID NO: 30356
  chr7:51092672-51093004
  hypo

SEQ ID NO: 33613 - DNA, 367 bp, Homo sapiens; identical to SEQ ID NO: 30357
  chr7:531216-531583
  hypo

SEQ ID NO: 33614 - DNA, 265 bp, Homo sapiens; identical to SEQ ID NO: 30358
  chr7:540536-540801
  hypo

SEQ ID NO: 33615 - DNA, 347 bp, Homo sapiens
  chr7:64345105-64345452
  hypo
cggattcttgcacacagactctttcgggaatggagtccaaagagaagttcccagcgcccacctcacattctcgaatcgccttttcctccagcgggacccgactaatgagacggcccgaggatgccctatggtagttacttttaggcttccacagtgattgtcgcaggcagcattttccctagactaggccggctctgccttcccattttcctctgctcaggcaggctgacagccctgacagccctgacagcctggccccagcacctgcctcgcggattcgcatgcgccagtcgcgggacacctgtcgcgagcggtgagccttggctcgcgtgtcagtgtatgccacc

SEQ ID NO: 33616 - DNA, 190 bp, Homo sapiens; identical to SEQ ID NO: 30361
  chr7:84219-84409
  hypo

SEQ ID NO: 33617 - DNA, 378 bp, Homo sapiens; identical to SEQ ID NO: 30362
  chr8:142349773-142350151
  hypo

SEQ ID NO: 33618 - DNA, 165 bp, Homo sapiens; identical to SEQ ID NO: 30363
  chr8:142590914-142591079
  hypo

SEQ ID NO: 33619 - DNA, 454 bp, Homo sapiens
  chr8:142630171-142630625
  hypo
cgagggtggtgggcgccccggagcgctggtggggattgggcaaagacgtcaacaccagggctgtggaaggaggcgaggggccttcaggtgccgagggtggtgcgcaccccgggatgctggtggggattgggcaaagacgtcaacaccagggctgtggaaggaggcgagggccttcaggtgccgagggtggtgggcgccccggagcgctggtggggattgggcaaagacgtcaacaccagggctgtggaaggaggcgaggggccttcaggtgccgagggtggtgggcgccccggagcgctggtggggattgggcaaagacgtcaacaccagggctgtggaaggaggcgaggggccttcaggtgccgagggtggtgcgcacccagggatgctggtggggattgggcaaagacgtcaactccagggctgtggaaggaggcgagggccttcaggtgcc

SEQ ID NO: 33620 - DNA, 333 bp, Homo sapiens
  chr8:142880985-142881318
  hypo
cggccacccctccttgcctggccatcctccttgccatgtcacccctcaacgccaacccgtgcatgtgggggtgcatgaccagctgacatgggagtgtgggtcagccccagggccaagggggaagtgggtgagccaagatcccggagcatgacaagggccctggcagctgattggcaggggagtgcgctgggcaggccgtggttctcactcttcactgcggctggagggtctgggtgggaaggtgggtacagggagcaggcatgtcggactatgaatgcggagtgggaaacacagaacgactcgttgtggggagactagggatggacggggtcc

SEQ ID NO: 33621 - DNA, 355 bp, Homo sapiens
  chr8:143054784-143055139
  hypo
cgtgtgcctgggctcacggtgcctgcgctcacgggtgcctgccctcacggtgcctgcgttcacgggtgcctgccctcacgggtgcctgccctcacggtgcctgcgctcacgggtgcctgcgctcacggtgcctgggctcacggtgcctgcgctcacgggtgcctgcgctcacggtgcctgcgctcacgggtgcctgcgctcacggtgcctgggctcacggtgcctgcgctcacgggtgcctgccctcacgagcctgcgctcacgggtgcctgtgcttacaggtgcgcaccaccccccacaccctctaggtggcttctcagcttttaatctcagagggtgatgcctgctggcaccc

SEQ ID NO: 33622 - DNA, 241 bp, Homo sapiens; identical to SEQ ID NO: 30369
  chr8:143234575-143234816
  hypo

SEQ ID NO: 33623 - DNA, 311 bp, Homo sapiens; identical to SEQ ID NO: 30370
  chr8:143614687-143614998
  hypo

SEQ ID NO: 33624 - DNA, 283 bp, Homo sapiens
  chr8:143660391-143660674
  hypo
cgtcagagagagcctcaaaccgtcagcgttggccaccgccttgcactgcgcccatgcttggagccccgagccccaggccaggccctgcccgcccgctcagccctgctcgccatgctcccgcccttgctgctggggcggccggcagggagcccacctgaggcgcagagggaggccattgccgggcgctgccaccatgaggagtcccgagtcctggggagacaggtcctgtgcagggaacagagggacgtgtcactcacgcctgccggggccagagctcgactcc

SEQ ID NO: 33625 - DNA, 260 bp, Homo sapiens; identical to SEQ ID NO: 30372
  chr8:143662794-143663054
  hypo

SEQ ID NO: 33626 - DNA, 363 bp, Homo sapiens
  chr8:1471350-1471713
  hypo
cgggcccatggtcctgccaggggcccacagcatgaagatgtagctccctcacacacacgttgaatttggatttgcttgtctggcttctgctggggcgcaggatgtggggatggaaggaccaagacacacgacagagaacagcgtcacggggtcaccgtcccacttcccaccccgcgcctcacagcacagacgggggatttgccggcctcacgccggccgagccactgctgacttcacgcagccccagccatgcccccacgcagacacacggagccccaaggcgggccagatctcagggccggatggggctgtggagctgtgccttagacgggggggaaggactccctgccccaggccggcacc

SEQ ID NO: 33627 - DNA, 132 bp, Homo sapiens
  chr8:1783965-1784097
  hypo
cggcctgacgcacacggcatgaaacggtccttcagcctcggtgtctctgggctccctctctgactgaatgcatcatctttttgtttaaaaccacaatccaggccaggcgccgtggctcacacctgtaatccc

SEQ ID NO: 33628 - DNA, 494 bp, Homo sapiens; identical to SEQ ID NO: 30376
  chr8:1797609-1798103
  hypo

SEQ ID NO: 33629 - DNA, 329 bp, Homo sapiens; identical to SEQ ID NO: 30377
  chr8:1885046-1885375
  hypo

SEQ ID NO: 33630 - DNA, 272 bp, Homo sapiens
  chr8:41643317-41643589
  hypo
cgtccattgctcctcggtgctttccagaccctttaaacaccctggcggagccttgctcggcccttctgggtccacttggtagccgagggtccgagctgacctcatgctttccgcactgtcgggcagcgttgtcatcagcggtactctccgcctgggaaccctcccgcgtctcttctccctgtactctggagtgccccttacagccaacttaaaggcacctccctgcagatcgtcccttgattccctccgatgcagttttctctcctcctccc

SEQ ID NO: 33631 - DNA, 207 bp, Homo sapiens; identical to SEQ ID NO: 30379
  chr8:49241546-49241753
  hypo

SEQ ID NO: 33632 - DNA, 360 bp, Homo sapiens
  chr8:49334914-49335274
  hypo
cggagtctgctctgagacccagggaccgtgcgttctgcagggaagctggcgcatgcccttaggttctgcagctgtgtgggctgcgctgccttcgggggcacgtgacgccacgtgggaagtgctgtgaggctggtgcggagagcaaacctcctgcaactcttagcgagtaaatgggcacatccacactggagttgaacacaggggcgccggccacgggttcaggctagcccgggcgtctggcttccctgccaggatggctgcctcgttactgagatggaacacacaacacagccgcgtgggcagtgggaggctgcgaggttagcctggcaaagctgtgtccaaggaggcaaagattggtcc

SEQ ID NO: 33633 - DNA, 201 bp, Homo sapiens; identical to SEQ ID NO: 30381
  chr8:49339738-49339939
  hypo

SEQ ID NO: 33634 - DNA, 560 bp, Homo sapiens
  chr8:49382262-49382822
  hypo
cgggaaaagtagacgtcaatcaggtggaaaagggcagagagagcaccgtccaggcagaagggagagcgtgagcaaggggcccgtgggactgagtgctgcgtgtcgccgcagaggggcatgaggacagtgctgggcacggcggctgtgggcagtgtgggccgacagaatccccaggccaggtcaggtgtcccggccatccatggagaacaaggagtcattacagaggctcggtggcacacggtgaaaatgaggttcttctgggaaattttaggctgcaggatgtgagtggcccacagcagggaaggtctggcaggcagcgagagcttccggactggaccccaagaaggaggtcaggctgggaacacagactcggaggttcccatccacagatggtaccgaggctactgtgtcgggtcagatcttccaggagaccggaggagggacgtggctgcgggaagcaagcccagagccgccagcccgggaccagcgggaggccagggagcaaggccacagcagaggcagccaggaccccaaatatcagaggctcaaatgaagttgac

SEQ ID NO: 33635 - DNA, 474 bp, Homo sapiens
  chr8:49390203-49390677
  hypo
cggacactcactacagcccggtgcctgcggagtattccgaacgcgagatccaaggaaaccacgaaggctcctctgcgggctcccttgcccctctgcggttcagtcgggagacgctcaggcgctgacaacagcctccaggtgccgttccctgcgcatggccccatctttgcgggcagtgtccagtgggcttgtgctcacacctgcgctgggggctccacactagacggccctggactactgaaatagtggacagaagggtctcccgagaatgtccagggtgggcaggcagtgctggggagccagcgggaagggaagggagcctgaggcggagaaacgcccacgcgggagctgctagtgcagccgcaagagcaaggcctgggctgcagtaggggggctgggcagtggcccgcagtgtgcagcaggccctggagaccaggccaagggaagccttggagtgaacctggtcgcaggtgc

SEQ ID NO: 33636 - DNA, 495 bp, Homo sapiens
  chr8:49808471-49808966
  hypo
cgaagcactatatgagactataaatggaattaatttttgtgaaaacaagaaaaggagtccccgaattaattactgctgtaagattgagcttgagaatttgtcttacaaaatcttttaataatgtattattctactcacaaaacagatattggttttgtgcctagtatgttccctgaggtgtacagggaacctcaaggagctcccagactatgggagtgacccctgcggagctgacaagccaatgctggagaagtgcacgggcaggctcaggcgcagccactcaatgggcctgtctgtgtcgggggcaggggcacagagaggggcaggtgagtcgaagctgattgggtgaagaaaagacagtgaaaagacggtgagaccaaaggcacagagcgggtttcccgccccagctaccacgctggtctgcagagcggtaagtctaaactggggagaggtcagaggcagcacaggggcctgtggggcaaccgcaggatccgc

SEQ ID NO: 33637 - DNA, 460 bp, Homo sapiens
  chr8:56364032-56364492
  hypo
cgagtctgcctggaactggcctggagaaggtgcgttctgggccttaaagagtccgactacacctatgccgtacaggcccccagaatgcagcagtactgccttggaccgccggatgcgccagcagacaacggtgaagcggttctggcggtagcagtaggacacgcgctgcagggcgttgtcctggacactctggggcacgatcagcagccccgggtacctgcggtagatggcatgcatgcggttgaccagagaaatgcggaaggattcagacttggcccggctcaggcggctgctcagggggcccaggccaaggcactgatagtcgcggcagcaagccctttccaccaggaggctgctcatggtcatgccgtccgagggcttcaaggctgaggacggggtcagtgtgctgggctccagctcttccgacactgagatctcctcctcctggtcctcagagggc

SEQ ID NO: 33638 - DNA, 166 bp, Homo sapiens; identical to SEQ ID NO: 30389
  chr8:8651879-8652045
  hypo

SEQ ID NO: 33639 - DNA, 110 bp, Homo sapiens; identical to SEQ ID NO: 30390
  chr8:8680452-8680562
  hypo

SEQ ID NO: 33640 - DNA, 59 bp, Homo sapiens; identical to SEQ ID NO: 30391
  chr8:8680894-8680953
  hypo

SEQ ID NO: 33641 - DNA, 171 bp, Homo sapiens
  chr8:8681197-8681368
  hypo
cgtcttcagtctttgacacaggtaatgaacccacaggtcaccgagaagagcatcacctgcgaaatttcaagacccacggtggctgtgctccatctctgatgtagcacagaagatagtgggggctgagaaaagaaagaatctcgcctctcagagatgtgcctgtctccatgc

SEQ ID NO: 33642 - DNA, 507 bp, Homo sapiens
  chr8:972329-972836
  hypo
cggtcccgtgccgaggtagacactctaaacaccacccaccctccctgggagtggacagtcccgtgccaaggtagacgctccaaacagcacccaccctccctgggagtggacggtcccgtgccaaggtagacactccagccgccatccatcctccctgggattggacggtcccatgccgaggtagacactccagccgccacccatcctccctgggagtggacggtcacgtgccgaggtagacactccagccgccacccatcctccctgggagtggacactcccgtgcttaggtagatgctccaaacagcacccaccctccctgggagtggacggtcccgtgccgaggtagacgctccaaacagcacccaccctccctgggggtggacagtaccgtgccgaggtagatgctccaaccacaatccaccctccctgggagtggacagtcccatgccgaggtagacactccagccgccacccatcccccccgggagtggatggttccgtgcc

SEQ ID NO: 33643 - DNA, 148 bp, Homo sapiens
  chr8:977895-978043
  hypo
cgcccgttattctccaggtggggtgctcggtgcctgttattctccaggtgcggtgccaggcgctcgttattctctaggtggggtgtcaggcgcccattattctccaggagcagtgccaggtgccggttactctccaggtagggtgctc

SEQ ID NO: 33644 - DNA, 107 bp, Homo sapiens; identical to SEQ ID NO: 30394
  chr9:100299592-100299699
  hypo

SEQ ID NO: 33645 - DNA, 181 bp, Homo sapiens; identical to SEQ ID NO: 30395
  chr9:109689799-109689980
  hypo

SEQ ID NO: 33646 - DNA, 250 bp, Homo sapiens; identical to SEQ ID NO: 30396
  chr9:109690731-109690981
  hypo

SEQ ID NO: 33647 - DNA, 179 bp, Homo sapiens; identical to SEQ ID NO: 30397
  chr9:112040343-112040522
  hypo

SEQ ID NO: 33648 - DNA, 149 bp, Homo sapiens; identical to SEQ ID NO: 30398
  chr9:116708859-116709008
  hypo

SEQ ID NO: 33649 - DNA, 127 bp, Homo sapiens; identical to SEQ ID NO: 30399
  chr9:116728180-116728307
  hypo

SEQ ID NO: 33650 - DNA, 121 bp, Homo sapiens; identical to SEQ ID NO: 30400
  chr9:116749805-116749926
  hypo

SEQ ID NO: 33651 - DNA, 280 bp, Homo sapiens; identical to SEQ ID NO: 30401
  chr9:116750660-116750940
  hypo

SEQ ID NO: 33652 - DNA, 134 bp, Homo sapiens; identical to SEQ ID NO: 30402
  chr9:116761540-116761674
  hypo

SEQ ID NO: 33653 - DNA, 244 bp, Homo sapiens; identical to SEQ ID NO: 30403
  chr9:116770596-116770840
  hypo

SEQ ID NO: 33654 - DNA, 299 bp, Homo sapiens; identical to SEQ ID NO: 30404
  chr9:116790949-116791248
  hypo

SEQ ID NO: 33655 - DNA, 113 bp, Homo sapiens; identical to SEQ ID NO: 30405
  chr9:116796590-116796703
  hypo

SEQ ID NO: 33656 - DNA, 1421 bp, Homo sapiens; identical to SEQ ID NO: 30406
  chr9:116810967-116812388
  hypo

SEQ ID NO: 33657 - DNA, 390 bp, Homo sapiens; identical to SEQ ID NO: 30407
  chr9:116813618-116814008
  hypo

SEQ ID NO: 33658 - DNA, 216 bp, Homo sapiens; identical to SEQ ID NO: 30408
  chr9:116857267-116857483
  hypo

SEQ ID NO: 33659 - DNA, 404 bp, Homo sapiens; identical to SEQ ID NO: 30409
  chr9:116971577-116971981
  hypo

SEQ ID NO: 33660 - DNA, 124 bp, Homo sapiens; identical to SEQ ID NO: 30410
  chr9:117045899-117046023
  hypo

SEQ ID NO: 33661 - DNA, 250 bp, Homo sapiens; identical to SEQ ID NO: 30411
  chr9:124289769-124290019
  hypo

SEQ ID NO: 33662 - DNA, 380 bp, Homo sapiens; identical to SEQ ID NO: 30412
  chr9:129455261-129455641
  hypo

SEQ ID NO: 33663 - DNA, 275 bp, Homo sapiens; identical to SEQ ID NO: 30413
  chr9:129458627-129458902
  hypo

SEQ ID NO: 33664 - DNA, 233 bp, Homo sapiens; identical to SEQ ID NO: 30414
  chr9:130907031-130907264
  hypo

SEQ ID NO: 33665 - DNA, 294 bp, Homo sapiens; identical to SEQ ID NO: 30415
  chr9:132501760-132502054
  hypo

SEQ ID NO: 33666 - DNA, 113 bp, Homo sapiens; identical to SEQ ID NO: 30416
  chr9:133300407-133300520
  hypo

SEQ ID NO: 33667 - DNA, 543 bp, Homo sapiens
  chr9:133799052-133799595
  hypo
cggaatgcccgggttcaggtacacagcctcacggtccccggtgcctgccctgccgcccgcccagcctgggacactcaccgtccagccgccgccgtccgtgcgcatgtcacagtacacctggaagccggccgggtagtgggtgggaaagacagagtagacgccatcgtcctgctgtccgcttaggaggacgtccagacagtctcggggccgggagcctgagggaggcaaggctgtcagggtggctgcggccccagcacgttcctgcccagccccctggccaaactgtctgtccatcgataatgcatgtggggtcccatggggttgagagagcactggccttggagtccgaccttggctctgccactccctgctgtggctgggtgagagaatcaccctctctgggacttactctcctcatctggagaatggaccgagagggcttcagcgcaggccacatggaagtagggtcgggccctggagtctcatggctggggaaccctcaccccaacttccccgctccccagagctgggacccgaggcacc

SEQ ID NO: 33668 - DNA, 206 bp, Homo sapiens
  chr9:135865057-135865263
  hypo
cgcaggggatcccggccgggtccagtcctgagcctgcacctgaccccccggggcctcatttcctccggcaggagcgcagcttcgagtgccgcatgtgcggcaaggccttcaagcgctcgtccacgctgtccacccacctgctcatccactcagacacgcggccctacccctgccagttctgcggcaagcgtttccaccagaagtcc

SEQ ID NO: 33669 - DNA, 381 bp, Homo sapiens; identical to SEQ ID NO: 30420
  chr9:136372653-136373034
  hypo

SEQ ID NO: 33670 - DNA, 127 bp, Homo sapiens
  chr9:136375592-136375719
  hypo
cgtgaacctccgcacctggccggacccatgtgactattcgaacttaaattatttaaaatgaggataacatttaaagatccaggtttggggttgtaccagctacgttgcagatgcccaggcaccaggc

SEQ ID NO: 33671 - DNA, 321 bp, Homo sapiens; identical to SEQ ID NO: 30421
  chr9:136380597-136380918
  hypo

SEQ ID NO: 33672 - DNA, 219 bp, Homo sapiens
  chr9:136383917-136384136
  hypo
cgaggcaggaggagtcagacaggggagaggtgacgggcctcctgggtccccgttcatcgaggctcgcgcagtacgcacccactttgccgcgatgatgaggatggctgtgccgatggggcccgagtacaccccgtagccccatcggtcatggtagatccgcacagcaatggtcaggacgccgaacatcacaaatgttgacctcttgggttcgtcgaagtc

SEQ ID NO: 33673 - DNA, 574 bp, Homo sapiens; identical to SEQ ID NO: 30423
  chr9:136385211-136385785
  hypo

SEQ ID NO: 33674 - DNA, 146 bp, Homo sapiens; identical to SEQ ID NO: 30424
  chr9:136393635-136393781
  hypo

SEQ ID NO: 33675 - DNA, 313 bp, Homo sapiens; identical to SEQ ID NO: 30425
  chr9:136397028-136397341
  hypo

SEQ ID NO: 33676 - DNA, 643 bp, Homo sapiens; identical to SEQ ID NO: 30426
  chr9:136402186-136402829
  hypo

SEQ ID NO: 33677 - DNA, 188 bp, Homo sapiens; identical to SEQ ID NO: 30427
  chr9:136508536-136508724
  hypo

SEQ ID NO: 33678 - DNA, 395 bp, Homo sapiens
  chr9:137623301-137623696
  hypo
cgtttgcgaggcaaccctgcgccttcctctccctctgcagccagctccgcctccaggggaaggtgcggatgacttggagggggagttcactgaggaaacgatccggaaccttgacgagaactactacgacccctactacgaccccaccagctccccgtcggagatcgggccgggaatgccggcgaaccaggataccatctatgaaggggtgagagggtgcaggcccccgttccgggtggggttggggggctggtggggcatcatgggggctcctgcccaagagcctcctcaggggtgggcctctacgggcagctcaagtgttacaccctattcccaaaactttatttttaaagagacctcggtgcctcgaatttgctctgaataacgtgtgtatc

SEQ ID NO: 33679 - DNA, 473 bp, Homo sapiens; identical to SEQ ID NO: 30430
  chr9:137642188-137642661
  hypo

SEQ ID NO: 33680 - DNA, 305 bp, Homo sapiens; identical to SEQ ID NO: 30431
  chr9:137645508-137645813
  hypo

SEQ ID NO: 33681 - DNA, 163 bp, Homo sapiens; identical to SEQ ID NO: 30432
  chr9:137646079-137646242
  hypo

SEQ ID NO: 33682 - DNA, 191 bp, Homo sapiens; identical to SEQ ID NO: 30433
  chr9:137648346-137648537
  hypo

SEQ ID NO: 33683 - DNA, 1004 bp, Homo sapiens; identical to SEQ ID NO: 30434
  chr9:138011461-138012465
  hypo

SEQ ID NO: 33684 - DNA, 335 bp, Homo sapiens; identical to SEQ ID NO: 30435
  chr9:138143914-138144249
  hypo

SEQ ID NO: 33685 - DNA, 172 bp, Homo sapiens; identical to SEQ ID NO: 30436
  chr9:138247974-138248146
  hypo

SEQ ID NO: 33686 - DNA, 219 bp, Homo sapiens
  chr9:138265132-138265351
  hypo
cgagggcggggaaggtgaagtggagtcagcgtcctctgccagtgcctggaatcctgcaacctggaggcagccttgcgatgagctctgctgcaggcctgtggacgcgagccccactgcttcatggtcgcccactccctctgttagagtctgacctgagtccatttgtactggcagcttccacaacacccactgagacccacgccaacgcgccccgcccac

SEQ ID NO: 33687 - DNA, 359 bp, Homo sapiens
  chr9:138662649-138663008
  hypo
cgggacagggcgggtgagcggcggtacctgaagttgccggtgcctctgcccaggtatggcgtgtgcctcatcgggctgaagcgggaggacaacaagagcatcctgctgaacccggggccccggcacatcctggccgcctctgacacctgcttctacatcaacatcaccaaggaggagaactcggccttcatcttcaagcaggaggagaagcggaagaagagggccttctcggggcaggggctgcacgagggtccggcccgcctgcccgtgcacagcatcatcgcctccatgggtgagccgggacaggcgcgcgggactccctgggcctgctcctttggcgggagaccaggcgggacacc

SEQ ID NO: 33688 - DNA, 134 bp, Homo sapiens; identical to SEQ ID NO: 30439
  chr9:138663353-138663487
  hypo

SEQ ID NO: 33689 - DNA, 301 bp, Homo sapiens
  chr9:138670510-138670811
  hypo
cgggccctcggtcccgccaccagcctggacagcctgctgcagtgtggcatcatctatgcggacaacctggtggtggtggacaaggagagcaccatgagcgccgaggaggactacatggcggacgccaagaccatcgtcaacgtgcagaccatgttccggtgcgtccagtgtccggggctcggctctaaaccaccccacagccacgaccacgggccctcgccctgagacccccacagccacgaccacgggccctcgccctgagacccccacagccacgaccacgggccctcgccctgagacc

SEQ ID NO: 33690 - DNA, 313 bp, Homo sapiens
  chr9:138873235-138873548
  hypo
cgcaggttgtcgcaggacacgtgttcgtgtccaggtgcgctgggaagggtcctggcggtgctcctctcagcgcaggtcccgaggagctacaggcatgacgctgccttcagaactcccccgagcctgctccttcccagccttggctcgtgaggctcctccgaggaccacgggccttccacggcgtagccctgccacgaagcctccccatgtcttgcctccagcatcacctggccgagacggacctagggcgtccttctccagcatcatctggccgagacggacctagggcgtccttctccagcatcacctggcc

SEQ ID NO: 33691 - DNA, 538 bp, Homo sapiens; identical to SEQ ID NO: 30443
  chr9:138877542-138878080
  hypo

SEQ ID NO: 33692 - DNA, 485 bp, Homo sapiens; identical to SEQ ID NO: 30444
  chr9:139028149-139028634
  hypo

SEQ ID NO: 33693 - DNA, 93 bp, Homo sapiens; identical to SEQ ID NO: 30445
  chr9:139079359-139079452
  hypo

SEQ ID NO: 33694 - DNA, 653 bp, Homo sapiens; identical to SEQ ID NO: 30446
  chr9:139586531-139587184
  hypo

SEQ ID NO: 33695 - DNA, 781 bp, Homo sapiens; identical to SEQ ID NO: 30447
  chr9:140937919-140938700
  hypo

SEQ ID NO: 33696 - DNA, 259 bp, Homo sapiens; identical to SEQ ID NO: 30448
  chr9:140970069-140970328
  hypo

SEQ ID NO: 33697 - DNA, 200 bp, Homo sapiens; identical to SEQ ID NO: 30449
  chr9:2876419-2876619
  hypo

SEQ ID NO: 33698 - DNA, 842 bp, Homo sapiens
  chr9:2933129-2933971
  hypo
cgctgccatgacgccggctgcagtggggtacaggagtaggtcgcgggtcctcaggtacagactctgaggtgtgcagcccctggagcctgcacctaggagcgcccccggaacctgctgccctgagaactcacccctgggagccccgggaatagggctgggcccagccaccccctggagggagagtagggaggtgaggcacagaaaatgggcagagagggtccccaagacagaactgggcccagggcggtgccgcgcttgcacgcggagcatgggggccgggcccgagacatggaactggggccccgcttcaggggcccagggcaagaagtgggagcggcacccacttcgaggacctgcccagtggcatgaccactgcgcccaacccgccgatggcgccaagttcctgcgcctcaggaagaggctccgtatggggccgcctgaggccgtatccccaggacctgccccacattaaggtgaccgctaagccagacaatcctgatggtgaggccccgtgcctgccatctgctcctggagacgccccccaaccccaggcatggccgtcagccggcgaggcggtactgaggcagggggcgcgtcctggtcattggagagtttcagcccagtgggtgaaccagacacactgttcaagggggcagcggttagtaagcaggacgagggggagccccaggccgcagggagaactcgtgacaacgtcacccctgccccagtcgtaggcccgggcccagtgaggacatgaagcccccgcctcaggctgcaaggaggcgccaccagggctgcaagctccacggagctggtgggacctggagacaggcgagaacccc

SEQ ID NO: 33699 - DNA, 224 bp, Homo sapiens; identical to SEQ ID NO: 30452
  chr9:37928524-37928748
  hypo

SEQ ID NO: 33700 - DNA, 360 bp, Homo sapiens; identical to SEQ ID NO: 30453
  chr9:37950454-37950814
  hypo

SEQ ID NO: 33701 - DNA, 233 bp, Homo sapiens; identical to SEQ ID NO: 30454
  chr9:76089552-76089785
  hypo

SEQ ID NO: 33702 - DNA, 110 bp, Homo sapiens; identical to SEQ ID NO: 30455
  chr9:80475592-80475702
  hypo

SEQ ID NO: 33703 - DNA, 152 bp, Homo sapiens; identical to SEQ ID NO: 30456
  chr9:92227900-92228052
  hypo

SEQ ID NO: 33704 - DNA, 205 bp, Homo sapiens; identical to SEQ ID NO: 30457
  AEKP01149809.1_1-6354:1345-1550
  hypo

SEQ ID NO: 33705 - DNA, 372 bp, Homo sapiens; identical to SEQ ID NO: 30458
  chr1:1024267-1024639
  hypo

SEQ ID NO: 33706 - DNA, 229 bp, Homo sapiens; identical to SEQ ID NO: 30459
  chr1:110170726-110170955
  hypo

SEQ ID NO: 33707 - DNA, 140 bp, Homo sapiens; identical to SEQ ID NO: 30460
  chr1:110527029-110527169
  hyper

SEQ ID NO: 33708 - DNA, 906 bp, Homo sapiens
  chr1:110753530-110754436
  binary
cgccgccgccgcctcgtgttgaccgcaagcagcccgggcccacggagctccggctgccgtgagagtgtcggcctggccccggcagccgctcggaggacttgttgctgctgcgctgccgccgctgcggggaagccggctattccggggcttggtgcggtcttggagccggagggtggcccgtgtgagcgcgagcgccccggaccttcgcggtgcgcgtggactgtgcgcttcctcgtctttggtcggggtgaaggcgggggcgtgtccccggcccagagcgtttgtgtgtcccgtcgtagcgggggaccgcgtgtgtgcttgcttctacttccccgggtcctccctctctgcgcctccctctctccggagcttcctgccctaaccccaaccacctgtgtaccggagaaatccaactcctcccgctccgcgtcctagggggataggcaggggcaagcccaagccgcagagggggccgccaccgcctcctgcctcctcttcgtctcctccccctcccccgtctgacgctgcctcctcgggaagggtgtttggagggcagcggccgccccaagccggagccccgcagcgcttcttatgatcagctcggtgtgtgtctcctcctaccgcgggcgcaagtcggggaacaagcctccgtccaaaacatgtctgaaggaggagatggccaagggcgaggcgtcggagaagatcatcatcaacgtgggcggcacgcgacatgagacctaccgcagcaccctgcgcaccctaccgggaacccgcctcgcctggctggccgaccccgacggcgggggccggcccgagaccgatggcggcggtgtgggtagcagcggcagcagcggcggcgggggctgcgagttcttcttcgacaggcacccgggcgtcttcgcctac

SEQ ID NO: 33709 - DNA, 243 bp, Homo sapiens; identical to SEQ ID NO: 30463
  chr1:110771992-110772235
  hypo

SEQ ID NO: 33710 - DNA, 348 bp, Homo sapiens
  chr1:11131713-11132061
  hypo
cgtcatcccgtgggcctctgctggctccttccccatctcctgctcttctctacccgctctgctcatgcaggcccacttgctgctgctcagcatgcccagtgaactagccccagggcctctgggctcgctgtgctgtggctccagaactcttctctaggtcactgcaggtctcgtcaatgtcgcattcattagactgccttctccaaccaccaacgagacagctacagcacctccagcactccccaccaatctctctgcacagcacctgctgccatctgccaggatagatactgattgcccaccatccctcagcagaagggaagccccacaggggcttcattcatcgcc

SEQ ID NO: 33711 - DNA, 612 bp, Homo sapiens; identical to SEQ ID NO: 30465
  chr1:115212647-115213259
  hyper

SEQ ID NO: 33712 - DNA, 568 bp, Homo sapiens
  chr1:11596382-11596950
  hypo
cgcccgaacgcagcgccagtggcgtacgctggaggccgtgcggcacgtgggcgtggccatcgtctccagtgccctcaccacggtcatcgccacagtgcccctcttcttctgcatcatcgccccatttgccaagttcggcaagattgtggcactcaacacgggcgtgtccatcctctacacgctgaccgtcagcaccgccctgctgggcatcatggcgcccagctctttcactcggacccggacttccttcctcaaggccctgggtgccgtgctgctggcaggggccctggggctgggtgcctgcctcgtgctcctgcagagcggctataagattcccctgcccgcaggggcctccctatagcccgggacgggctctggacacttgcacctttggtcccatgggtgggggacaggagctgcttcccagctcgacttcagctagctgtgtccccaggcctgggcccagggcgccctgcgggccagcgtggaggctgacacccacacagatggtgtggaccatgctgccttgtggagctgggagttggagacagccgccaccccacaggcc

SEQ ID NO: 33713 - DNA, 559 bp, Homo sapiens; identical to SEQ ID NO: 30468
  chr1:1160631-1161190
  hypo

SEQ ID NO: 33714 - DNA, 369 bp, Homo sapiens; identical to SEQ ID NO: 30469
  chr1:1354536-1354905
  hypo

SEQ ID NO: 33715 - DNA, 296 bp, Homo sapiens; identical to SEQ ID NO: 30470
  chr1:15194468-15194764
  hypo

SEQ ID NO: 33716 - DNA, 868 bp, Homo sapiens
  chr1:154474305-154475173
  binary
cgcaatttgccgccgccgcccccgggcttggcccgctccgacacggtcttcaggttcagggggaactccttgaaccacttggccgccatgagggggccccggccggctcggcccaggagcgtcggggccgtggagcaggcgagcgaggaagcccagcccagacacgcagaggcgccaggggtcggggaccactgcattccccgtgactggggcgctggaggccgcggcgaggccccgcgacggctgctccgtgcgcccccggccggccgtcgcccacgcccggcagggtggggttctcacggctcggggcgccgagcgggcgggcgctagcctctgctccggacacggcaggcgacaggcacgacgcgcggggggccccgcccgggctcgtcttcaacgcctgcccggcccgaggacaccgtggctctcggaggcggcgggcgccgggggcttccccctgctctttcctcctgcggtgggagaggccaggcccacggaagccccctgcggcccagcccacgctcccagggaccagagaggaccgagcggaggcggcgggagtatccccggcgcagcgacagacggtggacggacggcgagcggcccatcaactccgcgcgcccctcccctccgcggctggcgcctcccagccccgccacctcctgcccagagctgggggcggcggggtgagcgccatggcagaggcgggtcgggctgcgagctctggagaaaggggcggcggccgcacgtgcggatcggccgcgccccactgagcagagagcccccttctgccgccgacagcccgcgtctgcaccgagccggtctcggccgggcgctgccttcacacgcgcccaggagtgtcacgtgc

SEQ ID NO: 33717 - DNA, 665 bp, Homo sapiens
  chr1:156215233-156215898
  hyper
cgatgcctccagtgctgttcgagagcagtgaggtgtgtcctctcctgtgcctccgccttccccgtccccactggaggggcctgggaacccaccgggagtagcaggagaggccggtgcacaggaaggagttgagtgcggcggcaggcacaaagaactggtgcaggtggccgtgcagccaggaggccggcatggagtaggcggcataggggaaggcgcagcctgcggtgaggtgggggcgtgcagctgaggcctgaggggcgcgcccctatgtcccgcgtcccacccctcgccccgctccgggacgcccagaccccgcgctcccgcgcctgtccggctcacccagactgtagaggctgagcgcgccgtagtcgaggaagtagcagatgtggcgcatgcggggcgacatggagctgaaggtgtgcgcgcagcacgacgcgaaggggtagaggcaggcgggcagcaggaagaccagcagcggccagtggtacggctccgcacggaagccggggccgcccgccagcgccaggagccgccacaggaagtacctgcggcgggcgcgtgctcaggccgccgcggacccccgcgactgccgctgcagcccgtgggcctggacggtccctgcccgcctgggtaccccctctgagctcaaggccgcggcctggggc

SEQ ID NO: 33718 - DNA, 812 bp, Homo sapiens; identical to SEQ ID NO: 31726
  chr1:156646447-156647259
  hyper

SEQ ID NO: 33719 - DNA, 245 bp, Homo sapiens
  chr1:163392854-163393099
  hypo
cgccagtggtattgtggtattgccggcccccacctcccgcacagcggtgcttcacggaattcctgaggcgtactgggagcaccggcacagccgccgccatttcccggcaggggcacatgggagcgacagcgaggcgtcagggccggaagtgtccctgtctttgccctcgttggctactgcggggcaggctgggaccgaggctgtgtgcagaggcctttggtggctgcgcacgttggggaggggac

SEQ ID NO: 33720 - DNA, 132 bp, Homo sapiens; identical to SEQ ID NO: 30477
  chr1:164604732-164604864
  hypo

SEQ ID NO: 33721 - DNA, 517 bp, Homo sapiens; identical to SEQ ID NO: 29590
  chr1:16464269-16464786
  hypo

SEQ ID NO: 33722 - DNA, 205 bp, Homo sapiens; identical to SEQ ID NO: 30479
  chr1:167430238-167430443
  hypo

SEQ ID NO: 33723 - DNA, 263 bp, Homo sapiens; identical to SEQ ID NO: 30480
  chr1:168311912-168312175
  hyper

SEQ ID NO: 33724 - DNA, 725 bp, Homo sapiens
  chr1:1713574-1714299
  binary
cgaggaaagggagctggggggtgggggtaggggacagggcgaggccagagagtagtgggaggggccgaggcggcctttcccgggagcgctcggttcccggccggcccttctattggccccagtcactcaggctcccaggtccggctcgggggggagcggggggccgcgccaggccgctgaagtgtccccgtttcgcgtgggcagagcgcgcctccccacgcatcctgctgagggccagcctctgctaggtgcgtgacacggaggggacagaacggaaaccttgtcctgctcaagtgtggacgtgcgtgccacgtgctagagtaaaattgaggtggggaacctccatccctgggacatggagcacaggggcgaccccgcgccgcttggtcaaaggaggtccgaggccctgcaggaacagcccacagccggagcgagctgcaggtcactccactgcctgtgtccacctgcgacaggtgcgcccgcgcaagcggggcggagccaggtgacccggacacaggaagcgcgccaggggcccccacaccgcggagctgctggcgacaaagggcgctgctcctgcataggccaggctaatgcaatctacaaactagatttctgtgcctacagtttgaaaatgattgcagttcactcagccagtgtggaattatcctcctctttccacactgccttagtcagtgccgctgtccaagtgcacgttgttggcgccc

SEQ ID NO: 33725 - DNA, 193 bp, Homo sapiens; identical to SEQ ID NO: 30483
  chr1:17292904-17293097
  hypo

SEQ ID NO: 33726 - DNA, 44 bp, Homo sapiens; identical to SEQ ID NO: 30484
  chr1:17294741-17294785
  hypo

SEQ ID NO: 33727 - DNA, 72 bp, Homo sapiens
  chr1:173993051-173993123
  hypo
cgttgtttatttttatctcgtcaatatttcaattaaaaatacgttaaaggacagatagatgcagtggctcac

SEQ ID NO: 33728 - DNA, 333 bp, Homo sapiens
  chr1:175048476-175048809
  binary
cgccactgcagcggccacgggaccttctccctggagacctgcagctgccactgcgaagagggcagggagggccccgcctgcgagcggctggcctgccccggggcgtgcagcggccacgggcgttgcgtggacgggcgctgcctgtgccatgagccctacgtgggtgccgactgcggctacccggcctgccctgagaactgcagcggacacggcgagtgcgtgcgcggcgtgtgccagtgccacgaagacttcatgtcggaggactgcagcgagaagcgctgtcccggcgactgcagcggccacggcttctgtgacacgggcgagtgctactgc

SEQ ID NO: 33729 - DNA, 121 bp, Homo sapiens; identical to SEQ ID NO: 30486
  chr1:185014263-185014384
  hyper

SEQ ID NO: 33730 - DNA, 271 bp, Homo sapiens
  chr1:1910184-1910455
  hypo
cgcgtcctgctgagctgttaggtttgtggatttgtcactgcagcgatgggatacgggtgcagtcagggaagcctcagagcaggccgggacacagcaccagcgccctgccgtgggtcccatgtggccaagcggggtgcacacaaagcctcttcttcgtgctgagctgggcgtgggaaggcatcatgtgacgaggctgcacagaacacgtgtgtcgtgctgagctgggcgtgggaaggcgtcacgtgacgaggctgcacagaacacgtgtgtc

SEQ ID NO: 33731 - DNA, 388 bp, Homo sapiens; identical to SEQ ID NO: 30489
  chr1:193149436-193149824
  hypo

SEQ ID NO: 33732 - DNA, 523 bp, Homo sapiens
  chr1:1935038-1935561
  hyper
cgggaaaggcgtttcatatgggacggagttctgcctggggggcgggggtcaaacccttccagctcagccccagggtcaaacgcatccgcccccacacccacctctggctggcctgggtcccaggttctcgggctccggaggcacagacaccccgggctgctcaggcaggcggcggtccttggcgattgccctccgcggcgccggcggcgtggtttggggcgggcagctccatggcaacggaagactccatcgtggccggagggggagcctcgcccgttctgctccccggctggagcgggtggtttggtccgacccaccaccgaccgcgcgggccggggccggggcaaggaggtcgcgggccccgaggcgcggctgaagggccaggccacaggccgcggggcggggacgtctccggggtcccagacagccaggcctggcccagggccaaggcttggaggtgacagacagacttggggggcctggaggagctcagcaccggcgcgttggcccagaggaccggggc

SEQ ID NO: 33733 - DNA, 351 bp, Homo sapiens
  chr1:195732337-195732688
  hypo
cgcggaaagtaggaacgagagagctggagcacgccccctacctctttggcctctgtggttgctggcgtctcactcaggtttttgggtgccactgtgttcccctcatccagaccctggtacttgcagcggaagccgcctgtggtacacctggtccagctgcagcctcgcaaggagctggtgccggtgccggttcctggagctgcatgccctgccgcagcagctggcgtgcctggctgtgtgcagtggccagaccccacgatcacttgctcacaaaccccttgccactctgtacctggctctgtgcctggcttgcctttggcagccgtgggatccagggtggtagcgtgagcc

SEQ ID NO: 33734 - DNA, 135 bp, Homo sapiens; identical to SEQ ID NO: 30491
  chr1:200971336-200971471
  hypo

SEQ ID NO: 33735 - DNA, 114 bp, Homo sapiens
  chr1:201797440-201797554
  hypo
cgtgagccactgcgcctcgccacaccctgcatttttaacacctcactggagcgctcatcctctccacctgctccgctattcaggagcggctctgcaccgtaggccatttcccac

SEQ ID NO: 33736 - DNA, 252 bp, Homo sapiens; identical to SEQ ID NO: 30492
  chr1:202936089-202936341
  hyper

SEQ ID NO: 33737 - DNA, 58 bp, Homo sapiens; identical to SEQ ID NO: 30493
  chr1:203242491-203242549
  hyper

SEQ ID NO: 33738 - DNA, 156 bp, Homo sapiens; identical to SEQ ID NO: 30494
  chr1:204197190-204197346
  hypo

SEQ ID NO: 33739 - DNA, 383 bp, Homo sapiens; identical to SEQ ID NO: 29606
  chr1:204226544-204226927
  hypo

SEQ ID NO: 33740 - DNA, 588 bp, Homo sapiens
  chr1:204530924-204531512
  hypo
cgtgatgaagatgaacatggttcctgttctcctgtctagggaaactggttaagcatgtaaatattagcatagtgaatgttttgttgtgagactacatgctgctatgagaaatacagaagggggacgtaatgtagccaagagcttctgaacaacctccgggaagagatgagctgagattaaaggaaggttaggagttaggagaggaagggaaaagtgccgtagttaggaggaaacatgccaaggtcttgaggtgagaaaacagtggcatctgggaagaactagaaagtttagtgtcgctgaaagcatggacagagagagatgagtgaattgaattgcctgggcatcctgggaacgggaagacaccctgatggcagggaacccgcgcctgcgctttcggggtcaggtccaggtctgccccgccagggctgaagccagctcctggtggggctgcagtgaggcggaagaggtgggatgctgctgcctggcggtgctgcggcggcagacctccacgaggaggtcctgggctaccgcggggtacacaggcgggcggaaaagggggagcagagtcagggggcagttgggaagctc

SEQ ID NO: 33741 - DNA, 280 bp, Homo sapiens
  chr1:20669713-20669993
  hyper
cgacagccaacgcctgcagtgggaggtgagcttcgagctggggacccctggaccggagcggggcggcgcgcaggatgccgacctatggagcgagaccttccaccacctggcggcccgcgccatcatccgcgacttcgagcagctggcggagcgcgagggcgagatcgagcagggtgagcgccacggaactgcgcccctcccgcggacggcctccggaggacagccccgctccacagccgctcccccttccccacccgcccccggtgatcctctcagcccc

SEQ ID NO: 33742 - DNA, 72 bp, Homo sapiens; identical to SEQ ID NO: 30497
  chr1:2103120-2103192
  hypo

SEQ ID NO: 33743 - DNA, 295 bp, Homo sapiens
  chr1:224528627-224528922
  hyper
cgctgggcacctctctgcccaaccctctgcacccagccggcttctcccccaccgacggggagccccgcctggccccatcgcagagacccccagagcggcgggcttttgttggggggttcccgcttgtccctggctcctgccgtctctgtggagcgcggcaccgccttggatccagctccacctcctccccgtgccctccccacgaggcctgggagcgggtcctgcccggctgcgcaagggtgggggtcgcgcagttagctgcctttgggatgcagagcacaggggacccaccgcc

SEQ ID NO: 33744 - DNA, 174 bp, Homo sapiens
  chr1:227750844-227751018
  hypo
cgcaccggaatgcgcctcccctttccacccgccagcattcccaagcacgcctcggcttctgactgttctgtgctttgggaggaaaactcatcttcaggtttttctccaacagaagatgatgatgacgttgtttagacactcaggaacagagattgcagattggcttaagagtgc

SEQ ID NO: 33745 - DNA, 252 bp, Homo sapiens
  chr1:228083414-228083666
  hypo
cggaagtgcaaaggtcagtcctggaggcggcgagttggcagtagcctgagggtaggacttgcgtctccctgtgtacctgccgcctccaagttcagatgcactggccgttctcgctggggccatgagccaggcagcacccggggcccggcaccccaggcctggactcctgggcctctgctcgctccagtttccggcacctttcccaggaggggctctgggtgagtgctggccctgtaggtccctcggcctgtc

SEQ ID NO: 33746 - DNA, 689 bp, Homo sapiens
  chr1:228463167-228463856
  hyper
cgaggcacaagggcctggcgtcttgttcagagcaggggagctggaggtgggagcggggcttaaggaagcttcctggtttcctcgcttaaagtcgcacccgggagggtgcgcagctgcggcccgcgtgtggccagggccgcgctgtttggattgggatcccggggcgcggtgccggcagctctgcctgggcccggctcagggcaggcgccggggctgtgcgggccctctgtaccttggcttgtccgtggaggagggcgagggccgccgtgacctcccctctcctgcgaccccagaggcgcctgtgctgttcaaaaagaagctggagccgcagacggtggaggagcggagctcggtgaccctggaggtggagctgacgcggccgtggccggagctgaggtggacacggaacgcgacggccctggcgccgggaaagaacgtggagatccacgccgagggcgcccgccaccgcctggttctgcacaacgtaggttttgccgaccgtggcttctttggctgcgagacgccggatgacaagacacaggccaaactcaccgtggagagtgagccgcgggcgggaagggcggggcatcgaggaggagtgaggagggaggcggggcattgaggattagtgaggacgtaggcggggtgctgaggggaggagggaggaggggcactgaggaagagggagc

SEQ ID NO: 33747 - DNA, 339 bp, Homo sapiens
  chr1:228473703-228474042
  hypo
cgtctgtcctggggagcactgctggccaagcctgcccaggacggtggggcccctgagcagtctgtgcctttgcaggccggagagtgcacatcatcgaggacctggaggatgtggatgtgcaggagggctcctcggccaccttccgttgccggatctccccggccaactacgagcctgtgcactggttcctggacaagacacccctgcatgccaacgagctcaatgagatcgatgcccagcccgggggctaccacgtgctgaccctgcggcagctggcgctcaaggactcgggcaccatctactttgaggcgggtgaccagcgggcctcggccgccctgc

SEQ ID NO: 33748 - DNA, 118 bp, Homo sapiens; identical to SEQ ID NO: 30502
  chr1:228646027-228646145
  binary

SEQ ID NO: 33749 - DNA, 65 bp, Homo sapiens
  chr1:22903293-22903358
  hypo
cgcggagggcgagtggctcgtgcccatcggcaaatgcgtgtgcagtgccggctacgaggagcggc

SEQ ID NO: 33750 - DNA, 89 bp, Homo sapiens; identical to SEQ ID NO: 30503
  chr1:230821556-230821645
  hypo

SEQ ID NO: 33751 - DNA, 891 bp, Homo sapiens
  chr1:233749801-233750692
  binary
cgggcggcgggcgggagccaggcccgggcgggggcgggggcggcggggccagaagaggcggcgggccgcgctccggccggtctgcggcgttggccttggcggcggcggtggagaagatgctgcagtccctggccggcagctcgtgcgtgcgcctggtggagcggcaccgctcggcctggtgcttcggcttcctggtgctgggctacttgctctacctggtcttcggcgcagtggtcttctcctcggtggagctgccctatgaggacctgctgcgccaggagctgcgcaagctgaagcgacgcttcttggaggagcacgagtgcctgtctgagcagcagctggagcagttcctgggccgggtgctggaggccagcaactacggcgtgtcggtgctcagcaacgcctcgggcaactggaactgggacttcacctccgcgctcttcttcgccagcaccgtgctctccaccacaggtagggtatcctgcgcgccccctggccgccccggccacctcgcccacaacccacacaccccggccccggcgccccgggcccctctaaccctcccaccccaccccccacctttcgccatcccggctcctccagcccgcctcccctcactgtcctcccgaccctccgaccttccccttactggcgtccccggcctctgcctgggtgactcgggagggcaagccctgcggagccggaagccagagaggtgactccagacgtgacttggttgttgccgtccgtaactctggggaagtggtccctaacttcggcctgggtggctgcaggtgcttcctccccttgagttcttttttcgcaacccactaagccaaactgtcgggtttgaatgtgtagcagcacctggccgccgtgcggcaaggcagc

SEQ ID NO: 33752 - DNA, 104 bp, Homo sapiens; identical to SEQ ID NO: 30506
  chr1:234868862-234868966
  hypo

SEQ ID NO: 33753 - DNA, 57 bp, Homo sapiens
  chr1:235267164-235267221
  hypo
cgctgcacatttagaactcaaacccaagcccctgcttctaaaaaccgtgttcgttcc

SEQ ID NO: 33754 - DNA, 499 bp, Homo sapiens; identical to SEQ ID NO: 29622
  chr1:236156658-236157157
  hypo

SEQ ID NO: 33755 - DNA, 71 bp, Homo sapiens; identical to SEQ ID NO: 30508
  chr1:236187380-236187451
  hypo

SEQ ID NO: 33756 - DNA, 145 bp, Homo sapiens; identical to SEQ ID NO: 29623
  chr1:236274591-236274736
  hypo

SEQ ID NO: 33757 - DNA, 313 bp, Homo sapiens
  chr1:23748877-23749190
  hyper
cgtaggcacttggttgcatgtttgaagttgcttctgttagtgcatgctcagaggatgtgacaaagccttaagtggctgagacttcagcaaccggcagtaaaccccgggcctgagctgcaacgtggaggatccgtcttattacaggaagtatgtcctcctctgcctaaccactgctgggcgggtccactttcactcccagagcaggccccacctttctcggccagacgcccagagctccatgcccacccagacactgccgagagcccaggcgcagacgtggctgtaaactggctccatgctgcagggaccctgc

SEQ ID NO: 33758 - DNA, 385 bp, Homo sapiens; identical to SEQ ID NO: 30510
  chr1:24126326-24126711
  binary

SEQ ID NO: 33759 - DNA, 307 bp, Homo sapiens; identical to SEQ ID NO: 30511
  chr1:243652455-243652762
  hypo

SEQ ID NO: 33760 - DNA, 106 bp, Homo sapiens
  chr1:244200750-244200856
  hypo
cggctggctgtggagggtagagggtggctgcgtccccaaacagcagggcccagcaagagggaaaagccacacaccttctctgaggggccccccaaaaaatgatcgc

SEQ ID NO: 33761 - DNA, 365 bp, Homo sapiens; identical to SEQ ID NO: 30512
  chr1:245530148-245530513
  hypo

SEQ ID NO: 33762 - DNA, 587 bp, Homo sapiens; identical to SEQ ID NO: 30513
  chr1:245848539-245849126
  hypo

SEQ ID NO: 33763 - DNA, 202 bp, Homo sapiens; identical to SEQ ID NO: 30514
  chr1:245855725-245855927
  hypo

SEQ ID NO: 33764 - DNA, 531 bp, Homo sapiens; identical to SEQ ID NO: 30515
  chr1:245925703-245926234
  hypo

SEQ ID NO: 33765 - DNA, 358 bp, Homo sapiens; identical to SEQ ID NO: 30516
  chr1:24712899-24713257
  hypo

SEQ ID NO: 33766 - DNA, 225 bp, Homo sapiens; identical to SEQ ID NO: 30517
  chr1:247542074-247542299
  hypo

SEQ ID NO: 33767 - DNA, 235 bp, Homo sapiens
  chr1:248328627-248328862
  hypo
cggctccagtcctcagggggctccagtcctcaggagggcgctccagcacccgtgactcgccaggctccgtctgagacccgtgctaggctcgctctgtccctgcgttccctcgcctctctctccagttgtttttcccattctcacaccagcactgcaccaaggtgagaggagccccgctggaaaggaaacattcggactccggtttcagcacctcctccagaagcacaggatgtgc

SEQ ID NO: 33768 - DNA, 152 bp, Homo sapiens
  chr1:2520950-2521102
  hypo
cggaggcgctgggtcgggatgccgaacctctcctgatccgccggcagcaacgagccattaaaactgcagttcctgaccacgcactgcttcgcaggctccgagccctgcatcctccacagcccccgccttgctcactgttgggccctcagggc

SEQ ID NO: 33769 - DNA, 164 bp, Homo sapiens; identical to SEQ ID NO: 30521
  chr1:25854484-25854648
  hypo

SEQ ID NO: 33770 - DNA, 807 bp, Homo sapiens; identical to SEQ ID NO: 30522
  chr1:26662538-26663345
  binary

SEQ ID NO: 33771 - DNA, 497 bp, Homo sapiens
  chr1:27332484-27332981
  binary
cgggggtcacgtagtaattgacagtggctggcacaaccccgtcagtgcctggagggcgccaggccagggcggcagtggcagctgggccctgctcagccagtgcctgcagcgccagtgcggcaatgaggtccagcgtctggcggcgctcgtggttcatgaggcacacggtgctctcgttgaccacccggtgcagtgtcaccaggcaggcgtaacggcgggctgcatctgccccaccgaagtgggcctccaggtagcgctctagggtgcgccgctgctccaccaggtctggaaagtcgatgaagaagcgggagcacatgtagcgctgcagggcgcgcacatcggtgctgggccggggccggaagccccgcaccaggaggtggcagtacttgaggaggccaccacctcggatctcctcgggactgcgcgtggcgatgacacggtgccgcaggtgctccagggcctcggtgaagtccccgtacaggctttcgcctgtgacc

SEQ ID NO: 33772 - DNA, 698 bp, Homo sapiens; identical to SEQ ID NO: 30524
  chr1:27901989-27902687
  binary

SEQ ID NO: 33773 - DNA, 511 bp, Homo sapiens; identical to SEQ ID NO: 32929
  chr1:2850546-2851057
  hypo

SEQ ID NO: 33774 - DNA, 671 bp, Homo sapiens; identical to SEQ ID NO: 32939
  chr1:3111118-3111789
  hypo

SEQ ID NO: 33775 - DNA, 473 bp, Homo sapiens; identical to SEQ ID NO: 29649
  chr1:3195292-3195765
  hypo

SEQ ID NO: 33776 - DNA, 180 bp, Homo sapiens
  chr1:3213649-3213829
  hypo
cgcgcagatctcagacctcgtggggtgtaggagccctaaggggagcggtcagcccttgtcctctgtccgctttctgcccagtggcccctccaggtcccggcgtctccttggactcacattaccagcatttctgtccatttcgggtgagacccgaagcagcgagaccctatccaggtcaac

SEQ ID NO: 33777 - DNA, 521 bp, Homo sapiens
  chr1:32827347-32827868
  hyper
cgtcgctaccgcctccgggctgtcctgggactcgggggcggcggcaaggccacgggagtctccggcctcaatggggaatctccgaccctgcgggggctcctgggcgctcatgtccaagccccggggcgctctgcgcggggagtggcggtcaggcctctcccgggtcgccgggcgccgccgcctcgcgcccgccccctgggccgtcgctcacctcccggcggttgagaccggtcccaggctagaagcagctgccggagccctggccgcgggagaacgctccggtccaggcggagccgggcaggtctctgtggcgtgcccgggcccgggcgtcgaggagggcagcattgtgacccgggccgcggcgcgctgacctcacagagcacgttcctcccactggagaacccccaacggtgccccctgccgcccctggcactcagcgcgggccagaatcggggactggaggcctctggccatggcgcctggagacggggtcgcgcagaccccggacacccgaggggggc

SEQ ID NO: 33778 - DNA, 332 bp, Homo sapiens
  chr1:33772741-33773073
  binary
cgactcggccagcgcctcgggcccaaaagtgccgctgaagtgctggtccacgtccatgcagaacatgaagtgcgcctcgcggcccggcagcccgcccagcgccgcgtgcaacgtgcgcatgcgcgccatcgacacgtcttgccagcgccgctcgcgcgccacgcgctccacgggcagccggcgtcccgggcccagcgccacgcggggcaccgctcccggaagctcggtgaacacgtagtacatcacgctctggcccgccatgaagtgctgctccgccgtctccaggaagcgctccaggtacttctccaggtatctaagggcgcggcgccacc

SEQ ID NO: 33779 - DNA, 415 bp, Homo sapiens; identical to SEQ ID NO: 30535
  chr1:3552676-3553091
  hypo

SEQ ID NO: 33780 - DNA, 134 bp, Homo sapiens
  chr1:36788081-36788215
  binary
cggctctgcggacagctcggggcccggcagcgtgtcgtcggggcccagccgagtcaccgtgtcctcctcgtcctcgtcgtcgtcctcgggctccagggtgctgctgcgggggtcccggcgctgagccgggcccc

SEQ ID NO: 33781 - DNA, 319 bp, Homo sapiens
  chr1:36916004-36916323
  hyper
cggggttcggtagccagtggcctgaaggccaggccgcagcgtcccaatagtccggttgctggggcaacgccgtgacgggaagagcgagccaatcagaaggcggtttggtgggaggtgccctgaagacgggagctaattggtctgggtggtggaccgtcccggggggattggtccgagccagaggccggcgcggcgttgggcgcggctggggagctgtgcttctgagagtaggtttccctcgaaagggcgagggccgggccagggctgggggtggtctcgacacagccagcccggcgcttgggaccccggccgctggcgc

SEQ ID NO: 33782 - DNA, 706 bp, Homo sapiens
  chr1:38512641-38513347
  binary
cgtcgctcccggggtcccgcgcgccggccgtgctgattggccgctggggcttcattcacggcccccctaccgtccgcgtacacactcacgccccgggggcgcggccgccacgtggggagtggcgcgggggtggccctgggaccgcaccccctctcgtcctggctgtgtgggccccgctttcccccagcgctggagactccgagcccggccggtcccacattccacgcgagctgaattcccgcccgcatcccgcccgggcagcagggattgccggctccgggaggcgctcgggctccgagaagcggctcagccccgcgcccctccctcctcagtaccgctgccggcggaccaggattcccgcgggtcctggcggctgcgagcgcgaggcggcgcggattcgcggctcggttccggcgcgactgctcaccgcgcccgcctcgcctcccgcggctgccagcgtgcactgggcgctcctcggcgcgtctgcccggcccgtctcggctttccttctccttcctctagtcccagcgtcacaactccgccgacctcctctgccctgagagcgcgtccggtgcgggcggagtcggacggactctggcttcacgcctcgcgcgggcacaccttctcccgggcactgaggcccaggtgagtaccgcgcgggcagctggggctgggacggcgggcggcagcggttctacagtcctac

SEQ ID NO: 33783 - DNA, 482 bp, Homo sapiens; identical to SEQ ID NO: 30539
  chr1:39874756-39875238
  binary

SEQ ID NO: 33784 - DNA, 306 bp, Homo sapiens
  chr1:41485949-41486255
  hypo
cgggctgccagctccttgaggattaggtgctcctccagggccgtctgcaggcgccaggggagggaggccagggtgtccctgtggacagtcacctgcaccagtgcataggccttccgcggccgcctcaccacttcaatgtgctcccgcgccaccggcatctccagccgctccagggtgtctcgcagcaggcaggcaagcaccggcactgagaactgggggttcagatggcccacatagagagtgtgcgccgagggagcctcctcgaggtcagagtactccgtcagggactgctctgcgggtagctcc

SEQ ID NO: 33785 - DNA, 117 bp, Homo sapiens
  chr1:44584407-44584524
  hypo
cgagggcggcgcagggcgggacgggtggggcctgaccccgccccttggcgcagctgtaaataggtaaatagaaggtgattgtggcgtggcgatgtaccgatacccgcctgcgacgcc

SEQ ID NO: 33786 - DNA, 46 bp, Homo sapiens; identical to SEQ ID NO: 30542
  chr1:45097397-45097443
  hyper

SEQ ID NO: 33787 - DNA, 87 bp, Homo sapiens; identical to SEQ ID NO: 256
  chr1:45097717-45097804
  hyper

SEQ ID NO: 33788 - DNA, 203 bp, Homo sapiens
  chr1:45098124-45098327
  hyper
cgctcctggcttgcctgggtctcttcgactctggggcccgttggcttcttcgcagtcacggcgcctgagtatgtgcaaaccaaagctgccgctctcagtttccccgtctgtctaatggaggtatggcgcccagctcttgcccaaacctctctaaaggccctgaagaaccctgggggggcaataagtgccggagaatgaggaac

SEQ ID NO: 33789 - DNA, 418 bp, Homo sapiens
  chr1:45251852-45252270
  hyper
cggatttcaggctctcaaactttttcctctcttcctgggacatgaaacctgagggggtaaagcaggtggggtgcagttgcaccctctgccgccaggggaggctgctgttccgccgtctggctcccctccctcgcgtccaccggctgtcccaggactcgcggttccgcgttcctgtcgcagtccagacccttccctggaggcccctgctcccaggactctcccaggcgccacctgcatccggctgtgggccggacccccagaggctcccggcgggcggcgcacctgcgtccaccacgtgctccatggtggggaagcgcttaagcacgcgggtgctgaccgagcgcagcaccagcacggacgccaggttcgcgtagcggatgagggtgcggcgcagcaggcggccccgctggtccacgcc

SEQ ID NO: 33790 - DNA, 174 bp, Homo sapiens; identical to SEQ ID NO: 30545
  chr1:45268631-45268805
  hypo

SEQ ID NO: 33791 - DNA, 78 bp, Homo sapiens
  chr1:4696806-4696884
  hypo
cggggacgagcacacgaggcaatggcagcgctgaggaaggagcgggcgatgtaatggtgagtaccaaggagcacgccc

SEQ ID NO: 33792 - DNA, 623 bp, Homo sapiens
  chr1:51442340-51442963
  hyper
cgctgcgtccacattcacgtcgggaaacttggtctcagcctttgcccaggaagctgaagccaggcttacacctgggggtggagggcactaacatgacctcggttcaagttctggtccccgaactgctaaacaaagtgtcttttatcacattttggtagtgaattaagttttctgataaacattatgcatcttgcaacggtgtgatgagttcatgtacacacacaccacaatgggcgactgatcaataagtaggttaagtattctgtcccgagaaagcaatatgatgtatttcccttatcgtattgatcaaaagaacgttgtggatggagtccgtggcccaggactggtttcgaaatctcagttcccaaaaaggtgctttcggcttttgccgggggtagaagtaaatagtccataggcgccgggcagtcacagtgctggagcaagaaaaggtcgtgctcacagccttcctggctgccctaagcaaccttcatcaaaaggctacgggggaaagtccctgtctcggtctctggagactgttctgcttttatatggcagtcccatgaaaacagctccacgcaggaacctagtgagaggcaggaaacaaatttcccacctgagacccc

SEQ ID NO: 33793 - DNA, 153 bp, Homo sapiens; identical to SEQ ID NO: 30547
  chr1:53238160-53238313
  hypo

SEQ ID NO: 33794 - DNA, 291 bp, Homo sapiens; identical to SEQ ID NO: 30548
  chr1:53387231-53387522
  hyper

SEQ ID NO: 33795 - DNA, 207 bp, Homo sapiens; identical to SEQ ID NO: 30549
  chr1:55352463-55352670
  binary

SEQ ID NO: 33796 - DNA, 164 bp, Homo sapiens; identical to SEQ ID NO: 30550
  chr1:55620065-55620229
  hypo

SEQ ID NO: 33797 - DNA, 344 bp, Homo sapiens; identical to SEQ ID NO: 30551
  chr1:5772056-5772400
  binary

SEQ ID NO: 33798 - DNA, 707 bp, Homo sapiens; identical to SEQ ID NO: 30552
  chr1:5918390-5919097
  hypo

SEQ ID NO: 33799 - DNA, 204 bp, Homo sapiens
  chr1:5950824-5951028
  hypo
cgggatagcgcccgctccttccaagcagacagacgctggaagcgtgactcgtcccatgagggacgcagcacccactgtgcctgtccttccagagagccgctaccttcatctggacggcagcagatccgatgagcagcagggagtctccgtcccagacgtcaatctgcagggtctgcacggccaggtagcgggcaaagcagcgcc

SEQ ID NO: 33800 - DNA, 506 bp, Homo sapiens
  chr1:59612305-59612811
  hyper
cggagaaacttcagagcggcaggtgccttcgtttcccgttacctgctgagtctagtcccttccagggcacacagtgggcgcttagtaactgtagaaagaagtcgaacgaaatcggaagggggagaggcagaggccacaatcaagacacggaaacgacagtcagtcgaggcagcagagagggtttcacgcgggccagcggaggcgcagggcagttgagaagggaacttgccacggggcggaggggccgcgctccccaccagcgcggcgcgggggcgctaggccagggaccgccgggccagggaccgccggctgcgagcagcgggaacggacctgccccgggtcgcagcggtttttcccgggcggggctgaggctgcagggaggcgggcgttccggcggagggtcacggcctcgccgccgggactttcctggggtggaggtgtgagcacgtaggagccctggcctttccaacttcccaggtcagactggggctgggaccaccctgcgc

SEQ ID NO: 33801 - DNA, 229 bp, Homo sapiens
  chr1:6131658-6131887
  hypo
cgtgggaatcgatgtcacgacaagcaaggcgcctgctgcgtagggcacctgccgcttaggactcctgccaccgcgtagggctctgctgcgtaggactcctgccgccgcatagggctctgctgcgtaggactcctgcggcgagggctccctcctgccgcgtgggctcctcctgccgcgtgggctcctcctgccacatagggcacctcctgccgcgagggcacctcctgcc

SEQ ID NO: 33802 - DNA, 819 bp, Homo sapiens
  chr1:62207675-62208494
  binary
cgttttagaatattttattttgcgtcagcgaatagagaaaacaaaggagggatgagagaacaggaaaggaaaggggcaaaaagacaaagtgttaagcggattgacccaacgctttcatcgatatcctcctcaatttccttgatcttgggtctcgctctacacgcaggcctccaaccacaccggtctgtccggatctccctccccgtcagtggcggctgtccccaccacgcgcggtctgatccgccaccccgcccccacagcccacttttcccaggcccttggccatcccgcgcccggtaggaattcacctgcacgtaaacagccagggcaaccgtcctccctccttggagcccgcctcccgcggccccgggctccctcccccgccccctgcgccaccccggtgccccgccccgggcggggagagtcggggcgaggggagggcctgccaggtgaggcgcggtcaccctgggcctctcacttccgcccaggtgaggcagggccgacaccgagcccgcccgacccgggctcccacctgctcctccagcgcaccaggtaaagcgtgaggtcccggctgtgcagtgcgcgctcgcccctgggtgtccccgcgcctggaggccggccgggggcagctccctcggggcttcccgggcctgcctgccctgcccccgcgctctccccgcccgcccgcctggagtgggtgggagccggaggtggagggcgccgccgggcgctcagaggggccgcggcgaggatggggcgcccgcggcgtgcgtccgcgctgacccgggaggcggggcgggggcgccgtcctcctgcgtc

SEQ ID NO: 33803 - DNA, 127 bp, Homo sapiens; identical to SEQ ID NO: 30559
  chr1:6347184-6347311
  hypo

SEQ ID NO: 33804 - DNA, 105 bp, Homo sapiens; identical to SEQ ID NO: 30560
  chr1:6738127-6738232
  hypo

SEQ ID NO: 33805 - DNA, 787 bp, Homo sapiens; identical to SEQ ID NO: 30561
  chr1:7724016-7724803
  hypo

SEQ ID NO: 33806 - DNA, 108 bp, Homo sapiens; identical to SEQ ID NO: 30562
  chr1:7843510-7843618
  binary

SEQ ID NO: 33807 - DNA, 179 bp, Homo sapiens; identical to SEQ ID NO: 30563
  chr1:7844224-7844403
  binary

SEQ ID NO: 33808 - DNA, 732 bp, Homo sapiens
  chr1:86621199-86621931
  hyper
cgcgcaacccctggtccgagcccttttcccagggaaggcatgggagcaggtacagcgcccaaaggggaggtggggtgcccgtcaggacccgcccaaaacctccgcaggaggggcaggcccgcccccgtgtcctgctcccctccccagtccccgccgcgagtgccacttccccagtgacagggcaatgatcagggcgcagcctcggctcggatgggcaacgtttgttggccttctaaccagaggggattgcctctgagcccgtgggtaaaacaaccccccgacgcccgaggttctgcagccacccccttccccccgctggcgacccttcctcacgcctgagtccagtggtccaggctgcgcacactgaccctgggggacctctagcgtcacagcaatcgccaggctggacgccctgagaagcacctcggggaagcaggacctcgacagggccctgcgggaggagaaggggaggagggcgcgagggcggcgggagctggagccagagagatcgtcggagcccagctctggagcttagggagccgctgccctggacctcgggactcgcgccagcgagcttttcctctcgagccaaaagatcgctttagcataaactgtctgagatctgctggcacgaggcatcctttcaaacacggtattttgcaagctgagaagacaaggggaagataccgcgggtactcggccgctcctaaagccaaaaagtgccaaggagcc

SEQ ID NO: 33809 - DNA, 523 bp, Homo sapiens; identical to SEQ ID NO: 30565
  chr1:896874-897397
  hypo

SEQ ID NO: 33810 - DNA, 248 bp, Homo sapiens; identical to SEQ ID NO: 30566
  chr1:897754-898002
  hypo

SEQ ID NO: 33811 - DNA, 202 bp, Homo sapiens; identical to SEQ ID NO: 30567
  chr1:92001241-92001443
  hypo

SEQ ID NO: 33812 - DNA, 371 bp, Homo sapiens
  chr1:942328-942699
  hypo
cgccaagtcagccctgcacctggcccgggcctcggaccccgacggggctcacccacctgagatcaccctggctctgcgggaaggcaggaagctttggcatgatcctccacgggcgaggatcacgtagagacgtgtagagacgcgacgaagcacgaagacccgtgtttgacgggttgccaggtgcctacatcagagctcattaaattacacattaaatagatgcacgtgtgtgtgtcaagctcccctaattcaagttgtagaaaatcagactcagagttcttacactcgggggtgttttagcagctgcgcctcaagattctaaattcaaacgcacacggaataaaacatttcggtttatcgccaggcgcggc

SEQ ID NO: 33813 - DNA, 119 bp, Homo sapiens; identical to SEQ ID NO: 30568
  chr1:94374262-94374381
  hyper

SEQ ID NO: 33814 - DNA, 125 bp, Homo sapiens; identical to SEQ ID NO: 30569
  chr1:9747572-9747697
  hyper

SEQ ID NO: 33815 - DNA, 122 bp, Homo sapiens; identical to SEQ ID NO: 30570
  chr1:9749342-9749464
  hyper

SEQ ID NO: 33816 - DNA, 328 bp, Homo sapiens
  chr10:101283158-101283486
  hyper
cggggacgagggctggcagccccatactgaatagaaagcgaaggacggaggtagggagaaaggaaactgctctggggggcggaggtgggggtacacgtaggagggaaggggagggggctagaggaggctccgccccaccgtccggcagtgtttattttcaaggcagcttcccgtcaatcctgtcaccggggcacattcttttcgggggctgtgaaccaccgtcagggctctgcaggaagatttgaggagggggagggctgtcgagtagggagcaggaattcgcagagtagagagaactgcgtctgggcaggcagtccctgcgtggcgc

SEQ ID NO: 33817 - DNA, 334 bp, Homo sapiens; identical to SEQ ID NO: 30571
  chr10:102132983-102133317
  hyper

SEQ ID NO: 33818 - DNA, 569 bp, Homo sapiens; identical to SEQ ID NO: 30572
  chr10:102822304-102822873
  binary

SEQ ID NO: 33819 - DNA, 737 bp, Homo sapiens; identical to SEQ ID NO: 30573
  chr10:111767130-111767867
  binary

SEQ ID NO: 33820 - DNA, 148 bp, Homo sapiens; identical to SEQ ID NO: 30574
  chr10:11204060-11204208
  hypo

SEQ ID NO: 33821 - DNA, 441 bp, Homo sapiens; identical to SEQ ID NO: 30575
  chr10:11846800-11847241
  hypo

SEQ ID NO: 33822 - DNA, 736 bp, Homo sapiens
  chr10:119494306-119495042
  hyper
cgactctccccgggtcccccaccccagccaagagggaacctgccaatcaggctgcgccaccaccaggctaggaagcctagggtcgccgatgttccaggatggaatgttctggtgtcaccgtgcgggggggtggggggtgtcacagagctgggaactcgctcagagccagggtctctgctggggtcagcgtctgtacgctaaagccagggcgcaaagtgcgtgggcactgcggacactagaggcttatggcgctggaaatacaaggccgagttgccggcgcaaagagttccccgggcgggttggtgatgcggcgcgctttgataacaggttaatccggccaacattcgctccgcgagagagccatcggagggctccgggagactgcggcgccacggagggagaggcggcgagaggcccctctgcgagcaccctctgggcgcagtgcggtgggctatgctctgcgcagccccgggcgcgcctgggttctcagagcccaagacctgagccgctccgagcgcagggcgccagttctctttcagaagcgggagaagttcaggtgggacaggagacacgggggtgaggagatctttgagagggccggccgggaaagtgggggtcgcctgtggctgagagggccgcatgccgaaggtcccgaccccaggctcacgacaggcagcctggcacgcaggaaggggctttgggatagaacgtagcacctggctgagtgcttaacaac

SEQ ID NO: 33823 - DNA, 927 bp, Homo sapiens; identical to SEQ ID NO: 31809
  chr10:124133662-124134589
  binary

SEQ ID NO: 33824 - DNA, 271 bp, Homo sapiens; identical to SEQ ID NO: 30579
  chr10:125617057-125617328
  hypo

SEQ ID NO: 33825 - DNA, 229 bp, Homo sapiens
  chr10:126198892-126199121
  hypo
cgcactttggtatgcggagcccacaagctggcctggacaggcatcactgctccaggcagctgtgcacccagccggccctggcgtcccggcccccagcctccgcctccctcgccgacagcttcccggggctctgcctggaggcagcctcgctttatcccgcagaacctccacgctgttcctgcatgagaactcttcctccaagagaccacgttcctctggtcctgtctcc

SEQ ID NO: 33826 - DNA, 972 bp, Homo sapiens; identical to SEQ ID NO: 30581
  chr10:126715052-126716024
  hypo

SEQ ID NO: 33827 - DNA, 218 bp, Homo sapiens; identical to SEQ ID NO: 30582
  chr10:127817236-127817454
  hypo

SEQ ID NO: 33828 - DNA, 932 bp, Homo sapiens
  chr10:128076516-128077448
  hyper
cgccggggcgcgtcgcccctcggggcagccctggacctcggcgcgcccaggcgcagcgtgcggtgccctcggcggggcgggcagcgagccgccctagttcggcgacttacctcgggcctcgcagggcgcgagcagagcaccggccagggcgagcaggagggcgcgggcgggggacacgggcagcgggcgcgctgccatcgtcgccggccttcagtgcagcagctctcgggcccggcggcgagcgctgcaccatcccacgcgggcgccgagccggggccgggcgtcgcgaccggagggatttcctgcctcggcgagtcagctccggagccctcgcgcagcgcccgcgccgccgctgagctcttctagcctttcatttttaaaaaagtttccccccgtgtgtgtgcgtgcgtgcgcgcgcgcgcgccgttctggcacaagccagccttgaccgttgcaataaatgagcaaactgtccgagttggcccggggactaggaagagcgttagtgagagaaggcaggcctgtgaaatggatccacggccagcagtcaccgttcttattaccgcggaacaaattattgtctcccccgcacccccgccagttggcggcgtcccgcgggtcctagagaccgctcgggtccccccgccagggtcccgccccgagccgcggctcgctcacccccgagggtgggcggctcagacgtggctcagtggcgtccgggcgcccggagcgcacacgtccccgccccaggatgatgtggccgcagggcccggggcgcccggctgccaagcgcacatgcggcggcacggtccagcttttcaggctgaagctggaaacgatgactctgctactcgctccccggctctctgggaaccctcggagtgcgggtcaggtctccaccgcggcccacagcccggcgcgcgaccccgccc

SEQ ID NO: 33829 - DNA, 954 bp, Homo sapiens
  chr10:128993960-128994914
  hyper
cgcagaggcgcagccccgctcctccctgacgtcgccaaagttgccagacgcccctcagcgacccggtcgcgccagatgcagttgcataaccttgccccccacctgcgaccgcaccgggtccgctcccggctgcaccggggtgtcccggccccgggagccgccgagtttccggccaagccggtttggggccgagtgtgtgcgcccgaatcggggtcggcgcccgtcccagcggtgctctgcccgcggccaagtacgacgggcgcgggggcgcgggaggagggcacgcggggctccgcttaccttccgctgcttacagataagtcgaggtcgatgcagcgcctggctcgggcatgtctcgctgcggaccctggcaagcctggggcggcacggagcactccggacagggcatccgcggccagactcgccgcgctcacgcggaggaagcctcggctccggggacttggcccgctgcgcgcctgctgcccgccccctccaccgctgccggcccggccctgctggcccggccggcccccgcgccgcagctcgcgtcgctcgcgtccctccggccccgcttagcgacgcgcgcggggaggcagcggctgggccagctccggggacgcccgcgcgctcgcttgctcgcgacgcggcggagccagccacagccacccggcttcgcgctcctccgatgtcctcatttactgcaattgtcttcggcgagatctcagagccagggccaggaggcgggggcggggcagaggagggagcaggagggaagtcctttccgctgctccaggtcccagctactccgcggagccgggcggccagaggcgagggcgccccaagccgcgcgcctgccgcctgtgcgcccggctggcaccgaggcgggcggagccccgggccccgcggggcggaggtggggcgggggcggcgcggggccgggccgggccgggccgc

SEQ ID NO: 33830 - DNA, 105 bp, Homo sapiens; identical to SEQ ID NO: 30585
  chr10:129228001-129228106
  hypo

SEQ ID NO: 33831 - DNA, 176 bp, Homo sapiens; identical to SEQ ID NO: 30586
  chr10:129241072-129241248
  hypo

SEQ ID NO: 33832 - DNA, 166 bp, Homo sapiens; identical to SEQ ID NO: 30587
  chr10:129242401-129242567
  hypo

SEQ ID NO: 33833 - DNA, 175 bp, Homo sapiens; identical to SEQ ID NO: 30588
  chr10:130300191-130300366
  hypo

SEQ ID NO: 33834 - DNA, 161 bp, Homo sapiens; identical to SEQ ID NO: 30589
  chr10:131566947-131567108
  hypo

SEQ ID NO: 33835 - DNA, 351 bp, Homo sapiens; identical to SEQ ID NO: 30590
  chr10:131638488-131638839
  hypo

SEQ ID NO: 33836 - DNA, 191 bp, Homo sapiens
  chr10:131987142-131987333
  hypo
cgagtggctcagccagggttcattaccaggctccggatcctgcttctcccggatcacagcaagcgctgtgcttaggcctggggtgggggacggattctccctgaaggcaggtctgacgcgggcgggagcacccaccccgctgggttcttacggcggatccgttacctgggtctccagagggtgaggtcgcc

SEQ ID NO: 33837 - DNA, 238 bp, Homo sapiens; identical to SEQ ID NO: 30592
  chr10:133834585-133834823
  hypo

SEQ ID NO: 33838 - DNA, 429 bp, Homo sapiens; identical to SEQ ID NO: 30593
  chr10:134049521-134049950
  hypo

SEQ ID NO: 33839 - DNA, 167 bp, Homo sapiens; identical to SEQ ID NO: 30594
  chr10:134298551-134298718
  hypo

SEQ ID NO: 33840 - DNA, 640 bp, Homo sapiens
  chr10:134562467-134563107
  hypo
cgccccagggactggtttgagcctgttaacaccacaaagcaggcgtgtgacctcagccatccctcccacgtcagcttcacccagatgagcctgttgagacggttcccggtcaagccgcctgcagcccttgcccgttgtcacagtcgaacagctctcgagggagttcagggacgggagagagcgagcgggaggaggccggccatgtgcccccgcaggcaccctctttgctgttctcagtgctgctgtgccttccgagcctgctggtgtcgcactggcttttgccccaaagcagctctgtgggcggcagcagctccggggtgtcctcacggttgcagccacgctttgttggggagcagccagcctcaggcccttcgcacgtgtgagggtcggctgttgcgggagtggcccctgaccccaggtgcggaaatctgggtgtgacaccagctgctgtctggaaccagccatcctatcccactgactcggggtgtcgggtgacgctgccatgggcaggtgggcccccctgggacttatctccgttgctgtctttctgcagacgctctgcacaaaagccaccatgcagacggtccgggccgccgacaccaatgaagtggtgaagctcatatttcgtgagtcggacaac

SEQ ID NO: 33841 - DNA, 195 bp, Homo sapiens; identical to SEQ ID NO: 30597
  chr10:134639765-134639960
  hypo

SEQ ID NO: 33842 - DNA, 502 bp, Homo sapiens
  chr10:134830248-134830750
  hypo
cgctgggcgagcaggccagggctgcccgtctccacctttgtgctggaccatttacaatcaaagcgcagcatcgagatacccaggaaagagccaggaacaggccaggaagctgctgccccaccactgaccccaccgctctccttccctccttccttcccgctgggctgggcacaggtggagctcaccgtcgtcccccttcatcccttggcccctccaaggctcaaggactggaggccgactgggcagcagacatgtcaccatcaccatgctccccgtcaccacgctccctgtcgccatggtcactgtcaccatgctccctgtcgccatgctccccctcgccacgctccctctcgccacgctccccgtcgccacggtccccgtcgccacgctccccgtcgccacggtccccgtcgccacgctccccgtcgccacggtccccgtcgccacgctccccgtcgccacgctccccgtcgccacgctccccatcgccacagtccctgtc

SEQ ID NO: 33843 - DNA, 379 bp, Homo sapiens
  chr10:134834577-134834956
  hypo
cgcgtgtttccagttccaaaaagccaaccaaatgctcagaacctccccctgggctggttggtgtgattgagactggtcgctccagtctgcacctgtctgcggtgacggccgcccttcccgtcagcccctccgcggtcccggccccagccctgggttgagggagggctggggaggagcagggacagacgggcaggcaccaggacgctggctgctgcgtgaatgtcacctgtggtcacggccgacgcccggcgggcctgggcatggagtcaggaccggaaagcgaggccggcagcagcaccagctcctcagcaaggcccccgctgccgactgggcacgggcactccaaggggacgcctggcacgtgccgggatccacgcgc

SEQ ID NO: 33844 - DNA, 123 bp, Homo sapiens; identical to SEQ ID NO: 30600
  chr10:135075001-135075124
  hyper

SEQ ID NO: 33845 - DNA, 176 bp, Homo sapiens
  chr10:135124053-135124229
  hypo
cgggcgcagcgcctccgcactcacacccctctgggccatgcctgtacctcctgcagcagtcggccgtggtcatccgcactcacacccctcggggccgtgtctgtacctcctgcagccgtcggccgtgctcacacatcatgcagccctggctttccttttgtcctggttggttgtgc

SEQ ID NO: 33846 - DNA, 70 bp, Homo sapiens; identical to SEQ ID NO: 30601
  chr10:135125649-135125719
  hypo

SEQ ID NO: 33847 - DNA, 184 bp, Homo sapiens; identical to SEQ ID NO: 30602
  chr10:15255054-15255238
  hypo

SEQ ID NO: 33848 - DNA, 341 bp, Homo sapiens
  chr10:1558541-1558882
  hypo
cggctttccctgctccctttcccgaggtgcagctggattcagagcttcccacctgcttgtgaccagcgtgcattctcgacatacacgcttcagaccaaatgtctgcttgttcacctgtgcgggctttgtgtgggctgctctgtgctatgcgggctgctctgtgcgggctgctctgtgctgtgtgggctgctctgctctgtgcgggctgctgtgtgctgtgcgggctgctctgtgcttgggaaaatgaaggttggcatgatttcctgcggcaatgccctcccgttttatgccttaataagggctagaaagaaaacattttcctcgagctgcatgcgaatatc

SEQ ID NO: 33849 - DNA, 127 bp, Homo sapiens; identical to SEQ ID NO: 30605
  chr10:21915244-21915371
  hypo

SEQ ID NO: 33850 - DNA, 376 bp, Homo sapiens
  chr10:22047245-22047621
  hypo
cgactaacaatctagctacagggaaagaagcctcaagagacactgtgttaggatcacaccctggggctctctgcagcgcctcatggccagatcacaggaaagaggccgcccaagcccggtgggtgggctctccacagggcactcccgccccctcctcccatctgaggaccatctcagaaatatctgagcaggcaccaagagctaccagcagggagaaaggccaactacaaacggccacggccgtggaaagtaagccgaaccctagctgtcgcctggcactgaccacatacggagatggcctcagggcctctggacagccaccaggtgtacctgctgagtccaaagttattcacatggcagaatcgaagatgatcac

SEQ ID NO: 33851 - DNA, 790 bp, Homo sapiens
  chr10:22624037-22624827
  hyper
cgcggcgggaatctcaagatctgggcaaaggctcgcgtctcgggacgcgaagtcgacgccaaaatgggtccccggacaaggcgaccctgggagtgccggcgcccccggccgggcagaggagcgggtgggccgaggctgggacatcgcctccgaaagctgccgggacgcggcggcttcctgcagagcctgcgcctgccggatccccagaacacagaagcttctcggacatgggagctccccgtgcgccctaaaaccaggagaggaagggacgacttgggaaaagggactggggaaacagcggagaagtgaaagcggcctaaaatgggcgacggcgggcgagtcctctttatcagtgcagcaggctgccggagccgccatttggtggcggatctcggtagttcagtagcacgttgtgctgaacgtcacaactggcttgtctacgtggcatcgtcatttcttaaccgcggttttacgaaatgcaaatttccccctggccttcctcctccgcggccgtcgacccccctcggcgctccgggtggacggctccggggcgcggctcgtccctcgggtggtgcagcccccgcggcccgagacccggggagggccgggggtactttctgcgaggcgccttccccgcggcttctgcccgcgccaaagcctggtggaatccagcgcagacctaaagcacgcttgacaccccgatttttcgagactaggacgactctctgagccagcagctttcctctccctctcggggagaatctcatttccttggggtggtgagggtgac

SEQ ID NO: 33852 - DNA, 216 bp, Homo sapiens
  chr10:22833864-22834080
  hypo
cgcacactcctccccagtgacacggggcctcgctgcacattcattttgttggagtatttgagcgacttctctctttcccaagcaaggcagccccaaacggggctctaaggttttggctttcactgcattcccgaatcccggcaggcagagggctcgggaaagtattcggcacttgttggacaagtgaatgggatgcttgttacttcttccctatcc

SEQ ID NO: 33853 - DNA, 59 bp, Homo sapiens; identical to SEQ ID NO: 30609
  chr10:29666997-29667056
  hypo

SEQ ID NO: 33854 - DNA, 445 bp, Homo sapiens; identical to SEQ ID NO: 30610
  chr10:3151595-3152040
  hypo

SEQ ID NO: 33855 - DNA, 469 bp, Homo sapiens
  chr10:3160827-3161296
  hypo
cggcatgagtgaaaaggcagacgtttaccgctccttaattaaaaccacagactggggaaggcggccgggtggggaccggcgtggcgtcctgcggaccgcgtggagtttggggtgtctgacatcgttctccacgtggctattttcagcgttctcccggggaagtacttggaagagatcgccacacagatgcgcacgcacagcatcaacgcgctgctgatcatcggtggattcgaggtacgttaccgtttctctcttgccggtcttgcaggtgtgagccgcgccctgtgttggctaaacattaagctacttgttggctactggccacgatccgagatgataggttcccagacccagcggccactggagaattgtagaacagcaggatagcaggtggtaagacgtggcctacgagtggcccagttccagtaaagcaacttaaccgagaagcaaaagcttgactccttaaccc

SEQ ID NO: 33856 - DNA, 227 bp, Homo sapiens; identical to SEQ ID NO: 30613
  chr10:3194438-3194665
  hypo

SEQ ID NO: 33857 - DNA, 431 bp, Homo sapiens
  chr10:3330173-3330604
  hypo
cgtgtgtggggatacgtatttgcacacatgtgtgttcaatctgtggatacggtacctacgtgcacttctgtacctggtttcttcctttttctacacatacattatttatctgttttttaaaattcaacttttattgctccttgtcctgccggtggccctggcaacatgccacgccggactccagcttagtttccttgttgccttgcagccaaacttacgcagtgtgcagacggagctgctcagaggggaggggcagcgagcaggtgccacgtccacaccgggtgaggcgtgaggtgagggctcccccgcgccgccctggcgtccaggtggtgagggctgcacggaaacgtggacttcggcagaacatgtgtgcgccacggagcggctgcgtgcagcccgcaggtgagaccgtctgcataactctgccaacc

SEQ ID NO: 33858 - DNA, 92 bp, Homo sapiens; identical to SEQ ID NO: 30615
  chr10:35503808-35503900
  hypo

SEQ ID NO: 33859 - DNA, 190 bp, Homo sapiens; identical to SEQ ID NO: 30616
  chr10:396943-397133
  hypo

SEQ ID NO: 33860 - DNA, 133 bp, Homo sapiens; identical to SEQ ID NO: 28300
  chr10:43725410-43725543
  hyper

SEQ ID NO: 33861 - DNA, 233 bp, Homo sapiens
  chr10:43818322-43818555
  hyper
cggtttaccgtcaccatggcaacagcgcgtcctgggctggggcggggccagactgccagtgcctttgtggcgcattaggagctaagccagtgattggccatctgggcgcggggcgggctgagtcagttggagggggcggggctgaggctccggtgaacgccgtaggcccgggctgggccgagggagatgatggatgccgcttcttgccactccccgggggcaccacagagagc

SEQ ID NO: 33862 - DNA, 1067 bp, Homo sapiens
  chr10:43892074-43893141
  hyper
cgcaaggtgggaggcccgggcgcgcggtaaacgtgttttggcgggaagcagcgccgaggccccgagacaaggtgacggcgacgttcccgcggcctgctcacggcactccagcagcctcggaccgcccggcccggcaggaaggtcggccccagggcctgcgcgggctcgggcgggagcttccgggcggggggcggagcgagcggcgcagcggggagagtgggggcagggacgggagggttcccggagggaagggcgcctcgcgggagggggaggggaggggaggggaggggagggggcccctggcgggcttccggggccctgagggcgagagcgagggcgacggcaaggtggggtgggggctgctccccggcccgccaagctagcgctgcctaggcgggagctcggggacccgcgggccgagcgcggctgaagggagggaagggaagaggcgctcgtaggtctgcgtccgtctccgagcgaccggggcggcggaaagggacctggggggggcggccgggactggagtggcggggccggggcgcccgcgcggcggctcaccacgccagggactggcccgtcggccccgaggaggcgcggggtccggagtccgggaagcggaggcctcgtgatccaagaccggcagccggacgtgggtcacggggtgcagaggaggaagtgccattgccgggcccgccaagatgtcaccaatgggaaacgcgtgcctgcaggtgcggccccgtggcccgcgcgctgggcccaggcaggaagtgggggaaggagagagtcagggcggcgggaagacatttctccgagttctcccgaagggagccaggcgcgagcgcgacctggggaaagtccagagtgccagccacggggaagggcgggcagtgcagagtggaagagaagccagcaagttagacacagcccctctctgggaggccgcctctaaaatggaactagcggacgtaccttggtttgtacatttgaccatggacacacgtaaagattttgaaaaaaaatctttgaaaaaaaatttttttaacgcaattcctaaacttttaactaac

SEQ ID NO: 33863 - DNA, 207 bp, Homo sapiens
  chr10:518263-518470
  hypo
cgcgtgctgcaggtccacgcccactgcacttctgcctcgcccagtggctgggcacaggcaccgtcctggcacaggtggcagatggacgtattgtatcaccccaccccgtgcttacctgaccgatagcgctcatctcgtgaccctgaagaccgtcggcggtggtagcgagaggcggaggaaggagtgacaggagcccggcgttcttgc

SEQ ID NO: 33864 - DNA, 738 bp, Homo sapiens
  chr10:52177724-52178462
  binary
cgccgtagtagaattggcactgattgcggtattttaatcggttcacaccgtctgttagtgtattctaatgaaccacagcatctccggagcaacacttacggtctctcgtccccggaggcagtgtctcctggaaagttcctggggcaccaagtttgcgcgcggctcctcgcgctcagggtgcgcgcagccagccctggcgcgggcggaaaggcgagcgcgctgagcggcgcgcagaccccgggcgcggctcttgctgggcgcccgcgccttgatcggtcccggcggtcccgttcccctgcttgccgggccctggtgctaggacagcggcgctgcggagcccggcgtctggagctggcgggcggccggatgcgccgatcctctcccggggggtcaactgcgagctagacgcccagccggacctcagaggctccaagagcggggttggcgggtgtggcccggcagcagagggtttttggaatgcagggtgtggccctctaccacggcaaaaaagaaatgagtcagcccgttcagtcctaaccaataagcatgttcagtgtcggttaaggcggaactttcctttcttgatttataccaagcttagaagcctttcacagccttttctttacgcctttgacaacttcgacacaacttctagaaaagggtaggttgcctttgaaaacgcttgggaaacaaggattaatcttacgaaagatacttcagtggatgtacattagtttc

SEQ ID NO: 33865 - DNA, 474 bp, Homo sapiens; identical to SEQ ID NO: 30624
  chr10:5529540-5530014
  hypo

SEQ ID NO: 33866 - DNA, 171 bp, Homo sapiens
  chr10:61469827-61469998
  hyper
cggtgcgcacacacgcgcgtccccaggcgccgctgtgcccccgccgcccaccacgtgccctggccaagcccgccaagggccgtgcgcgtttggggggagccggggtgtacaaatgaatgcgagtgttccttggtctccctggctcccggggccgctggcgccctcctggcc

SEQ ID NO: 33867 - DNA, 218 bp, Homo sapiens
  chr10:6161993-6162211
  hypo
cgcctccacctccttgcttcttactgcctcttccactcagcccacacttgcagaatgaggactgcgtcgactacaaattagacctctgcttccaccaggcctccttgatagttcagctaagagccgtgcggtgagtctcctgacgttttatggcacttgacgctggtaaccactcccttcccgaggacggagaccgcggccctgccagtatcgctcac

SEQ ID NO: 33868 - DNA, 146 bp, Homo sapiens; identical to SEQ ID NO: 30627
  chr10:6246024-6246170
  hyper

SEQ ID NO: 33869 - DNA, 270 bp, Homo sapiens; identical to SEQ ID NO: 30628
  chr10:630309-630579
  hypo

SEQ ID NO: 33870 - DNA, 219 bp, Homo sapiens
  chr10:63656701-63656920
  hyper
cgagttccctgtgtctctcttggctccggctccaagttcatgagaaatctgtccccatacccatccttctgaagcttccagcctttaccacctggacctgggctggagtcccacccccaccacagctcttgagacaggcgacgaatagacccaaatttgagatgtagctcaacctttgaccactagaggtctcctggaaagcaatgacccgtataaccc

SEQ ID NO: 33871 - DNA, 32 bp, Homo sapiens
  chr10:64565470-64565502
  hyper
cgggactgccactattaccgggtgctggagcc

SEQ ID NO: 33872 - DNA, 643 bp, Homo sapiens; identical to SEQ ID NO: 30631
  chr10:71892158-71892801
  binary

SEQ ID NO: 33873 - DNA, 156 bp, Homo sapiens; identical to SEQ ID NO: 30632
  chr10:72288415-72288571
  hypo

SEQ ID NO: 33874 - DNA, 929 bp, Homo sapiens
  chr10:735200-736129
  hyper
cgcggggaatcgcggccccacaaacgtccccagagcgcgggggatcgcggcctcacaaacgtccctagggcgcggggtctgggggtccgggggacgcgcacgctccgggctggggtcgcacctccccctccgggcccggcccccgccccgccgcaggccccgcgcccccagccctccgcgcgcggccctccccggtgacagcgcggcccggcccggggcgggggcccggttaccttccgacagctccagctccagctcggccaggcgcgcccgcacctccaggggcagcgccatgccctccaggctgcggtccgccatgctccgcgggcgccgcgccccgcacggcctcctctttgttcgcaggcggaggtctcggcggctcctcgcgcccggcggaaccgcaccgaggaggaggcggcggcgcgggcgcgggaggcgggcggcgggcgcgcagggacctccctcccctcggcgcctcctcagcgcggccccgccacggccgcctcgcgcgcccccgcgccccacggtccccggcccgccccgcgcgcgctcggcccctccccgcaggcgctgcggacccggacccggccctgctgctctcggccccggcccggcgggagcgtctctgcgcgcgcgcgtcacggggccgcgggggcagggcgcgcgcgcgcggggcgcgaggacgcgcaggagcgggagcgcgcgggggggcgcgcggccgcgtcggcgaagcgcgcgctcccgggggcgcgctcgggggcgggttgggggctcggggcccgcggggcggggcggggcggggcggtcttgtctgtcctgggctctgcgcgtccagcggagcctgcgggcccggccccagagcctggtccacccggctccctgcgaaaatcacgtcctggagccgcagcttgacgtctgcgcgaaaactc

SEQ ID NO: 33875 - DNA, 402 bp, Homo sapiens; identical to SEQ ID NO: 30634
  chr10:73767536-73767938
  hypo

SEQ ID NO: 33876 - DNA, 589 bp, Homo sapiens
  chr10:74057413-74058002
  hyper
cgccgctcccctccctccttcccgctcccccgggcaggaaggctcgcgtgcgcgaggccacagcgcaagcgggtgcagagcaggattcgaacagggttccatgcaactccgtgcccagggtcctaccaccgcctgagctcagcggtcttcagccagcggggcccttccacccccttccttaatagttttcctcctccgcctcctgcacggcctccgcctccgcctgaccgtcctcggaaacctcccagccgcagcccggccctccccagcggcctgagtggcctcctcccgcggcgccccccagctccgcacctccccagccccgcccgaggcgcgcccagcgagcgtgaccccgacccagggccacggctgcgcccgtaggatcgcgggcgcgcgggtctccatgagggactgggagagatgcgtcacccgctaatccctcaactgggtcgcacccggtctgccttggttggtcccttctgatggcggaggcgggacctcgacttggtggccaatgaggagcctcgtgggggtgctctcggctgccatggcaacggaggggccgcccgcttccccgcggggcgaggcc

SEQ ID NO: 33877 - DNA, 226 bp, Homo sapiens
  chr10:7608025-7608251
  hypo
cgctgttggcaatgtagaaacccaggtggtgtcgctggaagggcgccggctttttgtagaggtggatgaggatgacaaaggctatggagccctggatggtgacggtgacattggcgttggcagacacggacacctccagcccccagctccccaccaccacactctggttgcaggggagcaccagtctgtccccaccatccaagatgactctgctcggtgtgatctc

SEQ ID NO: 33878 - DNA, 253 bp, Homo sapiens; identical to SEQ ID NO: 29700
  chr10:80921761-80922014
  hypo

SEQ ID NO: 33879 - DNA, 137 bp, Homo sapiens
  chr10:81002952-81003089
  binary
cgcccgcagggtccgcgagcgcggcgcagagcgcgggccgtgggaagtttctccggcgcgccccgtgcgcccccgccccccgcgcgcccccggcccatccccgtccctggagagctgtcgcttgcgcccgggcgcgc

SEQ ID NO: 33880 - DNA, 240 bp, Homo sapiens; identical to SEQ ID NO: 30639
  chr10:81032458-81032698
  hypo

SEQ ID NO: 33881 - DNA, 82 bp, Homo sapiens; identical to SEQ ID NO: 30640
  chr10:81060524-81060606
  hypo

SEQ ID NO: 33882 - DNA, 447 bp, Homo sapiens; identical to SEQ ID NO: 29704
  chr10:81063491-81063938
  hypo

SEQ ID NO: 33883 - DNA, 571 bp, Homo sapiens
  chr10:851108-851679
  hypo
cggctggaggtcgagggcgcgtggggggcctggagggtgcaggggacgccgagggcgcggggcccaacctccggccagccgcctggattctggtctctgctctgagcgaggtgcgtgggtgcctccctgcttttgagcggggatgcaaaggacccccgggctgctgcgcggaaaaaggcggacggggatccagggcgcaagcagggatggagggagaggccgacacagacggcggcaggtgtgcgtggtgaggccgccccacgcagggatgggaggggcgcgcaagccgggacttgaacctgcactggctgagctgtggacgcggcctggcggcctctgcggagcgccctctgcggagctgcctctggcacctgtccacagcgtctggacaccgggcgaggaatggacccggaagcgtcccctgcccagggggtgctgcaggtacccaggggaagagcattcacgggtgccaggcccaaggggctcacgccagaagtagaccaattagacgactacaaacggtgctcagtgctgcagaagcagccggggacaggcggctgtcggagagggc

SEQ ID NO: 33884 - DNA, 740 bp, Homo sapiens; identical to SEQ ID NO: 30644
  chr10:88702294-88703034
  hypo

SEQ ID NO: 33885 - DNA, 141 bp, Homo sapiens; identical to SEQ ID NO: 30645
  chr10:93567138-93567279
  hypo

SEQ ID NO: 33886 - DNA, 185 bp, Homo sapiens; identical to SEQ ID NO: 30646
  chr10:93572713-93572898
  hypo

SEQ ID NO: 33887 - DNA, 577 bp, Homo sapiens
  chr10:98129733-98130310
  hypo
cgggactgaaagccgggcgtgtctgactccacaactcctgctgtgaatcatcacactctgccccggccccagcgtctccgggacttaccccagagccacagaagcggccgagcctgggcgctgagctgtcgtagccgtcgtaggcttccatgtagtcgtagccgcagtcggcctcctcctcaacctcaaaggtccggaatgtcagctccacgccgtagccgtcctctgccacgatcacccagtcacagcgggcctcgctcgggtagttgttgtccccaaactgggcgtgggaatagagctctttggtctgcacttcagccttcagcctgcccccgcactctggagcagagagaagtgagatgtcccctcagcacaagacaccctcgtgcctcccgcctgcgtctgctcggctttctctacagagcctggtgcgtgcctggcaggagaggccaggtagtctcgtcaccccatttgatggaggagtacacagaggcccctggctcccaggtcagggctccctcgggggtgcaaagtggccctcacaagccaaggtcccctgttcccagcttgagaatac

SEQ ID NO: 33888 - DNA, 186 bp, Homo sapiens; identical to SEQ ID NO: 30647
  chr11:1015850-1016036
  hypo

SEQ ID NO: 33889 - DNA, 253 bp, Homo sapiens
  chr11:112370531-112370784
  hypo
cggaggcggccaccgcgtgcaggaagggtctcccaggtggccggagaacccacaggcgtgtacggacaaggtgccctgggtgccctggctgacccctggtcagcccggccaggggtagagaccttcccggaaggcgaagatcgcataggtaactgggaaagtgtgttttttgaggtgggggaaccccatgcagccaggtcagggctgcagggtaggccgcctgccccacaatcagagcactgcctcgttaccc

SEQ ID NO: 33890 - DNA, 114 bp, Homo sapiens; identical to SEQ ID NO: 30649
  chr11:113746570-113746684
  hyper

SEQ ID NO: 33891 - DNA, 317 bp, Homo sapiens; identical to SEQ ID NO: 30650
  chr11:116691767-116692084
  hypo

SEQ ID NO: 33892 - DNA, 238 bp, Homo sapiens
  chr11:117746376-117746614
  hyper
cgaagccacagagacaaaggaagtagtggcagagagcacactggtggggagaagcctccagtagccacggtcccgcgagcgtgcaggcttgcagcaggtgacgcggcagacccatgtttccagcgaggctgctcccagctcccaccctcgggtgcctcctctaccagccaccacttgtaagagccagaagccagcgctgggagctccaggctgcacacccaactctccacggaagccc

SEQ ID NO: 33893 - DNA, 744 bp, Homo sapiens
  chr11:119210431-119211175
  hyper
cggctctcggagcgcttggcgctgaaggcggatcgcggaggcaccgagcactccccggcaggcccggtgggccccgcgggtcccgcctctcctcgcggcccggggtcccctcgaggtcccggcagtcctgcggggtaagcggggcggcagggtgagagtagcggcggctcagcccgcagcggggcggcgactctaaggtcaccgtacccctccccgcccctgcctgagcttcggccagcgcctcctcccgcacgggtacctcctccaccccttcccgcagggcagatctggggggctggccaagggggctcccgccgcctgggcccctcccccgctcagggctgcaaagcgcggggagtggcgccccctggcgggagacccgagtcccggacaccgggagctggagctgcggccgcgcctgctcggacatcgccaccgatagccgcggcggtgccttcttacccggcctcccgccctcgcctttctctcccggagccccgggcgcgccgtcgcggccgtcgcggccatcgcggcccggcaagccctggctgccatggtggcccggcgtgcctggaaggccggggtgccccgggcagaggctggggatcttgttgtcgtccagtgggggcgagccggccgccaggcccaggagcagcaggacgaggagtggcctcatagcgctggcaccgggagcccggacgccggggtcctctcgcagtctgtggaccaggcaggactggagtc

SEQ ID NO: 33894 - DNA, 139 bp, Homo sapiens; identical to SEQ ID NO: 30652
  chr11:12073866-12074005
  hypo

SEQ ID NO: 33895 - DNA, 875 bp, Homo sapiens; identical to SEQ ID NO: 31875
  chr11:12131738-12132613
  binary

SEQ ID NO: 33896 - DNA, 232 bp, Homo sapiens
  chr11:1228791-1229023
  hypo
cgcagctcaggaagccaccggtagctccactgagaccagcctcctctcccggggcgtctcagctgtccccggggccacgtccccccctcacttgggtctccacagcagcgccggccgagctggtttgcagactctgcctctggagaatcgtgggcggtggctcctgtttgcctacgtgtgtgctgcatggacagagctgcaaggccccgggcgaacatgcaggcagacggac

SEQ ID NO: 33897 - DNA, 191 bp, Homo sapiens; identical to SEQ ID NO: 30657
  chr11:124616924-124617115
  hyper

SEQ ID NO: 33898 - DNA, 619 bp, Homo sapiens
  chr11:130079199-130079818
  hypo
cgcggattacccgtttgtcagccccgggcatctgggctgttccagagttttctagtccaatgacccgtggggagcgtctcgaatgacgctgccctcgaagcagcccggctctcagccccgtcctgccctctccccaggcactggcgcgctgatcctgcaaaagggtgagatccgcgtcatcaaccagaccacctgcgagaacctcctgccgcagcagatcacgccgcgcatgatgtgcgtgggcttcctcagcggcggcgtggactcctgccaggtggcccccggggcaggagggcggcaggtgggccccgggagaggcgggactggggactcacggcagggcttgtctccgcccagggtgattccgggggacccctgtccagcgtggaggcggatgggcggatcttccaggccggtgtggtgagctggggagacggctgcgctcagaggaacaagccaggcgtgtacacaaggctccctctgtttcgggactggatcaaagagaacactggggtataggggccggggccacccaaatgtgtacacctgcggggccacccatcgtccaccccagtgtgcacgcctgcaggctggagactggaccgctgactgcaccagc

SEQ ID NO: 33899 - DNA, 90 bp, Homo sapiens; identical to SEQ ID NO: 30660
  chr11:1301047-1301137
  hypo

SEQ ID NO: 33900 - DNA, 278 bp, Homo sapiens
  chr11:130785392-130785670
  hypo
cgctcatccttctccgaagctcctggaccaaccctttcatggctgcctccatttcttcctcaaaggctggctcctggctcacggaacggtaccaagataacacaaaatctcgaataatcatctggatggtgcggttgatctcccgttccagctgcctttctgcctcagggcatggaggacaggtggccaacgggatgaagcgttccagatgcagtcgacctgaagccactccagcgaggctggagcccagccatcctcccagcaccactagcaatgcc

SEQ ID NO: 33901 - DNA, 149 bp, Homo sapiens; identical to SEQ ID NO: 30662
  chr11:134088886-134089035
  hypo

SEQ ID NO: 33902 - DNA, 196 bp, Homo sapiens; identical to SEQ ID NO: 30663
  chr11:134230275-134230471
  hyper

SEQ ID NO: 33903 - DNA, 175 bp, Homo sapiens; identical to SEQ ID NO: 30664
  chr11:134317588-134317763
  hypo

SEQ ID NO: 33904 - DNA, 157 bp, Homo sapiens; identical to SEQ ID NO: 30665
  chr11:134852683-134852840
  hypo

SEQ ID NO: 33905 - DNA, 762 bp, Homo sapiens
  chr11:1477651-1478413
  hypo
cgtgttccagaagccggtcaagttccaggttgatatcacctacacggagggtggggaggcgcagaaggagaacggcatctactccgtcaccttcaccctgctctcaggtgagctggcgcccccagggcggctccgggcccaggcccgtccagggcataaccccctgtctcccctaggccccagccgtcgcttcaagagggtggtggagaccatccaggcccagctgctgagcacacacgacccgcctgcggcccagcacttgtcaggtgaggcgggctcagctccggccaacctgcggcctgcgagtggggcgtggccagctggtgctgcgcggacgggaggcgtgaggacccgggcgcagcctcctggcccctcttgacggacgcccccacctccctgccccgagctgtggctgcacccctcagggagcagagcccctccctggcctggcgggaccacccgcctcgcctctgcacgccagggacatagggcgcagccgcaccacactgaaaggcgcctcttgtccaccgtagaaccccccccaccagcgccaggactaagctggggtgctgggcttaagggccagaaggtggccaccagctacgagagtagcctctgacgctggcaggtaaggcgcccggcctgtgctggggcggggaggggctgcgggcaggtcctcggcggagccaggctggccctgagcagggccctccatgcccacccacaggtctcggccctggacaggccaagcatgccccgggc

SEQ ID NO: 33906 - DNA, 360 bp, Homo sapiens
  chr11:17497463-17497823
  hyper
cgcacgattgtcccggccgtggcgcccaactttgcaagcaagggcgccggggtcgctgcgtcggcgagtcggagctactttgcgcagagcctgagaagttgcgctctggagacacatgcccgggtggggtggcgggggaagggaatccaagtccctagctctcgcctctcctcgcccagggcgcgggcctgggactgtcagagatcacggaccactgcgcggctcagcccggtgaaagcataggggttagctgggcctccatcccagactccaaagcacaggcttccctcttccctaggcccagctgcggctgacagggaggctgccttgcgggaggggtgacccggctccctaagctgc

SEQ ID NO: 33907 - DNA, 125 bp, Homo sapiens
  chr11:1975930-1976055
  hypo
cgcgcaggaatgaagggcgcacgacatgagaggcaactccagaacaaaccgctgccgccagctgggccgagctccgtgctcggggctccggcctccaggtccaggcaggcggcagcccccagggc

SEQ ID NO: 33908 - DNA, 917 bp, Homo sapiens; identical to SEQ ID NO: 30670
  chr11:19798519-19799436
  hyper

SEQ ID NO: 33909 - DNA, 755 bp, Homo sapiens
  chr11:2435992-2436747
  hypo
cggcctccgtctccaggtgcgacatctctttgaggattttgcaggcggccagtgcggctgccacaccttcctggccctacgagacctggtctcaggaggccgcccctcccctgcccccgcgctgggcccgcggcctgggctcaccatggcccagaagtaggtggccatctcgtggcggttctgcagcacggcccacaggaacaggtcccgccaggggttctcgctcttctggttcaggtccagcagccacttctggcccgtgggccgcttggccgggcccttctcctggaggacacgggcgtcggcctcctgctgcggccccagcctcgccctccatccccacggagcccccgctcaccgccctcctgcggtcccctggccggccgtcctggtagaagcctcggcaggcgtcctgcaggaagtccttgagtacgcgggagacctcgtgcagggagaaggccggtggccccgcgggtggctcccgggcctgctgggtgcccaggccggccagcgtcagccgggcctcctcctgcttccgctgcagcaggtcgaagagcaggctcttgcgtgacacggagcggtagagctcctgcagccgcccatacgtcaggaagtcggccacgtctgcgccgttgtccacaaagaggcgcacaaactcgggcttgttgctgaccagggcgtccaccatcacctcctccaggtcacaggacttggcggccatgggcacccgagggaagggggacaagagagtgagc

SEQ ID NO: 33910 - DNA, 318 bp, Homo sapiens
  chr11:3110962-3111280
  hypo
cgatgacaaccccagccgcggcctcctggcctccccacctcccgccctagctctaccaggtctctcgcactctctgacccggagtctggatggacaccctgagtgtggcccacctgtgcagctcctgctgggcctctcggatggagaggatggcctcgtgcagggcctgcagccgccgcgcctccttcctgcaccgagggcatgggctctcaccgcctgggacggccccgagtgagacaaaggaggggaggggaggagtgaggatgagctggaggtccagtggggctggcacgtgggtcacagggtcatatccagctc

SEQ ID NO: 33911 - DNA, 171 bp, Homo sapiens; identical to SEQ ID NO: 30674
  chr11:31808842-31809013
  hypo

SEQ ID NO: 33912 - DNA, 718 bp, Homo sapiens
  chr11:32448462-32449180
  hyper
cgcggccactcccccacccaatctcccagggcaggcgcttttccttccttcatgacctcactacctccttcccttgacgtcagccccgggtccccgcgcggaggggagggaggatggggatgggtttgggggcagccggtgtcaggatccccgagcaccagggaggagggggctatgaggtcatgcgcgcccaatcccgggccgcacaggcctcgcgctgctgctccccggcccccgccccaacttccagccccgtgcgggctggtgtgcgccgcagttactaggcaaccctatcgcagacgcgggcggccggccaagttcacccaaagttgaagaaaaaatttgggggagagaaggtggagcgagaggcgagaagaggaagcacggagcggggaaaagcttggaagggaatgaagctggccttgggcctcccgctcacaggaagaaggtcccacgcgggccagagcagcctccccgcagggccctgttgcgacccgatctccgtcctgcaccccggccgggggcccaccccagagcgtagcaggggcgctgggaacgacgtccacaaagcgctgccacgggtcgaaaccctggagggttgaggtggggagaaggctgtggccaaggctgtggccgaaggtacgcgccttcgaggtagtctggccggtgtggccattggatgggtttgaggtctcagaaccgagtgggagtggactcc

SEQ ID NO: 33913 - DNA, 862 bp, Homo sapiens
  chr11:32455013-32455875
  hyper
cgagccttgggcgaaggtacctcctgcaaaagatacactctgcttcccacgcattccaaaaacatcccggtccctaggccctcgagtaattttgctccaggaaaagcatccgccattgtattagtaaagcgtttactaaattaccgaatcaaaccgaactggcttaggttctcaatagcgtggaaatccactgaaaataaatgaagagggcaaactacaggggctccgcaggttcgggtccgcgccgcccaggcgaaagagaggtgggcgggcatcggcgcgggatgagaaaccaacctgatacttatcgtgtgccgagttccctccttgtatcctgactaagcacagcgaataaccctgtccttgttctaaccccaggtcttgaagaaatactgtcccagctgagccccgcgtttacaagatgaagaggcgccccagatgcgctgaaagaaaggccaaagctcgtgcctccttccactgcctgcggtagaacctggtcccgcatagcttggactcggataagtcaagttctcttccatccccagaacctgcgtggccgccgcctgagcgaagcccagtgaagatccacttctgtattaccatacgcgggagctatccacggacacgacgctgttccagaaagccatttagttactggaggtgcatgtgctcattctagttctctacgatacttaatgtgcacctaagtgtgtgccaacaccgtattataagggctggaggtgctcctggacattttagcgctgcggaggcagcacagcacaggcgctcacccccgcgctggtcccactccgaatccagagtccagacgtctgaaaagcgctacgcttggtgacaatttggc

SEQ ID NO: 33914 - DNA, 473 bp, Homo sapiens
  chr11:32459404-32459877
  hyper
cggggaggggaagagcaccggtgcgaaccccggggtgccccctcgcccgacttggacttctccgactaaagaggtgggaggagttccctgcagcctgcggggccaagaagaaagtgctaagctgaggagccgcagtcggaggaccccagggacccgacaggaagtctccgtacgaccccaacggatccacatgcccggaagcccaggcgacactaagccagcgctggggaactgacgtactcctgcagtcgcagggcgctccatgcctctctgtcctcttctttgttgtgggtaacgttctctgcgggagacctgaggttttccaagggggacatgccagctacactggccttggcgccctgagctaagcaccaggactcacagcctagcacgaaggcaggtagcaccttcacccgccgcggacgataggcgctctcctgtacctcctttagctcgcgaggcccgcccttcgc

SEQ ID NO: 33915 - DNA, 236 bp, Homo sapiens; identical to SEQ ID NO: 33050
  chr11:3249619-3249855
  hypo

SEQ ID NO: 33916 - DNA, 261 bp, Homo sapiens
  chr11:35684937-35685198
  hypo
cgaggcaggggaagagagtgagtcggaggaagagagcgagtcagaggaagagagcgagacagaggaagagagtgaggatgagagcgatgaggagagtgaagaagacagcgaggaagaaatggaggatgagcaagaaagcgaggccgaagaagacaaccaagaagaaggggaatccgaggcggagggagaaactgaggcagaaagtgaatttgacccagaaatagaaatggaagcagagagagtggccaagaggaagtgtcc

SEQ ID NO: 33917 - DNA, 808 bp, Homo sapiens; identical to SEQ ID NO: 30677
  chr11:376596-377404
  hypo

SEQ ID NO: 33918 - DNA, 175 bp, Homo sapiens; identical to SEQ ID NO: 30678
  chr11:380592-380767
  hypo

SEQ ID NO: 33919 - DNA, 354 bp, Homo sapiens
  chr11:43543814-43544168
  hypo
cgtgtggatagacagtggcaacgacaacgtggacatcaaggctgccgcgagctcggaattgttgtgtgcaacatcccgtccggagccctggaagagacagccgactccaccgtctgcgacatcctcaatctgtaccggaggaacacgtgggtgtgccaggcactgcgggaagggacgtgggttcagagcatggagcaaatcctcgaggtggccttgggagtggtccgcatccgtgggtagacgctgtgggtctcatgagctttggtcgcacgaggcaggcagttgcatttcaagccaaggcctttggattcagcgtcatattttatgacccctacttgcaggatgggatagaac

SEQ ID NO: 33920 - DNA, 157 bp, Homo sapiens
  chr11:43604752-43604909
  hyper
cgcagcgcaggcggctcagggttattgcgaccctagccccctcacttctccctccgaggctaagtgtgggactagggctccagggcccaaggagcaacggccgaacccggcgtcgtgcggcaccggagcgagtcctctcctcgcctcgcctcgcctc

SEQ ID NO: 33921 - DNA, 134 bp, Homo sapiens
  chr11:46920025-46920159
  hypo
cgcgcccagccggtagtggcctctttggctccacaagccttctccttagttcaagcccaacctaattccatttccccactcactgcagttgcgctcatcagactggtcatcacagtccgcgtcaccatcgcagc

SEQ ID NO: 33922 - DNA, 173 bp, Homo sapiens; identical to SEQ ID NO: 30682
  chr11:61490870-61491043
  hypo

SEQ ID NO: 33923 - DNA, 631 bp, Homo sapiens
  chr11:61722665-61723296
  hyper
cgtgctgggtgagttcccccttctggctgttccgggtccctgtggccgcccaggctccagacaggccaggggaggatcacgaggagctgcggcaaggggctggggagggggcgggggaacgccagcggcaggtcggcgcctctctgtagggaaaggtgcggactgcagccagtgaaactgaagttagacgttaggtaagacgtcctgccgttagcaatgaaaaccccattttctgagggaagcgctgacatcatggtccctggagcccctgcgcgggaggggagggggtctggcggatttctgggaccagcagggggacccccgggtgacagaacccttggggctctcgcgcctccatgcgaggctctgcctgcctctcgctcccgagcgccttccaggagggctgggggctaggcccgctcgcagcagaaagctggaggagccgaggcatcgccgggcgctgggccctgggctctggccgcagcctggcccctcgcccctcgccccccgcccctcctgcccaggcttctacgtgacgctggtcgtgacccgctggtggaaccagtacgagaacctgccgtggcccgaccgcctcatgagcctggtgtcgggcttcgtcgaaggcaaggac

SEQ ID NO: 33924 - DNA, 213 bp, Homo sapiens; identical to SEQ ID NO: 30683
  chr11:62369471-62369684
  binary

SEQ ID NO: 33925 - DNA, 428 bp, Homo sapiens; identical to SEQ ID NO: 30684
  chr11:62389464-62389892
  hyper

SEQ ID NO: 33926 - DNA, 240 bp, Homo sapiens
  chr11:63779104-63779344
  hypo
cgcaagcagggaatcagggctgcgggacgaagacatggagcagggcagtgcatcagggttctgggcagagtggccagggcaggcaggatggcccttgtgcgtgttcgaacaatgggtggctggtcatgggaggggcgcgggtagaggcctgaactcctgtaggagggatgtccagggaccccacgggaagatgggtgtgtctgggcagagtcagatggggtctaacttgggcaggtaggc

SEQ ID NO: 33927 - DNA, 80 bp, Homo sapiens; identical to SEQ ID NO: 30686
  chr11:63864329-63864409
  hypo

SEQ ID NO: 33928 - DNA, 305 bp, Homo sapiens; identical to SEQ ID NO: 30687
  chr11:63885581-63885886
  hypo

SEQ ID NO: 33929 - DNA, 357 bp, Homo sapiens
  chr11:64129097-64129454
  hypo
cggctccacccggcaggctgtggactggtggagcctgggcatcttgctcttcgagctgctgacgggggcctcgcccttcaccctggagggcgagaggaacacgcaggctgaggtgtctcggtgagtagggctggacgtggagggcggccagagggctgcagggcctgcctgggcagggctgtgggtggggggcttgctgcccctgacacccccccaatcctcccagacggatcctgaagtgctcccctcccttcccccctcggatcgggcccgtggcgcaggacctgctgcagcggctgctttgtaaggatcctaagaagcgattgggcgcggggccccagggggcacaagaagtcc

SEQ ID NO: 33930 - DNA, 634 bp, Homo sapiens; identical to SEQ ID NO: 30689
  chr11:64135647-64136281
  hypo

SEQ ID NO: 33931 - DNA, 288 bp, Homo sapiens
  chr11:64478744-64479032
  hyper
cggacacacacacacaaccgctgagtggcccacagcttctagagggaccaggggagagaacgtcaggcctgaggcacacacgagctggaagaacagggacgaggggcggggagagacgcgcatgcgccgcccccagaccgatgggggagcccctccccacgcccagccagaccctaatggaagaggctcctcccagtgcttcctctcctcagcgccccctgccccccgacaccacagccccgccccgggccgctcagcccaggacccgcccgcacttcaccacttcac

SEQ ID NO: 33932 - DNA, 33 bp, Homo sapiens; identical to SEQ ID NO: 30690
  chr11:65307510-65307543
  binary

SEQ ID NO: 33933 - DNA, 61 bp, Homo sapiens; identical to SEQ ID NO: 30691
  chr11:66475619-66475680
  hypo

SEQ ID NO: 33934 - DNA, 250 bp, Homo sapiens; identical to SEQ ID NO: 29779
  chr11:67432668-67432918
  hypo

SEQ ID NO: 33935 - DNA, 74 bp, Homo sapiens; identical to SEQ ID NO: 30693
  chr11:67450470-67450544
  hypo

SEQ ID NO: 33936 - DNA, 213 bp, Homo sapiens
  chr11:68433004-68433217
  hypo
cgtgaagaagttgggataatgccatcaaaagggtcacggcgccctcatgattctcttgacaggcatgaatttatataataatcaaaaagcattttcaccattaagcagccccacagcctgccaaggccatcgtggatgacggtcgcattactcacgcgcgttgccacccaaccggctggggcatcgccgcacttcccattctgctgggaacac

SEQ ID NO: 33937 - DNA, 446 bp, Homo sapiens
  chr11:68437411-68437857
  hypo
cgcgttctagaacaaggttcgaactctgttcctgcaggtggcctgaccgcccccaaaaggccttcccacctgggggctgtggacagtggaaggcgagcgtcctcctggaaggttttcaggcacaagggggaccaaattgtggacacgcgtgaacaggtcctgggagtgagcaagaacccctgaggcccctcccaggaagaggttcagcaggggacagcatagccagaccgtccacagtctcggcggaccaaggccacgccacagacgctccaccccaggtggagaagaggcggctggcaggagtcctttctccgggggcccccccgggcacttcacagctcccccgcacgctagagctgcacgttagagctgggccaccggcctcgagtttcctttcatccccacagaaccagctctcgaggggccctgggcgtggggaccacccc

SEQ ID NO: 33938 - DNA, 274 bp, Homo sapiens
  chr11:68564274-68564548
  hypo
cgccgccccaccgtcctcgtcagacagcagcccgggcgggtggactcaccatggcataatagttgctgttcaccatgagcggccctcgtcctcggaggtagatgtactcctcccaccagtcgctcacctagtgggcgcaaacaccagacaaacccgcaggctcagcaggggccaggcaggctccctggcagcagcccagagccgcggggaagggcaggcagtgcttttggcagacatttcggcgtctaacaggggccattccagaacagggaac

SEQ ID NO: 33939 - DNA, 62 bp, Homo sapiens
  chr11:69466037-69466099
  hypo
cgtggacatctgagggcgccaggcaggcgggcgccaccgccacccgcagcgagggcggagcc

SEQ ID NO: 33940 - DNA, 267 bp, Homo sapiens; identical to SEQ ID NO: 29781
  chr11:69931095-69931362
  hypo

SEQ ID NO: 33941 - DNA, 109 bp, Homo sapiens; identical to SEQ ID NO: 30697
  chr11:69972743-69972852
  hypo

SEQ ID NO: 33942 - DNA, 189 bp, Homo sapiens; identical to SEQ ID NO: 30698
  chr11:71185648-71185837
  hypo

SEQ ID NO: 33943 - DNA, 197 bp, Homo sapiens; identical to SEQ ID NO: 30699
  chr11:71188519-71188716
  hypo

SEQ ID NO: 33944 - DNA, 835 bp, Homo sapiens; identical to SEQ ID NO: 30700
  chr11:71229615-71230450
  hypo

SEQ ID NO: 33945 - DNA, 536 bp, Homo sapiens
  chr11:72465672-72466208
  hypo
cggccggatgatcaacaaccttaacaaaattaagggcagacgcaggggaccgcggcagcggccatgaggcaggtgggaagcaggcacagtgatgagccggctgaggctgtgggatcgtttattggggctctgtccagccaggctgcagcacccgcctgggcctggcccggtgccaccaggtgccgggtgggggaggggagaaagtgcaggagcggccgccgccccagggctcgcccggtcctgtctccgtccctgaagcggtgcggcgctcaggtgagcgaggtgtcgtcgtcgctgccctcgccgcccgcgccgcccatccgctcctctctgctctcggccaccgcgctctcgtcgatgttctccagtgagtccgcatgctgcaccgacagctccgacagcgccaggctcggcaacgggctctgctccgggtgcagccacggcttgaagtgaggcaggtgcttctgtttccactcggggtacttgaggcacgccttgtacatcttcttcatggcctgtgggcccgccgccccgcc

SEQ ID NO: 33946 - DNA, 501 bp, Homo sapiens
  chr11:72475539-72476040
  hypo
cgcaggtgaagaaactgaggcaggccgggtcgtgggggtcaggtaagtgtccacaggcctccctagcctggcctggctcgtgccctttccatagcccccagcaggcagcactgctgcgctaagcagaagaaattacacccatctttgttcctgcgggcggcggtggccacgccccaaaggtgtaattctaagaggcttggggagggacaggtggcggggtagggctgagtctctggagagcaccaggtgggcgggccggtaccaggaacccccagctattaggccctggctgagtgagtgtccacaccagatgttgccgtcaggtgttgcctggtaggccatcttggctgcccccggagaaactccccctggaaacaggaacccaaggggtgttgctccaccaaggagccatgctgggcttgagtacgtttaaagcctggtgacagcagggaccccgacatgcagtggtattacatttgagaaaacaggccagccaggtgc

SEQ ID NO: 33947 - DNA, 464 bp, Homo sapiens
  chr11:72532189-72532653
  hypo
cgtgactttgggcaagacacttaaacctctctgtcggtgtccttgtctgtgaagtgagagtggcagtaccagcctcctggtgtggtgaggatggaaggagcgtgtagcctgctgggaacatcatggcgcccgagggccggatgggcatttggcagcctctgcgcgaggagtcctcgcagtggttatgcatggtgctgggagcggagcgctggcttcccactcttcaggcgaggcagtggagcgggttgctcttgccagagaggttcctagtagggtcgcagagaaacgaagcggcacggcgaggattgggacccagggctgactccagagcccgagggccttccactgctccacaaacagcagcgcgtccctgtgcaaggtcccaaacctgtgtggggctcagcttgcttttcaggaagggggcgggcaggtgagcagccgactcccttagcgccttcggcccc

SEQ ID NO: 33948 - DNA, 364 bp, Homo sapiens; identical to SEQ ID NO: 30705
  chr11:799220-799584
  hypo

SEQ ID NO: 33949 - DNA, 762 bp, Homo sapiens
  chr11:823426-824188
  hypo
cgggtagtgaagggaggtggctgttgggggtgccagggattccaggggcagaacgggcatccctggctccctccgctccatttaaccctcctcactgcaggtgctgcgagagatgtgcaagcagggataccgggatggcctgcgctttctgcagcggaacggtgcgcggacccgggcgggagagggcggggtgggctcggctctgctaccccctgcgggccgcggccgcgctgatgaactgagaatcccttctctccccaaccccaggcctcctgaaccggcccaaccccttgctggcgttgccccccgcccgcccccacggcccagaggacaaggaccaggcagtggagagcgcccaagcggaggattactcgcagctgcccggagaagatcacatcctggagcacctgcccgcccggctcaatgagggtgcgcacctgggggacgggaggggaggaggggaggcaggagggaaagagagagaggagaggacggtgagcaggggagggaagccgagcgggtcctgggccccgctgcctccactggccgccgacctcccgcccacccgcagccctgctggaggcctgcgtggagcccacggacctgctgaccaccctctccaacatgctgcctgtgcgtctggccacggccatgatggtgccctacacgctgccgctggagagcgctctgtccttcaccatccggtgtgagggctggggggtcgggagaggggcccaggggacggactttgggatcatccgc

SEQ ID NO: 33950 - DNA, 284 bp, Homo sapiens
  chr11:86085693-86085977
  hyper
cgctgcctcgagcttctgaatcgcctgggcaacctggaagccgcccatctaagggggtgaggtcgaatcccagccttgacgccttagcaaccgagcgagcctttctcgcgtcccagcaacgcgcccttccctctgccgggcctattctccctggtgcccctcccttcctcgaggctgcagctcacccctcattgggtctctcgttggtcaggagggcgcgggtctgcacactctcactcggtgccggacatcagttcctgcggctcttgctgtgggagctgccc

SEQ ID NO: 33951 - DNA, 127 bp, Homo sapiens; identical to SEQ ID NO: 30709
  chr11:93212118-93212245
  hypo

SEQ ID NO: 33952 - DNA, 226 bp, Homo sapiens; identical to SEQ ID NO: 30710
  chr12:109507780-109508006
  hypo

SEQ ID NO: 33953 - DNA, 143 bp, Homo sapiens; identical to SEQ ID NO: 30711
  chr12:109898449-109898592
  hypo

SEQ ID NO: 33954 - DNA, 159 bp, Homo sapiens; identical to SEQ ID NO: 30712
  chr12:109970799-109970958
  hypo

SEQ ID NO: 33955 - DNA, 390 bp, Homo sapiens; identical to SEQ ID NO: 30713
  chr12:111800610-111801000
  hypo

SEQ ID NO: 33956 - DNA, 58 bp, Homo sapiens; identical to SEQ ID NO: 30714
  chr12:113704033-113704091
  hypo

SEQ ID NO: 33957 - DNA, 615 bp, Homo sapiens; identical to SEQ ID NO: 30715
  chr12:113796265-113796880
  binary

SEQ ID NO: 33958 - DNA, 90 bp, Homo sapiens
  chr12:114236438-114236528
  hypo
cggacaagcttcctcccggtcatcctcagggcagctgtagcatgactgtcacctcatcagcgaggccgtgcctgggtcccgagtgagggc

SEQ ID NO: 33959 - DNA, 966 bp, Homo sapiens
  chr12:120031912-120032878
  hyper
cgcgctctctgcggctcccttcctcacggcccggcccgcgctaggtgttctttgtcctcgcacctcctcctcacctttctcgggctctcagagctctccccgcaatcatcagcacctcctctgcactcctcgtggtactcagagccctgatcaagcttcccccaggctagctttcctcttctttccagctcccagggtgcgtttcctctccaacccggggaagttcttccgtggactttgctgactcctctgaccttcctaggcacttgcccggggcttctcaaccctcttttctagagccccagtgcgcgccaccctagcgagcgcagtaagctcataccccgagcatgcaggctctacgttcctttccctgccgctccgggggctcctgctctccagcgcccaggactgtctctatctcagcctgtgctcccttctctctttgctgcgcccaagggcaccgcttccgccactctccggggggtccccaggcgattcctgatgccccctccttgatcccgtttccgcgctttggcacggcacgctctgtccaggcaacagtttcctctcgcttcttcctacacccaacttcctctccttgcctccctccggcgccccctttttaacgcgcccgaggctggctcacacccactacctctttaggcctttcttaggctccccgtgtgcccccctcaccagcaaagtgggtgcgcctctcttactctttctacccagcgcgtcgtagttcctccccgtttgctgcgcactggccctaacctctcttctcttggtgtcccccagagctcccaggcgcccctccaccgctctgtcctgcgcccggggctctcccgggaatgaactaggggattccacgcaacgtgcggctccgcccgccctctgcgctcagacctcccgagctgcccgcctctctaggagtggccgctggggcctctagtccgcccttcc

SEQ ID NO: 33960 - DNA, 62 bp, Homo sapiens; identical to SEQ ID NO: 30717
  chr12:122237462-122237524
  hyper

SEQ ID NO: 33961 - DNA, 582 bp, Homo sapiens; identical to SEQ ID NO: 30718
  chr12:122460955-122461537
  binary

SEQ ID NO: 33962 - DNA, 63 bp, Homo sapiens; identical to SEQ ID NO: 30719
  chr12:122463078-122463141
  hypo

SEQ ID NO: 33963 - DNA, 345 bp, Homo sapiens; identical to SEQ ID NO: 30720
  chr12:123874193-123874538
  hyper

SEQ ID NO: 33964 - DNA, 192 bp, Homo sapiens; identical to SEQ ID NO: 30721
  chr12:124335343-124335535
  hypo

SEQ ID NO: 33965 - DNA, 258 bp, Homo sapiens; identical to SEQ ID NO: 30722
  chr12:124456333-124456591
  hyper

SEQ ID NO: 33966 - DNA, 487 bp, Homo sapiens
  chr12:124879871-124880358
  hypo
cgccccacccccgctccctcctgccatcgcctggaacacacagccattagcagccaccctgagcagtaattgtccagattgctgtaattcacggcagacgaacatgctgctgctcacgacattattacaaatgtcactgagcagggcctccgcgtgcacggcccccaggggacgctcactgccgtctccatgggcaggacccaggatgagctcactgtcatcactgaggacccaaccttgagatggtgggacacgggctcctctccgccggtgagtcatccccagccgtcctcccagcctccggatctgcccttccagaaggcaaacagagggcaggcactgtcttcccagttctcaggcaatgggcggtgggggcgggggtggtcaccggtgaggaggtggtagtgacaacacgagacacgagaagggatggagaggcggtgggaccctgggctgaccgtttggggatgtccacgcggagtcctcc

SEQ ID NO: 33967 - DNA, 429 bp, Homo sapiens
  chr12:124893329-124893758
  hypo
cgaaggttacaagcactccaagggcattgcttcctgatcatctggctacatggagctacgaagtcatccgtgccgtggaggtgacttccgccaactccatgcacagggtgagaacaggataagacagcctggtgctaggggcatctttccccagttccaagtcagcggcagcacgttgtcacgtggcactgggcacggtgagaggatttatttacaccatggcaaccggcacatgctacaaacgcagcttccccctacagaaagctggttgttaaacatttaccagcactctacggcagaaagatgcgtgtcgacagaacgtgagcaacatttaacacgcacatggaagcctgttccgcctgtacagatgtgtgctgtgccagccgaggctctgttgtaaatcctaattcagatcccgacccgcaactc

SEQ ID NO: 33968 - DNA, 178 bp, Homo sapiens; identical to SEQ ID NO: 30726
  chr12:124970986-124971164
  hypo

SEQ ID NO: 33969 - DNA, 286 bp, Homo sapiens; identical to SEQ ID NO: 30727
  chr12:125605555-125605841
  hypo

SEQ ID NO: 33970 - DNA, 323 bp, Homo sapiens
  chr12:131623219-131623542
  hypo
cgctcccacccattctcgcactccgcccccgcccgcagctgtgtgattttccatttgcttagggaccacgtctgccctgctccatgggagctggctggctcatgggctgctctagccccacggctacagctgcgccgggtgtgtggcacgctccatgagtcaccgtggaatgaacgcagcgtggacagatgcatgggggtgaaagcgtgggtgccgggcagatgggtgagcagaggagggagtgagcgctcagcacagcacgcctgcagtgcccttaaggggagtcagcgtggagaaccgtgcggctggagacgccacagtgc

SEQ ID NO: 33971 - DNA, 588 bp, Homo sapiens
  chr12:132329469-132330057
  hypo
cggcccccgcccgctgaagcggtggacaggcacccccgttttaatttgcctttagcagacctctaggcaaggataggggctccacacaaggatgcctgtcccatgccgctcaggtcaggggctctgccgcaggatgccctgtcccgcgctgcccaggccccgcctcccagcccacctggctctctccctgcaggcccaggaaggacgtgccccacagatgcagcactcactttgacgcggtggcccagatccggggtgaagctttcttcttcaaaggtacctccagggttcccgtggcggttggctgagggccatggcccactctgggtgcagaccgtctctgcagcccggccctcccctctgtgcccccaggcaagtacttctggcggctgacgcgggaccggcacctggtgtccctgcagccggcacagatgcaccgcttctggcggggcctgccgctgcacctggacagcgtggacgccgtgtacgagcgcaccagcgaccacaagatcgtcttctttaaaggtgggtgggcctccccgtcgcactccgggcttcccgggccctctgtccgcctcatggagggac

SEQ ID NO: 33972 - DNA, 280 bp, Homo sapiens; identical to SEQ ID NO: 30731
  chr12:132603391-132603671
  hypo

SEQ ID NO: 33973 - DNA, 915 bp, Homo sapiens; identical to SEQ ID NO: 30732
  chr12:133147764-133148679
  hypo

SEQ ID NO: 33974 - DNA, 175 bp, Homo sapiens
  chr12:133280443-133280618
  hypo
cgggaatttagagaaggaagcagagacaactgagaagacagactggccgggaacacggaggatctgggatggaagaggggagagctgggaagccgcgcctctgagtagcgtgggggcagagtcgccatcctaggtgggtgcaggtgtatgcggaagcagcattcattcagcaagc

SEQ ID NO: 33975 - DNA, 337 bp, Homo sapiens
  chr12:298188-298525
  hyper
cgaattggtgcagggcgaaggaatctgaaagagggctgtgcggtccgcagagagcgaggcttgggagcccgacccaaagcgtgccctccagggtgcagcaccgacgggtgccgcggcgtttgcaggcggggagaaggcggcgggaagtactggactagctgcgggcaggggccggctgaggcgcgcgcccgcgtgctaggggccccgggggagggcggcggggacgcggcgctactcccctctgccacccggcggccgcagacagcgctgcgccggcctcgcgtttttcgttttccgccagacccggcctcgtaactgagagcatctggctgaagcc

SEQ ID NO: 33976 - DNA, 791 bp, Homo sapiens
  chr12:30322763-30323554
  hyper
cgcgacacgtcccagccaaggcgcggcggggagccttggacaggagtgcacttgaaggtgagggtgcagagtggccggtgggacttgtggctggtgttctcggccatgccctggccccagaagtcgttggtgaagatgccccagcagagcgaggcgctgggccgcacgtcggggttgttcacggtcgcccacgaactcgccctgcagggaacggccttagcacaggcagctcgcgcctgccagcagcgccgcggccccggctatcaacacctcctcctccccactgcgaatgccccgatcgtgctccccaaaacccaatacatccacgcccccaaaaaactgggaacccacgcgggtgccttctgtttaccgcagcgctctcactgcaggcgcttgagtaccagatggcgagagttcgcgcgcaggtggagtggggatcctggcgctaggctacccaggagaggaggggaagggcaacccgcggtcccgcctgtggtgcccggctgtgctcatccccacgccccagaccccaaaaggggctggggaggggcacatctggcggacccctcgcgggggaccaagcgggtttagcaggtgcgccgcctggaacccctacgcccaccttccagggagaaaagtgcctctgcttctcgggaagttcccggcttttcagcacccgggacaacagcagcggcacctggggagaggctctccaccccgccccgcgctcgcttccagtcgccagcttcgtgatcttctgcccggactttctctcacccgccgggcgctgc

SEQ ID NO: 33977 - DNA, 263 bp, Homo sapiens; identical to SEQ ID NO: 30734
  chr12:31255691-31255954
  hypo

SEQ ID NO: 33978 - DNA, 352 bp, Homo sapiens
  chr12:34358307-34358659
  hypo
cgtcggaggaaagggggcctcccggaaagctcaaagtctgagcaggggatggaaaactctggcgtccccactcaacagcagggcggtgctgcggcgatccagtgcacgcccttgccgccggcgatggcgggaggctcttggaggccggaaagcgcagcgcagcggcccacagtgctccggcgtggagggggagagcagcccggcagggggcgagtggctgaggggtccctgatccgagccccgcggcctccgagtggggatgaagcctggagtcaggcaggcgtggctgggccaggctcttgtgtcatccaggcatcactgccggtgtctatggccataccaccctgaaggc

SEQ ID NO: 33979 - DNA, 211 bp, Homo sapiens
  chr12:38595387-38595598
  hypo
cgcagaccgggcagtgcgggaaccagatcggcgccaaggttggcagccagggctctgagggcccagctcgggcctgccgggtggccagggaagatgttggtagcggcagtggtggggctggcgcccctgcgttgcggcccctgggctccctgccagggacgcagtggaactggccagctggcgaggcggccagggtggaccccagggacac

SEQ ID NO: 33980 - DNA, 984 bp, Homo sapiens
  chr12:45444133-45445117
  binary
cgcctgggccccctactcccgaagtggcatctccactaaagctcgagatgctccaggaagttcccaaaccggctctccctgggcgcagtgcgcaccgccggcgctcccagatccctggaccacccggcctgggggcgcgggcgcggctggggagggaggggagagctggctcacctggcgctgaaggctggaaggtacagtctcggtcccccggagcccggcccggcagcctcgcactgtccgcagagggactgagcacttgaaaagcccaccgcgttccgtagggcgccccggcggggctaacttgttcggctgcggggcacagctttaggggaactgggctagcaggcaggggccggagctgcgcgcccgcggtggccagggcggtcgccgggtcgtggggcgcgggcggctgcagcctgggcgttggggcgcccccgacccgcagcaaattctcgatcaggaaactcttgcccaggttgccaaagccgggcgcagcggggaggttgaggagcgcggaggaagccacaacgtcccagtacgcaccggcgtgggctgcgaccgcgctggggagcatagtgcggcgccaaccggtctgctgcgcgcccgccttgcgcccgcctgtcgcccgggcgccccgcaccgcacccagagccgcagcttctcgccgccgcctcccgcagggctggagcgcgcggagccaggcagggaggaaaggccacccgggacggcggcggacttggaacgatattatttatttgcgttgggcgtttttttaagggatgggaggagtgagtgtgggagggggaagctgtgagtttctctggccgacagcgtaggctctgggagcgcaggggggagtctttccccctctctatgcagatctggacgggttttttttttgttttttgtttttttctggacggacggaaggtgtgtccagcccatccattcatgtcaccagccccacaaagtgacagacgc

SEQ ID NO: 33981 - DNA, 774 bp, Homo sapiens
  chr12:47629013-47629787
  hypo
cgaacaagatgagctggtggacggaggccagcggggccacatgcacaacggccttaactaccgtgaggtccgcgagttccgctccgaccaccatctggtacgtttttacttcctcacccgcgtgtactccgattacctccagaccatcttgaaagagctgcagtcgggcgagcacgcccccgacctggtcatcatgaattcctgcctctgggacatctccaggtatggtccgaactcctggagaagctacctggagaacctggagaacctgttccagtgcctgggccaggtgctgcccgagtcttgcctcctggtgtggaacacggccatgcctgtgggcgaggaagtcaccgggggttttcttccgcccaagctccggcggcagaaggccaccttcctgaaaaacgaagtggtcaaagccaacttccacagcgccaccgaggcacgtaaacataacttcgatgtactggacttgcatttccacttccgccacgcgagggagaacctgcactgggacggggtgcactggaatggacgtgtgcaccgctgcctctcccagctgctgctggcccacgtggccgacgcctggggtgtggagctgccccaccgccaccccgtgggcgagtggatcaagaagaaaaaacctggcccgagagtcgaagggccgccccaggccaacagaaatcacccggccttacctctgtccccacccttaccttcccccacataccgccccctgcttgggttcccaccccagcgcttgccgctgctccc

SEQ ID NO: 33982 - DNA, 213 bp, Homo sapiens; identical to SEQ ID NO: 30743
  chr12:52294173-52294386
  binary

SEQ ID NO: 33983 - DNA, 231 bp, Homo sapiens
  chr12:52387815-52388046
  hypo
cggcgcagcccgcctgacggccctgcgcatcaagaagaccctctcccagctcagcgtgcaggaagacgtgaagatctaactgctccctctctccacacggagctcctggcagcgagaactacgcacagctgccgcgttgagcgtacgatggaggcctacctctcgtttctgcccagccctctgtggccaggagccctggcccgcaagagggacagagcccgggagagactc

SEQ ID NO: 33984 - DNA, 220 bp, Homo sapiens
  chr12:52467443-52467663
  hypo
cgctcggaggtgctggaggtgtcggtggaggggcggcaggtggaggaggccatgctggctgtgctgcacacggtgcttctgcaccgcagcacaggcaagttccactacaagaaggagggcacctactccattggcaccgtgggcacccaggatgttgactgtgacttcatcgacttcacttatgtgcgtgtctcttctgaggaactggatcgtgccctgc

SEQ ID NO: 33985 - DNA, 607 bp, Homo sapiens
  chr12:52913581-52914188
  hypo
cggtcctcaccctctggatgctggggtcgatttgcaggttgaggggagtcaggagactctggttgacagtgacctcttggatacctccaggagggcagacaggaaagccagggccaccgaagccacctccaaagccagctccgccaccgagcccaaagccaccaccagctccaccgccgaaaccaaatccactaccggcaccacctccaaagccatagccgcctccagcaccagcaccaaaccggttcctgaagctgccaccactagtgctgatggatatcctcttggagccccccaggttgtagaggctccggctgccatagccacccactccacaagcacccgcaaggctgaccctgccgaagccaccaccaccgccacccccggaccgggacacggaggtgaagctggtgcgggagacagacggggtgatggcagaggcggtgctgaagctacgactgcccccgctccggaaggacacacttgactggcgagacatggtggcttgttcctggtggagcaagagaaccaggcactagtgggttgggaggtgctggagagaacagagctcagcaggacgcagaaggtggctctgttacccaggaac

SEQ ID NO: 33986 - DNA, 194 bp, Homo sapiens; identical to SEQ ID NO: 30749
  chr12:54150983-54151177
  hyper

SEQ ID NO: 33987 - DNA, 898 bp, Homo sapiens; identical to SEQ ID NO: 31971
  chr12:54387801-54388699
  hyper

SEQ ID NO: 33988 - DNA, 277 bp, Homo sapiens; identical to SEQ ID NO: 30751
  chr12:56472747-56473024
  binary

SEQ ID NO: 33989 - DNA, 354 bp, Homo sapiens
  chr12:63195619-63195973
  hypo
cgctccgatgaccaggcactcatggggaatcttcttctcggtaaagaagcgtgtggggggcgtgctgggggagcccggggcccccacccctccgcgcagggaggctgcccgggtcagagtccggctgttggcgggcgtgttctcaggctcctcccccaggcaggtagggggcaggacggcggagttcttcaggatgtccacgatgtcctgcagctgctccgtgatgtggtgctgcagcaggcgtgacgccaccaccgcggccccggaccccgcgtgcccgtcaaacagcgaccaatagtggcaggaaacaccctcggattcctgtgggagaggacgacagggaggagtgagaac

SEQ ID NO: 33990 - DNA, 437 bp, Homo sapiens; identical to SEQ ID NO: 30754
  chr12:89747140-89747577
  binary

SEQ ID NO: 33991 - DNA, 105 bp, Homo sapiens; identical to SEQ ID NO: 30755
  chr13:100068654-100068759
  hypo

SEQ ID NO: 33992 - DNA, 617 bp, Homo sapiens; identical to SEQ ID NO: 29805
  chr13:106912373-106912990
  hypo

SEQ ID NO: 33993 - DNA, 181 bp, Homo sapiens; identical to SEQ ID NO: 30757
  chr13:110008382-110008563
  hypo

SEQ ID NO: 33994 - DNA, 95 bp, Homo sapiens; identical to SEQ ID NO: 30758
  chr13:110486576-110486671
  hypo

SEQ ID NO: 33995 - DNA, 204 bp, Homo sapiens; identical to SEQ ID NO: 30759
  chr13:112691506-112691710
  hypo

SEQ ID NO: 33996 - DNA, 192 bp, Homo sapiens
  chr13:112716622-112716814
  hyper
cggaggcacacagcacgcgcgcgtgcgcgcgcgcgcacacacacatacacacacacagttgtttgttcttcgattgtgaatgtgcggctctccacacgaaccgcccgaaagaaagcctgggtcgcttttgaggagaaggagtttcttgacccttccccgcaaacgctactggaacggcctccaaactaggac

SEQ ID NO: 33997 - DNA, 922 bp, Homo sapiens
  chr13:112760441-112761363
  hyper
cggagctgccctggctggtgattggaggtttaacgtccggaattcaggcgcttctgcagctcagatttgccggccaaggggcctcagttgcaacttttcaaaatggtgtttctggaaaataacaaattcagactcaactggtgacagcttttggctatagagaatgaaactgcttccctttggcggtggaactcttaaacttcgaagagtgaaagaatacaatgaaataaaatgccataagatcactggatttttcagaaaaaggaagaccccaaattactcccaaaatgaggctttgtaaattcttgttaaaaatctttaaatctcgaatttccccctacaacatctgatgagtgctttaagagcaaacgagcaaatcccacctcgagaatcaacaaacccaagctctggccaaggctctccccgcgttttcttctcgtgacctggggaatgtcccgccccatcgctcacctggctcttgtcatctcgctcatcttgaagtgacccgtggacaatgctgctccctgccgcagctccgccggtcactcaggcagaacggggtatgcaaatggcctggagaggccgaggccgaacactgcgcccattgtcccgggcgctcaaagcgccgagcagctgcgcagactttctgggctcggaccctcggccgccacgctaatgtcatcattgcaaaacatcagattttgagaactatgcagtctgaattcattagcagccttctcggcgaaggttcttttccccgtgacaagtttcaaagtccagaccccctccaacgttggtaggggtaggaagaggaggaggggcccagggaggggggtctttcgcaagtggggcctcgggggatccctgctctccttctggtgcattccgcaactttaaaagccttccttggggttctgagcgc

SEQ ID NO: 33998 - DNA, 134 bp, Homo sapiens; identical to SEQ ID NO: 30763
  chr13:113274734-113274868
  hypo

SEQ ID NO: 33999 - DNA, 282 bp, Homo sapiens; identical to SEQ ID NO: 30764
  chr13:113291506-113291788
  hypo

SEQ ID NO: 34000 - DNA, 926 bp, Homo sapiens
  chr13:113350364-113351290
  hypo
cgtctcggctgacggctgcgtggccttggcaagttggttgccccctgtacgcttggtgccccatctgcaaggtggggactatgatggtgcccacctggtgggtctgtgcagtgacgggacaggtcacggcgctcgtgcacgctgggtgcccagtgcacggggcgtctttgttgcgcgcatggacctgcggctgcatcaccgtccatgcttctgggcttcttaaggagaccgcctctcaccttgggctttccggaaccttctccccgcactcctcttcacgtggagagtgggtgaccttgccctgctctcccggggagagcggtggtcactggtgggaacgcccctgccacgcccagcagcctttctgcctctgcgcttgcctcctccggttggagcgagtgacccgttctgccgaagtccagtcccgtgtgtgctgcggccccgtctctctccctctctgagtgacactgtctgccctgctgcttgccgtcccgctgttggcaccgctttagaccccatatttcccagcggtcaccgtgctcatttttggcttccagctaccgtttttcttaggttaccccgcgtagctggcccgtccttccttctcctgtctcttctgtgcctaccgcggggggttcccttaccaaggtctccatcacccccaggcccacctccctcgggcccctctctgcccttgccctccacctcagcgactccgtggggcttttgtgatcccagctgcagttagcgagcgcccctgtgtgctcagagacacgccagtgagccgggaaggacagagacccaagtcccatccctctggggcccccttggaatgggggaggcgaacaggaaaccaccacagtgagtgttggggtgccccgcaggcgacggtgctgagaaaaagagagtggggttgggggcagtgc

SEQ ID NO: 34001 - DNA, 318 bp, Homo sapiens; identical to SEQ ID NO: 30767
  chr13:113383516-113383834
  hypo

SEQ ID NO: 34002 - DNA, 306 bp, Homo sapiens; identical to SEQ ID NO: 30768
  chr13:113477621-113477927
  hypo

SEQ ID NO: 34003 - DNA, 146 bp, Homo sapiens; identical to SEQ ID NO: 30769
  chr13:113508784-113508930
  hypo

SEQ ID NO: 34004 - DNA, 323 bp, Homo sapiens
  chr13:113825842-113826165
  hypo
cgtttgagcattatgtccccttgaaaatcagactgtaaagaactgacgattgttcatgatttcagattttaacagaacgagccaagacccgctgatgatcaagataacgcacgtccatgtgcacatgcggtatgacgcggacgcgggggagaatgacctgtcactgctggagctggagtggcccatccagtgcccaggtgcggggctccccgtgtgcacccctgagaaagacttcgctgagcacctcctcatcccacgcaccaggggcctcctcagcggctgggcacgcaatggcactgacctgggcaactcgctgaccacgc

SEQ ID NO: 34005 - DNA, 187 bp, Homo sapiens
  chr13:113984308-113984495
  hypo
cgggtgcgtgcatgggagcccaggtgcgtacatggaaacccaggtgcctgcatggaaacccgggtgcgtgcatggaaacccgggtgcgtgcatggaaacccgggtgtgtgcatggaaacccgggtgtgtgcatggaaacccaggagtgtgcatggaaactcaggtgcgtgcatgggagcccaggtgc

SEQ ID NO: 34006 - DNA, 150 bp, Homo sapiens; identical to SEQ ID NO: 30774
  chr13:114616940-114617090
  hypo

SEQ ID NO: 34007 - DNA, 351 bp, Homo sapiens
  chr13:29913861-29914212
  hypo
cgggcatagtcccagttgggaggagcggtgaggaggggccgggtgcggacccagcgcttcccattgacgtagacgactttgcagccatccttgacctgggagcggagaaggggcctggaccgcaaggcccggtgtttctgggattggggcggcaccctggcccggggcggcactatggtccggggccagcccaggtaccagctcaagtagttgcccatgacagcaatgcagtagtcgggacgttctcttagaaattcagcttccagaagtttccgaagtctgcggccggggccaagtgtgctgagcttggtgaccgttggaatcaggacgccagaaagcgcgcaaagcatc

SEQ ID NO: 34008 - DNA, 165 bp, Homo sapiens; identical to SEQ ID NO: 30776
  chr13:32526656-32526821
  hypo

SEQ ID NO: 34009 - DNA, 237 bp, Homo sapiens; identical to SEQ ID NO: 30777
  chr13:32885424-32885661
  hypo

SEQ ID NO: 34010 - DNA, 284 bp, Homo sapiens; identical to SEQ ID NO: 30778
  chr13:44544261-44544545
  binary

SEQ ID NO: 34011 - DNA, 824 bp, Homo sapiens; identical to SEQ ID NO: 32010
  chr13:44947704-44948528
  hyper

SEQ ID NO: 34012 - DNA, 89 bp, Homo sapiens; identical to SEQ ID NO: 30779
  chr13:52343302-52343391
  hypo

SEQ ID NO: 34013 - DNA, 1460 bp, Homo sapiens
  chr13:74707123-74708583
  binary
cggctctgcgggttcccggcccgggtggacgtacaaagttgccccttgtcaactccggccaggtcccccgtaattgaaaataacagccaccggccagcccctggctacttgcatggaccaggcactgtagcaagtgacagttacacatcattacgaccagagacaataatgaatgtagcaccaggagcactattcatgccagcagtgtcatctccgccttaaccccttcccctccactctctccagcgcgcacacacagcccacacggtcccggtgcggagctattcatccaccccgctcgaggccggggggccaactacttccacgagccccccctcccccccaagttcagccctggggttttatttcacatccttggcaactgtcaggcaaacactgcaaccaacaattccactaggggtagaaaaacacttgcttaattcacgttacttgataacttcttctggaaaaaaaaaattaggggaggtggggaagaaacctccttctttcttctccacgaatccgaccgacgctacttgctttgcaacagcatcgcccttccccggccccctcccgcttcccagcactttccccctttaagaacacagaccaaccaaaatgatttaacttgagcagatgacagaaggaaaataaaacacgttaagagaatacggtctgatttgggatggcaaaaaaaaaaaaaaaagaggagggggttgtttattttgataagaaacggaatcggcacagacctgaacagaagctgcagagcaggagaaattgttttctttccctcacacagagtccccctctctctctccctttctctctctcacacgcgcgcgcgcacacacacacacacactcgcacacacacggcgtcacccgcgcacacgcacacgcagagcctctcagcggctctctgcagttctcaggaaatgaatggggggcaacccggggaactgttgtacttgcaaatgacttacccggatcacatgatgcgctaaatgtagggtgggccggtgggtggaggctgccgagttgcgagccccggtctagtgtggggagcctcgccaggcccgcatcgaattaccccggggcccagccgagggggttgcaggacgccgcttctcctccctcgcagcccgcagctcaggaaaccggagaggcgcttggggtggggtggggtggggtgctgtgagggggggggccgaaaacaagaaacccccaaacaaaagagctccgggtcctcctccccagaaacaaagccccgccgctgccggcgagccccggggtggggccgagggcgggggcggcggcggggaggggctcgctcagcaggcgctaagtcgctttattgccataaaatggggcccccgagccgctccgcccgaggattaggaggcgggctctgagtgtgatggttgaaatcccctgtgggaaactaacccctccccgctc

SEQ ID NO: 34014 - DNA, 103 bp, Homo sapiens
  chr13:76054897-76055000
  hyper
cgaagatgacgcgaccagccaaaccggttaaggatttgactgcgattgagaactagtgaggacctctaggaacccaaccttctgcgttcatacacgcgctcgc

SEQ ID NO: 34015 - DNA, 152 bp, Homo sapiens; identical to SEQ ID NO: 30784
  chr13:98829232-98829384
  hypo

SEQ ID NO: 34016 - DNA, 619 bp, Homo sapiens
  chr13:98869699-98870318
  hypo
cgtctacgaccgtcgtcgcaggaaatgatccttgtaactttctcgtgttgctgtcttgtcactgctgtactcgagcttttgtagctcctgagacttaagtagcattcatcctttgcctgaggatcaagtgtgggcttcgtagctcggggagcctgggagagagcaatgagcctccatggaggggccctgtacaccgggaggtgcctgggcaactcccatggctcatctcaaccacagtcctcggcggtttgttttctgcattagcttctcatgccagaacaccctcttatttgtttacctgcttagtgttggcctcttgcaggtagagtggccactccttggagggcaaggcctcttgttcttgttcgtcatcatatcctacgccgcagcggtgcctgtgcatgaaactgactggtgacagttctgctcggtcgtttaactatacgagagttggtgctgtcctagcataacaagggaaagagcaagtgggaagagcttctgagtcccttcctcgtgttttcacagcgtgaaggtggggctgggattggagtccggcccgccagaccctcaacttacccatcttctgggcactaagagccgcctcctttgtgagattcgc

SEQ ID NO: 34017 - DNA, 192 bp, Homo sapiens; identical to SEQ ID NO: 30787
  chr14:101096264-101096456
  hypo

SEQ ID NO: 34018 - DNA, 640 bp, Homo sapiens
  chr14:101200581-101201221
  hypo
cgagatcgtggccaacagctgcacccccaacccatgcgagaacgacggcgtctgcactgacattgggggcgacttccgctgccggtgcccagccggcttcatcgacaagacctgcagccgcccggtgaccaactgcgccagcagcccgtgccagaacgggggcacctgcctgcagcacacccaggtgagctacgagtgtctgtgcaagcccgagttcacaggtctcacctgtgtcaagaagcgcgcgctgagcccccagcaggtcacccgtctgcccagcggctatgggctggcctaccgcctgacccctggggtgcacgagctgccggtgcagcagccggagcaccgcatcctgaaggtgtccatgaaagagctcaacaagaaaacccctctcctcaccgagggccaggccatctgcttcaccatcctgggcgtgctcaccagcctggtggtgctgggcactgtgggtatcgtcttcctcaacaagtgcgagacctgggtgtccaacctgcgctacaaccacatgctgcggaagaagaagaacctgctgcttcagtacaacagcggggaggacctggccgtcaacatcatcttccccgagaagatcgacatgaccaccttcagcaaggaggccggcgac

SEQ ID NO: 34019 - DNA, 183 bp, Homo sapiens; identical to SEQ ID NO: 30789
  chr14:101492091-101492274
  hypo

SEQ ID NO: 34020 - DNA, 204 bp, Homo sapiens; identical to SEQ ID NO: 30790
  chr14:101970419-101970623
  hypo

SEQ ID NO: 34021 - DNA, 495 bp, Homo sapiens; identical to SEQ ID NO: 29810
  chr14:102068306-102068801
  hypo

SEQ ID NO: 34022 - DNA, 362 bp, Homo sapiens; identical to SEQ ID NO: 30792
  chr14:102523351-102523713
  hypo

SEQ ID NO: 34023 - DNA, 377 bp, Homo sapiens; identical to SEQ ID NO: 30793
  chr14:102975682-102976059
  binary

SEQ ID NO: 34024 - DNA, 140 bp, Homo sapiens
  chr14:103216371-103216511
  hypo
cggtccccgcggcctcggtccctgcagccgcagtggcgcctgcatggagggggccccctaatcatggtgcctcggctgtggaatgttctgggagctagtcagaacggacatggctgccgcagctgaccctcccgcctggc

SEQ ID NO: 34025 - DNA, 241 bp, Homo sapiens; identical to SEQ ID NO: 30794
  chr14:103433137-103433378
  hypo

SEQ ID NO: 34026 - DNA, 365 bp, Homo sapiens
  chr14:104159892-104160257
  hypo
cgaaataattgtctggccgactcgcgagctctgagtgccagccacactgacctggcccactgagagccagcagggctaggtaacctgtcttgggagtgtgagaccgccccgccctgccacgcccctcaccgccctgcccggaggcgccagccgcactccttggcttcctttcctagatagtgacgtccaccaaccttggaggtgccttttcaaaacacccgggaggccgtgcctcagcattctgttactcggcctgcagccccagtgccaggagccaccccgaccgcgacccggccaggctggctcagggaggccgaggtggcgctgaggtggcttcagcacgctggggattggctcctgctcac

SEQ ID NO: 34027 - DNA, 443 bp, Homo sapiens
  chr14:105196121-105196564
  binary
cggcgtcgtggggaggagcgtggcgtcggcgtcgtggggaggagcgtggcgtcggcgtcgtggggaggagcgtggcgtcggcgtcgtggggaggagcgtggcgtcggcatggtggggaggagctgtggggtggcaacccagaggcaaggaggtgggcagaggcccacgaacctggccctgaccctcagctcgtccccagctcacagcacagccctcccctggctgcctccaaggagtctccagttactgagtggccactccgtgccagctcagcccacccctcaccttcccagtgcctgtggaggcccaactagggtgacgctgggagaggagagggcttggaggagccacgggtcaaatgcaggaggccacacctgcctgcccaggaggactgcaggagccggatccttaacacctggaggggagcgggtgggtgcggtggc

SEQ ID NO: 34028 - DNA, 163 bp, Homo sapiens; identical to SEQ ID NO: 30798
  chr14:105247313-105247476
  hypo

SEQ ID NO: 34029 - DNA, 333 bp, Homo sapiens; identical to SEQ ID NO: 30799
  chr14:105611103-105611436
  hypo

SEQ ID NO: 34030 - DNA, 1084 bp, Homo sapiens
  chr14:105714491-105715575
  binary
cgcgctctctgcaagcgctggctgctggcgtccgtagcaagctaaatcgcgaagcatctgaacgaacgaggaagcccaacgaccatcccacaggccgcggccagaggcagactccggaatgcaaatggccaaacaagcaggtccacctgcgttcctaaccaaaagatcgctaactgaagaacgggcgcaagcacctgcgcatggcactgcgggtctgggggcggccgcctgccagcgccgggagccgccttccacggctacctctgcacagcgcgcggctcgcgccggttgctgggcagaagctcgagcagcttcgaggatgtcgggcctgggggcggggccgcgaggcagcgacgtcgcgcggggcgcggccctgacgcagcgtgacgcaccggcgccgcggcgggtacgggctcgggcgggcgggcgggcgggacggcgccccccgcggccgggcctggccgggctgcgctaggctgggctcgggcagggtcgcaggggcgggggtggcaggggagcgggtggcagccccgcgggtcacagcgccgccgccgcccatgctgctgcccctagcctgcctgcacggccgcgtcgctcagtgcctgacctccttgcttttgcttgcagagccgctcccgaggccccggcgcggcgcgagggcgcggggcgcggcgtccacaggcgccgaggctgcccccgccgccccgcccgcgaagatggcggcggaactctacgctcccgccagcgccgcggccgcggacctagccaacagcaacgccggcgccgccgtgggcaggaaggccgggccgcgcagcccgcccagcgcccccgcgccagcgccgccgccgcccgcgcccgcgccgcccacactcggcaacaaccaccaggagagccccggctggcggtgctgccgccccacgctgcgcgagaggtgagcccgtgccccgcggcccccgcgcccgcgcgcgcccacgcccccagcccgtgcctctacctttgcaggaacgcgctcatgttcaacaacgagctcatggccgacgtgcacttcgtcgtggggcccccgggggcgaccaggacggtgccc

SEQ ID NO: 34031 - DNA, 416 bp, Homo sapiens
  chr14:105723707-105724123
  hypo
cgcaagaacctcgcaagcaatcagatggttaggacgccagcccactcatccacgccctgggctggaggcccctgacctctcttgcaactccatgcagaacagcaaggcctcccaccctaagaaggtgccagggctgggtacaggggcattccgacacagagcagaacccccaggacggctgggacgtgagcggtgaggcccgtgaacaaaggtgcatctgaaggcaggcagtcccagagggccgagacaacgggcaggaccgactgcagcacagccaacagcctcacaagaggcactatgagaagaccggcggcaggggtggggccagtgacatcaaaggaaaccaaaggaaagcagtaagaactacctggggaaacgcccgtgacagccaacacacaccaacgggaaaagtgaac

SEQ ID NO: 34032 - DNA, 237 bp, Homo sapiens; identical to SEQ ID NO: 30803
  chr14:23315027-23315264
  hypo

SEQ ID NO: 34033 - DNA, 185 bp, Homo sapiens
  chr14:23884191-23884376
  hypo
cgcccgtcgcacctggtaggtgagctccttgatgcgccgctcgctcttcctcatgcccttcaccgactctgcgttgcgcttctgctcggcctccagctcattctccagctcccgcacccgcgcttccagcttctgcagctgcttcttgccgcccttgagggcgatctgctcggcttcgtccagcc

SEQ ID NO: 34034 - DNA, 412 bp, Homo sapiens
  chr14:24045264-24045676
  hyper
cgagccgggcggtccggtgctgcccacctcgctgctcacctcgctgcgcagggagcctcgcttgctgcccagggagctgcgacgtccgcccgctcggagcccgctgagcagcagcgaacggcgaaagaatccgccggccgccggagtgcgctttcgggacgacgcgccgtcggcgtccccgggcccggccagcacgaagccgccccgggagcccgaggcggggctgcctccctcgtcgcccggcaagggcaggggcgggggtggcgtcggggggtcgctgtggccggaatccagggaggtgcggcggggcgagcgcagcagcgccgcctgatggtagggcacactctggcgtaccccgtagccgtggcgcttcccggcctgccactggccctggtaggtgcctgcgggcggc

SEQ ID NO: 34035 - DNA, 1497 bp, Homo sapiens
  chr14:29235468-29236965
  binary
cgcctctacctcctccatttcctgccctctcgcatcctctccctgcactcccactcttcccactaccaccaccacccccgctttcaaaaataaaattggatacaaactttaatcactaaggacaaatattgacgcttaaacgaaaatgacccagtacaatgaggaggaagccggaaatgtgagctattggccctaggaggggaatttcggtggagcggagccggcggggtggagggggtggcgggggcgcagggaagggctgcggcaccgcgtgctcccgccggcgtatccctacgcggctccgcgcggcctcggggtccgaggcccgcggagagggggaggcgagcgcccgagggggcggcagccggcgggcggggcgggggtgggtgggcccggcccctccgattggtcgacggcgagagagacgctcccgcacgccgccagctctgattggcccagcggtaggaaaggttaaaccaaaaatttttttacagccctagtgtgcgcctgtagctcggaaaattaattgtggctatagccgcctcgatcgctgtctccccagcctcgccgcggccgctccgggacgcgcccgcccgccgcccggctctccccccctttgggctgctgctgctgctgctgtgactgctgctgcgagaggaggaggaggaggaggaagcagcgggggggggagcggggggtggggggggagaccaagaagtacagttgggagcgagggagcttcacccccggggcggtggttgtttcttttttctttctttcttttttcttttcctttttttttttttttctaattcctgaggggtggttgctgcttttgctacatgacttgccagcgcccgagcctgcggtccaactgcgctgctgccggagcgctcagtgccgccgctgccgcccgcgccccccgcgccccgttcggcacccaccggtcgccgccgcccgccgcgccgctgtcccgctcccgcgccgccgccgccgtttccccccgacgactgggtgatgctggacatgggagataggaaagaggtgaaaatgatccccaagtcctcgttcagcatcaacagcctggtgcccgaggcggtccagaacgacaaccaccacgcgagccacggccaccacaacagccaccacccccagcaccaccaccaccaccaccaccatcaccaccacccgccgccgcccgccccgcaaccgccgccgccgccgcagcagcagcagccgccgccgccgccgcccccggcaccgcagcccccccagacgcggggcgccccggccgccgacgacgacaagggcccccagcagctgctgctcccgccgccgccaccgccaccaccggccgccgccctggacggggctaaagcggacgggctgggcggcaagggcgagccgggcggcgggccgggggagctggcgcccgtcgggccggacgagaaggagaagggcgccggcgccgggggggaggagaagaagggggcgggc

SEQ ID NO: 34036 - DNA, 1371 bp, Homo sapiens
  chr14:37131997-37133368
  binary
cgggtgcgttcgcccagtccccggatgcgtagggaggcccagtggcaggcagctgtcccaagcagcgggtgcgcgtccctgcgcgctgtgtgttcattttgcagagccagccttcggggaggtgaaccagctgggaggagtgttcgtgaacgggaggccgctgcccaacgccatccggcttcgcatcgtggaactggcccaactgggcatccgaccgtgtgacatcagccgccagctacgggtctcgcacggctgcgtcagcaagatcctggcgcgatacaacgagacgggctcgatcttgccaggagccatcgggggcagcaagccccgggtcactacccccaccgtggtgaaacacatccggacctacaagcagagagaccccggcatcttcgcctgggagatccgggaccgcctgctggcggacggcgtgtgcgacaagtacaatgtgccctccgtgagctccatcagccgcattctgcgcaacaagatcggcaacttggcccagcagggtcattacgactcatacaagcagcaccagccgacgccgcagccagcgctgccctacaaccacatctactcgtaccccagccctatcacggcggcggccgccaaggtgcccacgccacccggggtgcctgccatccccggttcggtggccatgccgcgcacctggccctcctcgcactccgtcaccgacatcctgggcatccgctccatcaccgaccaaggtaggggctcagaggctgggcgtgtggatgtgcagcgtctgcccccgcactctcgcggaggtcccagtatctgcagcctcagggacactgtctttcccaccacctgaggctttttcctttggaaacgtaaggagtcttcctagggggtgttctgatctcattaacttgaaactcatgcccctggtttccttgccacacacagtcttctgcctcatctcaaactaccagacccataacatccccccatccccaacacatggttcgcattttccaccctcccccgcctctcgcgccgaggcagcctcagcccggcttgctcacttggagagtgcggccggggctggacttggggcgcagcccgggaggcccgagcctgcttggggctgccggctgcagactccgctgtgggcagagcagcttgcttggggatcactacggccgggagaagtctggccgggaggagtccagcacgccttggaaattgaagtattctccgattctggtaatcaggccaaatttgctcaggcaggaagttcaaatgtcacctaattggtttcgttcttatgcttcacttcattttcctcggaaatggaggtcccgaagttactactagtaacttgcatgtaactcattcccagac

SEQ ID NO: 34037 - DNA, 586 bp, Homo sapiens; identical to SEQ ID NO: 30808
  chr14:50469917-50470503
  hyper

SEQ ID NO: 34038 - DNA, 930 bp, Homo sapiens
  chr14:63512269-63513199
  binary
cggccggcgcctgggcgcgggctctgcatctctccccctgctggggagcgcaagcgggaactcaagcccccaccctcccaatccccctcagctcagaccgagaccccttccccgcgccttcgtctcccggtctcctcgtccaccccctcgcgcagcgagctccgggctgaacagcgtagcccaacttctgggctgtgcgcctggtggttgctcctctccccggagatcgaggcaagcgatcgctgtccaatcgggccggtggaatgggagaagagggtgccagagagagcagtggccagtcggaggctcacatctcggcgtctcccgctcgggtcccgaatccgggctgctggcgcggacgcggctcccggggcggaggtgcgggcaggctccagctccagccccagccgaggctgagagcagggcagggactggctgggcggcgcgcggggacgcagagcagccacctgacgctgctaccgcccccctccgggctccggcgcctgaaaccttcctgaacactggcgctttccgcaccgcccttaccccaccccggagcgggagcgcgagccctgaagtccgagcgcacagccggcgcccggaatggcccctgcgacccgggccgggcttggcgtctgggggagcgtgcggccgcccaggggagtttcccccaggaccgctgagcgcaggaggcgatccgcgagcccgccaccgctgcaaagttgcgggaaaggttgcacttgatgtgaagagtaggggaagagggtgaataattcacacccgagagagggggagtgaggagggcagtgttagcgatggaaaaacggtaaaggctgtgggggcgaagatgcgccagggtggagcagggcacgaatcacctctaacaaaccccccaatttccaggcgttgagaacggacagcagcggcacc

SEQ ID NO: 34039 - DNA, 119 bp, Homo sapiens; identical to SEQ ID NO: 30809
  chr14:64385274-64385393
  hypo

SEQ ID NO: 34040 - DNA, 52 bp, Homo sapiens; identical to SEQ ID NO: 30810
  chr14:69070536-69070588
  hypo

SEQ ID NO: 34041 - DNA, 213 bp, Homo sapiens; identical to SEQ ID NO: 30811
  chr14:69259278-69259491
  binary

SEQ ID NO: 34042 - DNA, 219 bp, Homo sapiens; identical to SEQ ID NO: 30812
  chr14:69261392-69261611
  hyper

SEQ ID NO: 34043 - DNA, 353 bp, Homo sapiens
  chr14:70014631-70014984
  hyper
cgagacacggccgccttccttcacatccaacgccggtgaggctcagcactcattgtctcactggcagcacagacaaagccttgcgggctccacgggataatcaacagcgagaacgcccccagggacctccggaaagagacaccattggttgcaggcctccaggttctcgtctgcctggtgagtgaggtggcacgcagcgtcagtcgtctgcaggaatttgtgctggggtaaatgcgcgcttcgtgcagaccgcagagctggaggcggagggctggggtccctgggccgcgggcgggttccgcgtgcccctccctcgccgcaccgcgcagtcccgccagggggcgccaggcacc

SEQ ID NO: 34044 - DNA, 181 bp, Homo sapiens
  chr14:73029661-73029842
  hypo
cgccgcctgtcatccctcacgtctctgtggccacccgggtgtcactgccagcaccaggcactgctttcacgtaaaatgtccaaatcacatcttcagcaagaaagcaacctcacggattgccccgcctcaaggtctttccaccctctttgagatcagcgttcggagaggtccccgccagccc

SEQ ID NO: 34045 - DNA, 409 bp, Homo sapiens; identical to SEQ ID NO: 30813
  chr14:74100394-74100803
  binary

SEQ ID NO: 34046 - DNA, 54 bp, Homo sapiens
  chr14:89938175-89938229
  hypo
cgtcatttgcacctttccctcggccacggagatgaggaatgacccatcagcttc

SEQ ID NO: 34047 - DNA, 330 bp, Homo sapiens; identical to SEQ ID NO: 30814
  chr14:93214751-93215081
  hyper

SEQ ID NO: 34048 - DNA, 108 bp, Homo sapiens; identical to SEQ ID NO: 30815
  chr14:93415131-93415239
  hypo

SEQ ID NO: 34049 - DNA, 372 bp, Homo sapiens
  chr14:93425284-93425656
  hypo
cgatgaggcgctgagaggttcagtgactgctggacagtgagtgagcccgggatggaactgggtctgcacagcacccagccgcgcccctacacacggagccatgtgatactccgcaaacaacaggcctttgtgctcctggtccccgactcctctggggaaaaaggtccctgacaggaggatctggtaggggctggggtagggagtgcaggggggcagctgccaaaaccctctcagccccggccagcacgggctctgcacagggtctgctctaaggacagaggggtgggccctaggcctagccgatccagctgctggtgccagggtcatggctaatccctcagcccgcagggccccaggaaggagccaccagac

SEQ ID NO: 34050 - DNA, 627 bp, Homo sapiens; identical to SEQ ID NO: 32057
  chr15:100913438-100914065
  hyper

SEQ ID NO: 34051 - DNA, 504 bp, Homo sapiens
  chr15:101513571-101514075
  hyper
cgggaaagcgtctggatgtccacacccccgggaggtggcctgtctttcccccgtgggcaccgcagcgggacagcgtggctgagacccgcggctctctcgccaaagcccctgcgcctccgctgctgtcggcgaggtcggcccggccgctcccccgcgggccgctgtccccggtgccctggaagggctccaggtggcggtctcgctgcagaatcctccgagctgcgctcgccgcccggtgccttcgcagcggccccggttgggttgcgggtcgcggggcggcgagcgcagggagcgtcgcggggccacccctctctcttcctgaagcccccgcgatcgtgcaacgggccgcgccgcctcctgctgtgttccacggtgattctcaagagcacgcgggcagtgggcggtgacgccgtgtgtgtgtgcttcctcccgcgcaggtgccggggacacgggcggcaagccgtccacgcggggcggtgaccctgcagcgcggtcccgcaggac

SEQ ID NO: 34052 - DNA, 157 bp, Homo sapiens; identical to SEQ ID NO: 30818
  chr15:101845367-101845524
  hypo

SEQ ID NO: 34053 - DNA, 511 bp, Homo sapiens
  chr15:102042970-102043481
  hypo
cgccgggagcaggcagagtcaggaattccatgtccgtgacctgagagccgcaccactccacctcctgggcctcactccgccctatacacgcgcacacttaatgacatctctgatcatgtcttcaggacgcataccctctttgacttgaaaaagtaacaactgtttgtggccttctcacaggccgaaaagaacaagcggggtccagtggagaaaggtgaggcatgggaaggcctggcccgagcactgtgacttcagcgaggcaccctccacccctctcagctttcctggtctgaaagtagaatttcgccagagggtgagccgacaggtagagctgtttccacctgcgtgtgctgcctgtgagctggggaactgcccacactgggaggggttgggaagcgtaggagggcacctgtcgcagacgttgaggaggggctgcctttcccctccaggggctgacctcccaggtgattcccagagccagaccacaattccagaattcagtgaaaacagc

SEQ ID NO: 34054 - DNA, 544 bp, Homo sapiens; identical to SEQ ID NO: 29831
  chr15:102076822-102077366
  hypo

SEQ ID NO: 34055 - DNA, 144 bp, Homo sapiens; identical to SEQ ID NO: 30821
  chr15:26234718-26234862
  hypo

SEQ ID NO: 34056 - DNA, 339 bp, Homo sapiens; identical to SEQ ID NO: 30822
  chr15:31621317-31621656
  hyper

SEQ ID NO: 34057 - DNA, 507 bp, Homo sapiens; identical to SEQ ID NO: 30823
  chr15:31774606-31775113
  binary

SEQ ID NO: 34058 - DNA, 247 bp, Homo sapiens; identical to SEQ ID NO: 30824
  chr15:40762832-40763079
  hyper

SEQ ID NO: 34059 - DNA, 899 bp, Homo sapiens
  chr15:41787386-41788285
  hyper
cgcccgccacttagggatgtgcggctcccgggacaccctccttgttcccctcgttttaaccaaggccaaataccttgaataactgtccgtggtcagcgcgaaggactttctttagatccacgtttcgcaagtgtccctgaggccgaggaagaggcgaggggcgcccccggcctcgggcgtctggggcctgcccataagtccgggtcggcgcggcggggcggggagagctgtggccgcgcgcctgctccgccgcacaatcggctgggacaaggcagggaagctgtggcgacctgcaggggttcacaagcccggaggccgatggggtttgtcagtgacaccagaggggaaaagcctcacagagcaggaacaccccccgccgccaggtgctgggtgcgccggctcggtcactagcctgccgcttccccttcttccccggtggtcagagcagccccggacccaggatcgtttctggggtaacccttgcctaggtcggggggcggatgccggggcttcccaggatgtggagtgtggggcagtgagaggccccccgccccgcctcttcggaaaagcctgagcagcagctcccggggcgcggaagctctgacacctgagagccggtgcaggcgaaagggcgcgaagcgcgggcgcgtcccgcttccctcttccgcccgcagggactcggcgaagtgcctgggagagggagtgcgctaggaggaggtcctgcggcccaagcctgggtgtagagaccgccccggctaaggtcaagcctcggggacctgggcgaccccgccgccctccgagccgtcgggagccggtgcaaatcgccgctgagggcccttccagctccaaggctgcggcttccaggccttccccacccccaggcccgccggggcctcccc

SEQ ID NO: 34060 - DNA, 133 bp, Homo sapiens; identical to SEQ ID NO: 30826
  chr15:42162038-42162171
  hypo

SEQ ID NO: 34061 - DNA, 782 bp, Homo sapiens; identical to SEQ ID NO: 30827
  chr15:60884567-60885349
  binary

SEQ ID NO: 34062 - DNA, 132 bp, Homo sapiens; identical to SEQ ID NO: 30828
  chr15:62978897-62979029
  hypo

SEQ ID NO: 34063 - DNA, 741 bp, Homo sapiens; identical to SEQ ID NO: 30829
  chr15:63089582-63090323
  hypo

SEQ ID NO: 34064 - DNA, 203 bp, Homo sapiens; identical to SEQ ID NO: 30830
  chr15:64454743-64454946
  binary

SEQ ID NO: 34065 - DNA, 394 bp, Homo sapiens
  chr15:67357339-67357733
  hyper
cgcacacgttcccgaggctctcggccggtgtgatctcaccgactagagaataaaaacagcccaggggcgccggcgccggccaagggccttgacggggatcagcaagcgcgaggccaagtgcgggccccaacttcctgggcccgggccttccgcgcgccccctctcgggctcgggtcctctccagggtgcactcgcgtccggacgacgcttacttgctgcgagtccaaccctctccggcccgcaactccaaccgagccgcccgagtgtggactccgagagcggacgccacgggccgcgctcagccctcccgcccgaggcccctctcgccgtgtttcccaggacttcctccccgcgcccgcccgacttcaggtcggggccgcgcagggtcccgcgc

SEQ ID NO: 34066 - DNA, 115 bp, Homo sapiens; identical to SEQ ID NO: 29849
  chr15:68888212-68888327
  hypo

SEQ ID NO: 34067 - DNA, 174 bp, Homo sapiens; identical to SEQ ID NO: 29851
  chr15:68937507-68937681
  hypo

SEQ ID NO: 34068 - DNA, 214 bp, Homo sapiens; identical to SEQ ID NO: 30835
  chr15:70718600-70718814
  hypo

SEQ ID NO: 34069 - DNA, 118 bp, Homo sapiens; identical to SEQ ID NO: 28590
  chr15:72612103-72612221
  hyper

SEQ ID NO: 34070 - DNA, 471 bp, Homo sapiens
  chr15:72612514-72612985
  hyper
cgagccccagcccccgtgcttggtgacgtcaggcagctggccgccgagtctacgcaaatgatttgcataatgaggaagcagccgccaatcagagtgggagttgactgggctcgccgggggcggggggggcggctgggctcacgcgctcctgctcgccatggcaaccggaccctcgaatgccctgtgtgtgtcgagtgtgtgcgggcgtggccgtggatcgcgcgtgtgcgccttgggccgcgtgaggggaagcagcttcgtcatgcgtgatggtgtctgccggagtcggggctaatccccaccgcacacacaggcacacacaggcaaacgcaggcacacgcaggcacacacacctccaaacgctggtgcgtttcctgcgggggtggatggggattcctcttctctattcccactatcgagccagtccctcggagccaatcccaccccgccccatcacacatctctgtcttc

SEQ ID NO: 34071 - DNA, 209 bp, Homo sapiens; identical to SEQ ID NO: 30838
  chr15:73615717-73615926
  hypo

SEQ ID NO: 34072 - DNA, 263 bp, Homo sapiens
  chr15:74219413-74219676
  hyper
cgccgtccctgcccctgccggggcgcgtgggctcggacaccgtgcgcggccaggcgcggcacccattcggctttggccaggtgcccgacaactggcgcgaggtggccgtcggggacagcacgggcatggcccgggcccgcacctccgtctcccagcaacggcacgggggctccgcctcctcggtctcggcttcggccttcgccagcacctaccgccagcagccctcctacccgcagcagttcccctacccgcaggcgcccttc

SEQ ID NO: 34073 - DNA, 93 bp, Homo sapiens
  chr15:76005164-76005257
  hyper
cgagcgcggctctgctcctgggcgcgggccggctccgggtgtccgcgcacttaactccgggggcggggcaggcgcagacccgcgcgcccgctc

SEQ ID NO: 34074 - DNA, 196 bp, Homo sapiens; identical to SEQ ID NO: 30841
  chr15:81294105-81294301
  binary

SEQ ID NO: 34075 - DNA, 83 bp, Homo sapiens; identical to SEQ ID NO: 30842
  chr15:83523579-83523662
  hypo

SEQ ID NO: 34076 - DNA, 922 bp, Homo sapiens
  chr15:84322693-84323615
  binary
cggcgcgcaggctgacgggcgcctgggcgcgccgtgcacttgccgggcggtgcaggtggcggcgcgcgccctccgcctctgggccggggccagcgcagcgctctgcgcgcccggagggggcgggagaggcggggcagcccccgtcccagccccatttaacttcgcggcggcggcggcgactgcggcgccgcgggctggaggccggcgtcggggaaggtcctggtgccggattccgcacgaggtgttgacgggcggcttctgccaacttctccccagcgcgcgccgagcccgcgcggccccggggctgcacgtcccagatacttctgcggcgcaaggtgggtgcaccgagctcggcgcagggcggcccctcaggggtcgggggaaggcgctccccagagggagtaagacttggagcagtggcctctctaagcaagttgggggtctccaagcagagtcggggcgtgccacgcgggccccagggggcctcaggactggggtgctcctcactgctgggcacctcgggtcgggcgcgcttcgtgccgtcccggaaggttcagggagagtctttcggcggcagttcgcgggctgaggggcgttcttgattatgggggaactccacagggttggagtttttcaggattgggagttactaagcagaaacctcgcgggtccgaaggtccggccggttgaccactgggtagcgagcgcccagaacgccgggggttgaggcgacgcgcgatcgtggaaagtgggcgtgggggtgaccgggacgcggcggaggcactggaggagcgacttcgaggcagcgggtagtcggaggagtgtgcactcggaaggctggtgcgagcaggcgagggtggcgcagagtcccagggccccgcactggccgcctcccttcagccaggagtcgccgcctcaggtc

SEQ ID NO: 34077 - DNA, 964 bp, Homo sapiens
  chr15:89921803-89922767
  hyper
cgcggctgcttcccgcccgcgcaggatcaggccggcccccgcgggcctggagctggatccagagctagggaaactggaaaaacaggcacaaactcggaagccgcggtacggcaagagcctaagcaaagaatcctttccaagattcacacctcgtctacaccagggcaccgcctgggcctacggccttccgaacccgaagcgcccgcagcccagagctggcatcaggccatcaggccgggaaggtcgtcgcaggccccagagtgcgggcgcggggggcgcgcgcccacaggacgcccggggttgggtaggcaggagagaagggcgccagcaggcccgcggctgtttcccctcggtccgcacagcgggcccgggaggccattttgagagcgcgaagaggggcggcaagatggctgcgtgggcacccggaaggtcgccgcgccaagggcccgctgagcccctcctcccattcgtccagccgcgcggcccacagaagcggaacgcgcgtcgagagcgccctgtccgctcgccccagacagatgcccggttattcattaccgcgaggcctagaggaaagagtggctgccgtcttcctgcccacagcccgccggaccctccgtcgcggctgcccggtccccggagccgcagccgccgagcccggctgtgcgtgtcgtggctgctggggagaaagaggcttccggtaagagcccccctgactgggctgcccaccccgggcaggggcggaaacggccttccccgcgtggggaacaatggcgttattttggagtctgcaaccgcgagcgcttcaagctctttgattattttcgaggagtgttaggtgcgtggctaactcccgcgttttcttggaaccacgaagcccaaaatggcgagcgggccgtggccgccctcctggggctgagtgtggtccggagcgctgagagtggccagggagccgtgggcctccatc

SEQ ID NO: 34078 - DNA, 98 bp, Homo sapiens; identical to SEQ ID NO: 30845
  chr15:90746768-90746866
  hypo

SEQ ID NO: 34079 - DNA, 297 bp, Homo sapiens; identical to SEQ ID NO: 30846
  chr15:91840031-91840328
  hypo

SEQ ID NO: 34080 - DNA, 450 bp, Homo sapiens
  chr15:92459227-92459677
  binary
cgtcctgaccaccctggagcgtaggttcaacctgcagagcgctgacgtgggtgtgatcgctagcagcttcgagatcgggaacctggcgctcatcctcttcgtgagctacttcggggcacgcgggcaccggccgcgcctgatcggctgcggcggcatcgtcatggcgctgggcgcgctgctgtcggcgctgcccgagttcctgacccaccagtacaagtacgaggcgggcgagatccgctggggcgccgagggccgcgacgtctgcgcagccaacggctcgggcggcgacgaggggcccgaccccgacctcatctgccgcaaccggacggctaccaacatgatgtacttgctgctcattggggcccaggtgctcctgggcatcggtgctacccctgtgcagcccctgggcgtctcctacatcgacgaccacgtgcggaggaaggactcctc

SEQ ID NO: 34081 - DNA, 87 bp, Homo sapiens; identical to SEQ ID NO: 30848
  chr15:93352994-93353081
  hyper

SEQ ID NO: 34082 - DNA, 225 bp, Homo sapiens; identical to SEQ ID NO: 30849
  chr15:99256133-99256358
  hypo

SEQ ID NO: 34083 - DNA, 453 bp, Homo sapiens; identical to SEQ ID NO: 30850
  chr15:99434503-99434956
  hypo

SEQ ID NO: 34084 - DNA, 138 bp, Homo sapiens
  chr15:99453288-99453426
  hypo
cgatgcgtgtttggctttggcttgtttcgctggtgtctggatttacctggcgacacttgttgctctgggggatcttagagggaagcacgctgactgacctagggctgaacagcaggctgacgaccagcgccgcctccc

SEQ ID NO: 34085 - DNA, 379 bp, Homo sapiens
  chr15:99459893-99460272
  hypo
cgagaagacaaaatccccatcaggaagtatgccgacggcaccatcgacattgaggaggtcacagagaaccccaagactgaggtgtgtggtggggagaaagggccttgctgcgcctgccccaaaactgaagccgagaagcaggccgagaaggaggaggctgaataccgcaaagtctttgagaatttcctgcacaactccatcttcgtgcccaggtacccagctcatgtgaaatttcagttggcaaaacccactgctcaggccggttctgttgcctttctccccaccaggtagtgtgtaagtcagcagctggggggtacaatacagtagccactgagacggagccgaaaaagatgacaggttcggtgaagtgagtccctgc

SEQ ID NO: 34086 - DNA, 209 bp, Homo sapiens; identical to SEQ ID NO: 30852
  chr15:99465447-99465656
  hypo

SEQ ID NO: 34087 - DNA, 565 bp, Homo sapiens
  chr16:1035088-1035653
  binary
cggcgaccagccccgaggctcgcccgactacggttcctgcagcggccagtccagcgccaccccggccgcccccgccggccccttcgccggctcacagggcgactatggcgacctgcaggcctccagctactatggtgcctaccctggctacgcacccggcctctaccagtacccctgcttccactcgccgcgccggccctacgcctcacccctgctcaacggcctggccctgccgcccgcccacagccccaccagtcactgggaccagccggtgtacaccaccctgaccaggccctgagggcccagccgcggggagggactcgcaggcgtcagggggcagccttgtcccggcccagtgtgtgtgaccagggcgggaggggccccagtggctgagctccaagtgcctgctgaagtctgcagggaaacacgcttgctgcccgtggccctcggcctccagatggccacacctctgccgacgacggaccagctccctctcccttctatctttctttttgaggtggtgggattattccacaaagaagggctgccgtttggtccctcttcc

SEQ ID NO: 34088 - DNA, 329 bp, Homo sapiens
  chr16:1061203-1061532
  hypo
cggccagggcagagacgtaggacagagacgcagcgcagagcggccagggcagagatgcagggcagagacacagcgtagagcggccagggcagagacgcagggcagagacgcagggcagagacacagggcagagacgcagggcaaagcggcagggcagagacgcagggcaaagcggcagggcagagacgcagggcaaagcggcagggcagagacgcagggcaaagcggcagggcagagacgcagggcaaagcggcagggcagagacgtagggcagagcggcagggcagagacacagggcagagcggcagggcagagatgcagggcagagc

SEQ ID NO: 34089 - DNA, 587 bp, Homo sapiens; identical to SEQ ID NO: 30855
  chr16:11219568-11220155
  hypo

SEQ ID NO: 34090 - DNA, 807 bp, Homo sapiens
  chr16:1397437-1398244
  hypo
cgggctgtgtccttgagcatgaggtggccccacgggcagtcaggtctccaagtgccagcgctgaccaccagcacccaggggcccctcctgatgcgcttccccctgcagaggctgaaggaggagctgcggctgcacaaatgttccacccgcgagtgcatcgagcagttctacctggacaagctcaaacaggtagggaggcgccagggacagggtgctgcctccgaggctcccagagcccagctgcgctcacccgcctttccgcagaggaccctggagcagaaccggtttggacgcctgagcgtccgttgccattacgaggcggctgagcagcggctggccgtggaggtgctgcacgccgcggacctgctccccctggacgccaacggtgagttgcagcggggacgggtcgggtggtggtgggatgggggcaggggggctcacgactgtgctcctgcaggcttaagtgacccctttgtgatcgtggagctgggcccaccgcatctctttccactggtccgcagccagaggacccaggtgaagacccggacgctgcaccctgtatacgacgaactcttctacttgtgagtgtcctaagccccagccccagccccaggctccaggctgccggagcgagactcccgactggcctctgtccgcagttccgtgcctgccgaggcgtgccgccgccgcgcggcctgtgtgttgttcaccgtcatggaccacgactggctgtccaccaacgacttcgctggggaggcggccctcggcctaggtggcgtcactggtgtcgcccggccccaggtgggc

SEQ ID NO: 34091 - DNA, 172 bp, Homo sapiens
  chr16:1400771-1400943
  hypo
cgccgggtcacactgctgtggggcccctggactcacctacgatgcagaaggtggcagcaaacgcttccacgcaggaaagtctgtagggccggccatagttcacggggttggcggccaccaggtagggcaacaggcgcaagtggctccctcgcatcttcccaaacggtgtctc

SEQ ID NO: 34092 - DNA, 339 bp, Homo sapiens
  chr16:1424307-1424646
  hypo
cgtccctgctggctgcaagttcttggaccctcactgatgcctggtactggacagtgtgctgctgaggcctgctctgagacaggcaaagccacccctgcctgtccctgaagggccctagacccccttcctcctgtcctcacctgggaccgatggtccctccatggccccaggcaaccgcaccccggggaaacctgtcagacccgaccgtgggggtcggcgcgccgggaacctccacagcctggccagcccctgcctggtgctcggttcagacaagctggggcccagcagaagcaaagaggcggtcactgccccacctacccgacatcgagtcccgccctc

SEQ ID NO: 34093 - DNA, 912 bp, Homo sapiens
  chr16:1493342-1494254
  hypo
cgggtctggcacctgcccctggagtccacccagctccggcaccactggcccctgggagctctgggcctgggcagcaggggtgagctgggctccaggcccagaagcagctgcccccaacacccaggaaaggggcagctcgacctgtgggtgggggagccgctcacctccggcgcctccttttcgggggcctgggctgccggccgcgcctcctgctgcaactgcctcagctctgagccctgcagctgcacgcgggcccgcacctggagcagctcccgcagcaggctccgcgtggcgcgctcacagcgctgcttgtgctcccgcaggcaggccacctcggcctgcagctccaccaccctggccggggcgagagtgggcgagtctggcggtgcccgccgtggaggcggaggcggcggcgacgtggtcctcccccgccagcaccccctgcagggctcaccactgctccagctggttccagtgcttggcggtgtcctgctcggggacagaggccgtggatgtcggatggctggactcatacctctccgagagctcctccaggctcaagggctcggggctggccaggcctcctgccaggaggagccccaggtcttccagggtgacggctctcagctgggaaggggccgatgcccctgagggtccactgtcagccaactctacaaggaggcatcttgggagcttgccccttggggcccggcccccactggagcttacgggaacaaggccccaaacccccgcaggaccctcgcccaccacccagagctcaacgcgtctccttgggtcacacaggatccagacgggcttggctcagacaagtccagggccctgcctgaagacacacagcactgggcggcaggaacaagcgagctggagggagcccggggtcagaagcagagc

SEQ ID NO: 34094 - DNA, 422 bp, Homo sapiens; identical to SEQ ID NO: 30862
  chr16:1682411-1682833
  hypo

SEQ ID NO: 34095 - DNA, 865 bp, Homo sapiens; identical to SEQ ID NO: 30863
  chr16:1796445-1797310
  hypo

SEQ ID NO: 34096 - DNA, 709 bp, Homo sapiens
  chr16:1807721-1808430
  hypo
cgtctgcggtgtctccctcgccgctctctccctcgcccacgctggggggcttttggagactgggtacctgccacaccctgccacacacactctcctcttcacaggcctgcatcatgggggctgcggggggcctgccctcctgatgggcgatgggagcagagggcagcaggcttccgggtcagggctcggcaacacagccctgggctggaccacggcgcctgggcctggttccctgcaggcctctgcctgggcacacggggcaccgggacctgctggaggctgctccctctctctcctgccctgcaacatgggagcagccgaatcattgctgggttttctgtaataagaatgtattgttagttccagtccctaattgacctttgtcccttccttcccctgcctctctgtgcgtcgctggactcgccaggggagttctcaggtgagtatctcactctcctgtctgtctcccctctgtgtgacggggggagtgggtggacgggggatgccccgagctatcccgtcaccgtggctgtgtggactgccccccacgtcgccgcagcgcctctgcttctgctcgcagccaccgccgctcggaagcttgttcggtttgctccaccagccacttgacaatgacctggatatccaacccccccagcctgaggagtcccccgcgggccatttctgaaggccctgcggagccctaagccac

SEQ ID NO: 34097 - DNA, 824 bp, Homo sapiens
  chr16:1813657-1814481
  hypo
cgactgcacgtcctccgcccgtcgagagcagaagcgcgagcagtaccgccaggtgcgtgagcacgtgcgtaacgacgacggccgtctgcaggcctgcggctggagcctgcccgccaagtacaagcaggtgcgggcgggcgctgcggggaccgggcggggccccgcagaggcggggcgggggtaaggggcggggcgctgtggggcggggagagggcggggcagtgctagggggtgggagaggacggcgggtggggcggggcctggcaggttcctagtgagcctcctgggcaggggtctggagggtcggagaaggagccccgcggctcccacgcccccacctgcctccagtcttgaagtggctgtgccgccagaagctggcagccctacctgtctcagatttctggagggatgggtaggagccagggttcgtgcccacggcgcctccctgctccctgcagctgagtcccaacgggggccaggaggacacgcggatgaagaacgtgccggtgccggtgtactgccgccctctggtggagaaggaccccaccatgaaggtgagcccgcgaggaccccgctcaggctggctgggcgagcgggaggctggggagtgccggtgacacccgacctcggccctgcccttgcagctgtggtgtgccgcgggcgtcaacctgagcgggtggaggcccaatgaggacgacgctgggaatggagtcaagccagcgccaggccgcgatcccctgacctgcgaccgcgaaggagacggcgagcccaagagcgcccacacgtctcccgagaagaagaaggtgagcatggccgaggccacc

SEQ ID NO: 34098 - DNA, 221 bp, Homo sapiens
  chr16:19708387-19708608
  hypo
cgccagccagtttgcgagtccgtgcccagcaggtgccagcccgcgtgccctgtgccaaagcgcttttctcttgtagcccgcgggcctgggcgcccacagcacaacctgctccctgatgattgggctctttgccgtcggctctgctgcttctgtgactgtcgctgctctaggctgttgccaaggcaggctcaattttgcccggagtggggaggggaggtgcc

SEQ ID NO: 34099 - DNA, 146 bp, Homo sapiens
  chr16:19883197-19883343
  hypo
cgtcctcctcgaaggccgtctcccgcatcctgggctgcgacgtgtcgaagtagttgggcgtgttctcctgcagggctggcagaagggtgcagtggatctcagggatggcgtggaagatgacgaagacccagccgctggccgccagc

SEQ ID NO: 34100 - DNA, 883 bp, Homo sapiens
  chr16:2104688-2105571
  hypo
cgaacacctctgcaacggcaggagctgggcgagttctgtcactgggaggtggtgctgctgacttggtctcaaccggagcgtactggtcccgtcttcctcctcctttctccactttgtggaccttcctcctgccatcctgtggtgggaggtttccattagtcttgggtctctgtgtcatgattctgggaagtagagaaagaggaggaagagatcggtctgactctggctttgctgttctgtcgcccagaaaagggcctcagtggctgggctgcctgcaggacaggtgccggccaggtgcctaccgtcaggtttcctgtctgaggtgacgtggccggcagccaagtgtgcacacgtctcctccgagccactctctgctgggggtggggaacgcccaggagtctggtgatgtcggcgtctcccagcctcgggttgggccctgagtgtacggcatacacacttctgctgccgcctcggcacagaccctctgtgcagccccaggggcggtagatcctagtgtccgtgcgtagccggcctgccctgggctcccctgagcctcttcgggcccagtgcgtggtctgtctgttgctgccgggggactgatgatggggtttctggcagtgacgggtttggacacactgtcctgcggcgggagggggaggtgagtgggagatgtagattcggcgtcctcgcaaactgccgccgcttctcccccagctgactttgtcctgcagtggatggatgttggcttgtcctcggaattccttctggtgctggtgaacttggtcaaattcaatagctgttacctcgacgagtacatcgcaaggatggttcagtaagaaaagaattgagatcctgttctgataatggtcctaagttcagctcc

SEQ ID NO: 34101 - DNA, 835 bp, Homo sapiens
  chr16:2128929-2129764
  hypo
cgaggtcctcagccgtgcatgcgttgagctttggcccttggtgataggtggctcggcccgccctacctggcaccctgaccctggtcacggcctctccctccagcaggatacagacgtccctcaccagtgccagcttggggtctgcagatgagaactccgtggcccaggctgacgatagcctgaaaaacctccacctggagctcacggaaacctgtctggacatgatggctcgatacgtcttctccaacttcacggctgtcccgaagaggtccaggcggcactacagggctgggcgggcctgcgggagctccacgggcaagctgggtttcacgctccctgtcttctaggtctcctgtgggcgagttcctcctagcgggtggcaggaccaaaacctggctggttgggaacaagcttgtcactgtgacgacaagcgtgggaaccgggacccggtcgttactaggcctggactcgggggagctgcagtccggcccggagtcgaggtgactgcaccttcctttcctccgcgcctgccagcctcgacaccggctgtcccgagcccaggcccacgtggcaccctcgtaccagcctggggactaagtccaccctgtgcgtgggattctcttctcagctccagccccggggtgcatgtgagacagaccaaggaggcgccggccaagctggagtcccaggctgggcagcaggtgtcccgtggggcccgggatcgggtccgttccatgtcgggtgagccttggccccagccacctccacacaggcaccggggctccctcagttgctgctggtcccagtgttcaggaaggccccgagcccaggggcc

SEQ ID NO: 34102 - DNA, 208 bp, Homo sapiens; identical to SEQ ID NO: 30873
  chr16:2301873-2302081
  hyper

SEQ ID NO: 34103 - DNA, 400 bp, Homo sapiens; identical to SEQ ID NO: 30874
  chr16:25078047-25078447
  hyper

SEQ ID NO: 34104 - DNA, 135 bp, Homo sapiens; identical to SEQ ID NO: 30875
  chr16:2544830-2544965
  hypo

SEQ ID NO: 34105 - DNA, 100 bp, Homo sapiens; identical to SEQ ID NO: 30876
  chr16:28925777-28925877
  hypo

SEQ ID NO: 34106 - DNA, 405 bp, Homo sapiens
  chr16:29153172-29153577
  hypo
cgtggcacgaggaagcagtggaataatcctccatggcacaagggagcggtggaataatcctctgtggcacgcgggggggggtgtggaataatcctccgtggcacgagggggtggtggaataatcctccgtggcacggggggtggaataatcctccgtggcatgagggggcggtggaataatcctccgtggcacgagggggcagtggtataatcctctgtggcacgaggggtcggcggtataatcctccgtggcacgaggatggtcaccgcattcgtcactcttagctgcagtgcgtgtgacagtcgccagggctgctgtttgaggaatgggagttgcctgcgtctgctctgccccaggtggtttgtagggtggtttttactccttgccaaagcccacacagcccc

SEQ ID NO: 34107 - DNA, 163 bp, Homo sapiens; identical to SEQ ID NO: 30879
  chr16:29231876-29232039
  hypo

SEQ ID NO: 34108 - DNA, 88 bp, Homo sapiens; identical to SEQ ID NO: 30880
  chr16:29607025-29607113
  hyper

SEQ ID NO: 34109 - DNA, 549 bp, Homo sapiens; identical to SEQ ID NO: 30881
  chr16:30959765-30960314
  binary

SEQ ID NO: 34110 - DNA, 384 bp, Homo sapiens
  chr16:31138407-31138791
  hypo
cggtaagtggggctgggaagctgcctgcaggtcccccgtctccccttgccgaggagcccctgctgagccgtgcactgtgcctcactcccaccctgcctgcagatcaccaaggtgaagtatgtggacaagatccacatcgggaactacgaaattgatgcctggtatttctcaccattccccgaagactatgggaaacagcccaagctctggctctgcgagtactgcctcaagtacatgaaatatgagaagagctaccgcttccacttggtgaggctgggccggccgggccgagctgggcaggggcccggtgagaggcagaggcaggcatggagactgagggcggctgcgccggcagctccagggaggagacaggcccaaaggagc

SEQ ID NO: 34111 - DNA, 900 bp, Homo sapiens
  chr16:31498993-31499893
  hyper
cggcaccccgtgaccggggatctgccgtggcccgcgctgctcctcggactcacaatcgtctcgggctggtactggtgcagcgaccaggtgcgggtatagggctgcgcctgcagtgaggccggggcggagccgagacgggcggagcctgagtccctccccgccttccccacaacggtctaaggcgcagtctgaggggcgggaacccctcgggttggtgctaaaccagacagaaggctccatctactccaagcgtgcagctgaacttggggcactcacgagccagaggcggggcacagagcggaacggggcgcggggcggggccgaggggaggcccgcaagcgggcagctgaacgcccctcccgtaggtcatcgtgcagcgctgcctggccgggaagagcctgacccacatcaaggcgggctgcatcctgtgtgggtacctgaagctgacgcccatgtttctcatggtcatgccaggcatgatcagccgcattctgtacccaggtaacatccctgccccgcccctttcctgtgccagcaaccgggcgcccgtcgcccagttccgtcaccctcctaagactcggcagtttgggcccggagtcccgcctccctccgggggtcgcacgcctcctctgctaggattcccagtccccacctcctgggattcccagaccaggccccgtcctaacggcgcggtggcctctctctggcagacgaggtggcgtgcgtggtgcctgaggtgtgcaggcgcgtgtgcggcacggaggtgggctgctccaacatcgcctacccgcggctcgtcgtgaagctcatgcccaacggtaagggcagccccgggccacaggcgcaagctcgctgcggagcccgctgctgggaggggtcgtccctcgcgcagctgcagcc

SEQ ID NO: 34112 - DNA, 355 bp, Homo sapiens
  chr16:31548824-31549179
  hyper
cggcgtttccccgcggaggtcatgaggtccccacggcccaggccccgtccccggacagccccgggtgccccaggagctccggccgcagctcacctgggaccggcctcccgtggagccaccccttgcccagccgcccccaagttcccgcaggaggaactggcgacagacacgtccagcccgcagccgccggccgcaccggcgctgcactaactgggacgcgccccggggccgcgctggctcggatccgcccagacccccgctcctccattgccgcccagcggggatcgcggcgcgctgccctcccttcctgggttcccggggctgagcttcctgggaggtccgcacacccccaacc

SEQ ID NO: 34113 - DNA, 279 bp, Homo sapiens
  chr16:4203909-4204188
  hypo
cgagactccgtctcaaaaaaaaaaaaaaaaaaagaactgatcaatgagccgccagatgccgagcaccacaccggcaagggctgcggatcgtgaacactggagattcaaacagcagagagaccacctcacaccattctgtcaacccgtgccaagtgcccaggcctgtgccaacgcttggcacacaatgattcaacagaggcagcctcatgcttcacggcccgatgctcgcttgttgtctatggccgtaggctaacctgcaaataaagaactggactgcac

SEQ ID NO: 34114 - DNA, 187 bp, Homo sapiens; identical to SEQ ID NO: 30887
  chr16:4234090-4234277
  binary

SEQ ID NO: 34115 - DNA, 507 bp, Homo sapiens; identical to SEQ ID NO: 30888
  chr16:46683305-46683812
  hypo

SEQ ID NO: 34116 - DNA, 114 bp, Homo sapiens
  chr16:468053-468167
  hypo
cgcactcttttttgtccggcttctctcactgaacctgattgctcccagagtcacctgtgatgtcgtgtgtgtcagtagtgaaatcctcttcagggttgagccgggctccgcgcc

SEQ ID NO: 34117 - DNA, 170 bp, Homo sapiens
  chr16:57937613-57937783
  hypo
cgggacctcagagacacagaggacgagggaggcgccccgaaggcatggcaccgggcaccaggcgacaggagttgactgggagctggtggctgccagggcgtgaccatcttacccagcatgccttgcgagtgccaggtgtactcgtaccaggtcttgacgcggttctgcac

SEQ ID NO: 34118 - DNA, 876 bp, Homo sapiens; identical to SEQ ID NO: 30891
  chr16:58030638-58031514
  hypo

SEQ ID NO: 34119 - DNA, 132 bp, Homo sapiens; identical to SEQ ID NO: 30892
  chr16:67184509-67184641
  binary

SEQ ID NO: 34120 - DNA, 279 bp, Homo sapiens
  chr16:67981981-67982260
  hypo
cggggccgccagttgggggtcctcaggagtgtctgcaccgcacaggcgaggttcacgaacaggtagcacatcagaaagaacctgcggcacagagggcggttggcgaagagcagcctcctcggcagctggggacctgatgtcaggctgggcctggcccagaaacggggcgtggcccggccctgccctgcatggctcagcaaggtcttctcaacctcattgctgccacctccatggcctgaggcaatgagactactgtggaggagtcctcggagccagatc

SEQ ID NO: 34121 - DNA, 462 bp, Homo sapiens
  chr16:68269820-68270282
  binary
cgtcccagcgcacccgccgtagccccgaagaggacgaccagtgatccgggccaggggcaggggtccgcggcggggtcggccgcggggtcagggcccgggggagggggcggcggcggcggcggagtcatggccgcagaggaagggggctctcggccagacacgcggaccgacgaggcgcacgcacgcaccgaccgaccgcagacgcggatcagcttgggcgggacaccgtgtatcgggggcggcacctgcggcccggctggctcagtgggcgctgccaagacccgcccgtggcgccccgcggggcggggcggctaccggcccacgccctctccaggcgagttacctgccggccccgccggccacgtgaccggggcggctccgggaaccttgggggagggccgccagaactcaacccaggacgcaagagctcacgctcccggcctgggcgcacgcttaggatcc

SEQ ID NO: 34122 - DNA, 637 bp, Homo sapiens; identical to SEQ ID NO: 30897
  chr16:68270868-68271505
  binary

SEQ ID NO: 34123 - DNA, 529 bp, Homo sapiens
  chr16:72459594-72460123
  hypo
cggctggcgtctgtaccctgtgggaaaagttaactgtaattcttcggcttttaaaatcaattaacccgagtgttaattaacgtcaagtcgacgggaggaggagaagaagaaggggagggagggagaaaagaaaaaagctgcaagggcggatggcagaagagttggcaccgtgccatccattcaggggcaacgccacagtttcgtgtgatagcagcagcgggtatatgatacggggccctgtatgcgggccagacagtgcggtaaagccaagggagattatccagacccccaggagcgaacagcaagcagcaaccgaaggcgcaagtgccaggattacagcctaggctgctccaactatgagcccttcctcggaccctgggactcggctacttggggtttgggggtcttccacaccacagaggcacaaagctgactttaatcactttttttcctttaaacttgattctgccgcagtggagccagcacagcggatgttttcacacccagcaagacaaaggccgtcgtctcc

SEQ ID NO: 34124 - DNA, 350 bp, Homo sapiens; identical to SEQ ID NO: 30899
  chr16:75136341-75136691
  hypo

SEQ ID NO: 34125 - DNA, 263 bp, Homo sapiens
  chr16:75263542-75263805
  binary
cgatgccgcgcaggaggtcgcacagcaggttgctgtagtgggtcacctggctgcgcacgtcagcagccttggcctgccgtgacagtgtgtccccgatgaacaccagcttgtgggcgctgaggatgacgaacttgctgtgcgccacaaagatcttgggcggctggttggtggccacggcggtaaagaaggcgtccacggcgttggtcagtgtggtcaggttggcctcacactgctccaggtagaagagcagcagctgccggtcc

SEQ ID NO: 34126 - DNA, 284 bp, Homo sapiens; identical to SEQ ID NO: 30900
  chr16:77227386-77227670
  hypo

SEQ ID NO: 34127 - DNA, 213 bp, Homo sapiens; identical to SEQ ID NO: 30901
  chr16:81533335-81533548
  hypo

SEQ ID NO: 34128 - DNA, 47 bp, Homo sapiens; identical to SEQ ID NO: 30902
  chr16:81765480-81765527
  hypo

SEQ ID NO: 34129 - DNA, 280 bp, Homo sapiens; identical to SEQ ID NO: 30903
  chr16:84998400-84998680
  hypo

SEQ ID NO: 34130 - DNA, 214 bp, Homo sapiens
  chr16:85083563-85083777
  hypo
cggtctctgtccgagttgaattcagctgtcccggagtcagccgctgtgtccttttgtgaaagaagtacagcccgtcacccagggagggcgcgccttatggcgggttctaacacgcagttgcaatggaaccaactcagtcaatggtgatcgctgatggtaaacaacccctcaccctgcactgtctcggtgcctgaaactcaagggcccagccctc

SEQ ID NO: 34131 - DNA, 910 bp, Homo sapiens
  chr16:85932121-85933031
  binary
cgcctagcaccttcgatgctcctgtttcagtcgcggtctcagcgggcagtggcctcctttgaagctgggattctcctgcccctcccgggcagcgcaggccaccggtgacccgggacggtctgtaaacgaccttcgcgtccccgtccccgtggaataacgcgcggcgggcatcactgcccaatatccagcgctcgtgaaggcggagaccggcggggcagctagtttctggctgtggattctgattaatgggccgcaggcgcacggtctgcaccgtccggctcgttgctagtggctcgctcgggagccgccgcactcccggggctgtccgcccgagccggcctggaaggcggaggacgcctccaggtcgctccgcggggcctccggaattcctgggaaagcccccctgcagcgccgcccctggaccccaggtgtgaggagcggggctcggccagcggctccagaagaggcccggaccccactgccgtggctgccgggggcgggaaagtgatttctcggaaagcagagcacttcgaagaaggcgggccgcgcgagccaagctgacgctattggtcggtgtggccgtcgctctgcgcaccgcccgtcccccccacgaccctttttaaggccgcgcgaccgctggcgcatcgcctggagcgcggcagcaagcgtgggaacgcgggcggcgagacggcggcaggacggcggcaggtaggcacagtgggcgggtagggcgcccgtgtcccgcgcggtccggtcccgcggggtccccgacgccaggcggggcgtgggggtggaactacctaccgtaatgtccccgggcgcagctcagtggccacccgtgtccctctctgctttttgcctattttccagccacctaagtccaatctgaatgcccaagtcgttgattgtc

SEQ ID NO: 34132 - DNA, 77 bp, Homo sapiens
  chr16:86903437-86903514
  hypo
cgtagaggtgacggcggcgcaggcgcagtttagaactgcggagaggtgatggccgcgcaggcgcagtttggaactgc

SEQ ID NO: 34133 - DNA, 814 bp, Homo sapiens; identical to SEQ ID NO: 30906
  chr16:8767901-8768715
  binary

SEQ ID NO: 34134 - DNA, 426 bp, Homo sapiens; identical to SEQ ID NO: 30907
  chr16:87744572-87744998
  hypo

SEQ ID NO: 34135 - DNA, 328 bp, Homo sapiens; identical to SEQ ID NO: 30908
  chr16:88111298-88111626
  hypo

SEQ ID NO: 34136 - DNA, 1388 bp, Homo sapiens
  chr16:88792758-88794146
  hypo
cgcggcgctgcagcagcaggaagaagaagcagacgctgtcccagatgatgccagcctcctccacaggcagcaggcagtcctggtctctgtccatcatctccttggctgcaaggcaggcaccggcaagggtcaggcccagggcccaggagcagggggcttccccacgccctcccccgccaccgtcctggccactcacggtcatagtagcccttgacggtgcatacaaggctgaagagctggatgacccagcagaagccggtctgcatctgctccacgaagacgcaggccaggagctgggggagagcagggtcagcggggccagcggggccccagggcggtgggtgcgggggggccggaggctcaccgacagcatgttcttggagatgatgacggtgacgttgtacagaatgaggcagtcccacagcacgaggcgggcccgtgtgtccctctgcagcagggccgtgccgaagagcagcaggtagaagcaggccagcaggtagcccagcccgaagatgctgatgcgggtggcccccgtgacaaacaccaccaccagcaccagccagaacaggtatcggaagacggccaccttcagcatgtcaaggtaggacctgccaggccggagcgtcagggcgggcgccccggccacccctcccagaaggttccccgtggagggtgacgtggaacccacctgcagtggataaagttgggcacggggttgggctccccccgcagcggctccaggcggtcggtgttgacgccagccatgcgctgccactcctctgtgcgctcagctgagaacacctgccactgctgggaggcgcacagcagcaggagaaagtcgcctgcaggacacaggagccgccgctgtgccacacggggacccacacgaggtgggcacggcgcataaatcccacctcccaccccaggcctgtcggcgtgcagccgctgggagcggacacacgtctgcctgggtgagtggccgggtgtccctgggggagccccggtgtgagggcatctgcacaagggctgccgtgcacacaggctgaggtctgcgtgcgtgcgtgcgaggtcagggcctgcaggccgccatgtgcctgaccacacctccgcccgtgcacgcctgtgtgcacacttgtgagcagatttgggggcgtgaatgtactctgagggtcctctgcagaggcgggggtggtggggggcactcactgatgaggttggtggagttgggggcccggaagaaatcaggcaggtacagccacttgatgagtgcggagttcatggggacggcccggctccagcgccagggataatctgggggaaggggtgtcatgtcaggaagggccgggcctgcctggggcctgagacacccggtccccacccgttgaccc

SEQ ID NO: 34137 - DNA, 975 bp, Homo sapiens
  chr16:88945383-88946358
  hypo
cgagtcctggccccaccgcttcccaaggccgtgacctcagacaagctgccaaccctctcgagccctcagtttctggaactacagaacggggacatccataggacgcctcactgaaccatgtgggatctctgtgctgataaagcacagtgtgggcggggatggcgtgcctgctgcaggatgcccgtgacaactgtgctgatgccacgtggaggctcagaatcctcatgggggtggcgtgggaccgcacgggagccgaggcaggggatgggtgtcagcgtggccgggtggccctacctcgctggagtcctcctgctggttgatgaccgtcagggcgtcctcggaggcctgccgcttcgcctcggccagggcccgctccatcttggcacgctccgtggtgatgagctcgtgcgctttgcgctccgcgtccgacacggctttctgcagctccgacatggcctgccgcttcacctcattcacggcctcttctgcaaaggacatgggcagggctggcggtcacatgggccatcccagatgggtctctggacttcctacgcgtggccacaacctggggacaggggctgtgtgcagctgaacacacgtaccatctgtgcacacaaaggcacatgttgatggggctgtaggcagctgaacacacgtagcatctgtgcacacacagacacacgttgatggccctcatgcctgtgcagacaagtgcatgcaaataaacacaggcatcccaggcatgtgtgtgcaaagctgggtcacgtggtgtcacaagtcaaagcttgcactctaccgcagcggctccccaggcactgcacccctgcagggcaagggcgaggcccaccccagggcctggtcagccaggggcgcacccggaatctgcattcctaacgcgagccgggggagctgctgctgacctgaagcacttggataactctgccgttccgccttcacctctggccccacccagac

SEQ ID NO: 34138 - DNA, 52 bp, Homo sapiens
  chr16:89188349-89188401
  hypo
cgcaccttgtgtggagggccacacggcgtgtcccgcctggcctgggcccccc

SEQ ID NO: 34139 - DNA, 808 bp, Homo sapiens
  chr16:89202519-89203327
  hypo
cgttttcttctttgaaagcacaggaaccacagccctgtggattttgcgagtcgcggggctcccggagccgctgggagggcagccgtgtgagatgcggggctgcgagcgtggaaacactcgcagtcgccagtgctgaggcatgtttcagccggggcggaatcacatgcattaattattgtacagagatgtctttagtagaaaatgattttgaaattcagtttaatttcattgtaatgtgctgcaaacaggaagggagtatgtgtgtttaattggctctcgggggtaaggcctggaagccgcatgtctttgtcacaggccattagcgatgctgctgcataatgagagcctgcaatcagctcacagctgccgctcctgccgggagagcatgatattaaatagaaatcaggagaaattaaacttaaccctttccctggccagcccctcctgccacacggattctggcataagccggcgggcacaggggacagccagggatggctggacacagctgaggatggccgaggccggcctgcagctccccaacggcctcctccgggtcaggatgagaggagaggttgccagctttgatgccagccgctcctgcctcccccacctgcctctgtgcctacagcccgcttctgcctcaagatcacacagcgggcttgtgaggccaggggtctccgctgctgctcaaggagatggcaaaggtctgtttcaggtaactcctctgacggccacaacgatgtcttcagacgtcaaaggtctgtctcaggtaactcctctgacggccacaacgatgtcttcagac

SEQ ID NO: 34140 - DNA, 210 bp, Homo sapiens; identical to SEQ ID NO: 30914
  chr16:89354795-89355005
  hypo

SEQ ID NO: 34141 - DNA, 298 bp, Homo sapiens; identical to SEQ ID NO: 30915
  chr16:9186882-9187180
  binary

SEQ ID NO: 34142 - DNA, 311 bp, Homo sapiens
  chr16:945437-945748
  hypo
cgggagggccttcggggcggccgtgggcccctagccggggccaggcaggacgggagccgccgggttctctggctacatgtgaccgagaaggcagcaggctctgctgctgtctgtgcaggacgacctgggcaggggaggggcgtgtccaattccaacgtgtttggaacatggggctcgcgagactggcgggggagtgggagagccaggagaggctgcaccgcgccctgaaggacggcacgtggctcaagtgaccgatgccgagagggacacgaatgagaaacggcaggggagtgggaccaagagcccagccc

SEQ ID NO: 34143 - DNA, 198 bp, Homo sapiens; identical to SEQ ID NO: 30917
  chr17:1011791-1011989
  hyper

SEQ ID NO: 34144 - DNA, 313 bp, Homo sapiens
  chr17:14212398-14212711
  binary
cgacgttgccacgtgtccgctcctttcgggagctaggggggcgttggcttggacatcccgttctggaagggtggccgggggcgctaccacgggcggggaaaatggctccgagccacccggcctcgggcatcaatcgacgcggccctggtgtcgcgcgggatcgccgcctctggcccgggggccgctgagccggagacagatggcggagcttcccagtgcgggggcagggctggcagccgagactggggccgcctcccccgcccctaggctggccgggtagtcctccgtggccacgtgaccagcctcgccgtcc

SEQ ID NO: 34145 - DNA, 53 bp, Homo sapiens; identical to SEQ ID NO: 30919
  chr17:1451516-1451569
  hypo

SEQ ID NO: 34146 - DNA, 272 bp, Homo sapiens; identical to SEQ ID NO: 30920
  chr17:1775571-1775843
  hypo

SEQ ID NO: 34147 - DNA, 300 bp, Homo sapiens; identical to SEQ ID NO: 30921
  chr17:19140744-19141044
  binary

SEQ ID NO: 34148 - DNA, 130 bp, Homo sapiens; identical to SEQ ID NO: 30922
  chr17:19623347-19623477
  hypo

SEQ ID NO: 34149 - DNA, 338 bp, Homo sapiens; identical to SEQ ID NO: 30923
  chr17:19646495-19646833
  hypo

SEQ ID NO: 34150 - DNA, 204 bp, Homo sapiens
  chr17:19771609-19771813
  hypo
cgcgctctggaaaaccagagttcacgctgccaaactgccagccttcggacgcctctcggggtttactcgcttaggatccctagagggacggtgacaggcgggattctgcaccttttgggggtcccttgactgcgagaagctggtgacagctcagggccctcttcgcagagaatcgtttctgcacaccgactcagaatcgcacac

SEQ ID NO: 34151 - DNA, 300 bp, Homo sapiens; identical to SEQ ID NO: 30925
  chr17:26851601-26851901
  hypo

SEQ ID NO: 34152 - DNA, 807 bp, Homo sapiens
  chr17:27940157-27940964
  hyper
cgcggagttcagactctccccaggcattgacggggagaacttggtagggtctgggctccgccacgaccaggtgggggccaggacgccgcgggactgaccgcctccactagagggtggtggccgcgggccgccctggagcctccacgccgtgtcccggccccggccggtgggtgggtgcgcccgggagcccgcgacattccttccccacccccaggagcgccccgcccacgccgcagcgccagcctgcgcccccggcgtcagtgcccagccctcggcccagctcagggccaggttccggcggccacgtgttccggagctacgacgagcagctgcggctggcgatggaactgtcggcgcaggagcaggaggagaggcggcggcgcgcgcgccaggaggaggaggagctggagcgcatcctgaggctctcactgaccgagcagtagcgccccctgccgggaccctcgccagcgccacgcgcgccacgcccagggccaggagccagacaaaccccggcctgcgcgcctgcagagcggcggctggagactggagccaccgcctcgcgggtgcagcagcacagcaggcacggttcggggagggattcggcatggccgcggggtaccttcccaggccagggccctggaggcaactggcacggcctggtccccctgctttgctgtattctgattccccaacccgctcccctgggctcagatctgtcctgtcctagggcggagccaggcggtcctgagggggagatgaatccttagaggagcgctgtccctatcccttgctccttctggccggtcc

SEQ ID NO: 34153 - DNA, 220 bp, Homo sapiens
  chr17:30243769-30243989
  hypo
cgatgtaactaaaacgccactctacagttaactccctctattccttagatttcattcccggggtcacctctttggcctaggtgcacacaccgcgggctccgctctaggtggggcacaggccttcgcccgccgcatgcaccctgggctgcgcagccccagccagcccgacccgggctcagcgacccctgcccccgggaccccgcaccggggctgagcgctc

SEQ ID NO: 34154 - DNA, 73 bp, Homo sapiens
  chr17:34400028-34400101
  hyper
cgccgcccaccggctcccccattgtattgactccacattgccccctgctggtgaaacaagtgcgaaggtcagc

SEQ ID NO: 34155 - DNA, 226 bp, Homo sapiens; identical to SEQ ID NO: 30928
  chr17:36886750-36886976
  binary

SEQ ID NO: 34156 - DNA, 194 bp, Homo sapiens; identical to SEQ ID NO: 30929
  chr17:37074886-37075080
  hypo

SEQ ID NO: 34157 - DNA, 206 bp, Homo sapiens; identical to SEQ ID NO: 33159
  chr17:39788221-39788427
  hypo

SEQ ID NO: 34158 - DNA, 87 bp, Homo sapiens; identical to SEQ ID NO: 30931
  chr17:3985702-3985789
  hypo

SEQ ID NO: 34159 - DNA, 199 bp, Homo sapiens; identical to SEQ ID NO: 30932
  chr17:40436563-40436762
  hypo

SEQ ID NO: 34160 - DNA, 343 bp, Homo sapiens; identical to SEQ ID NO: 30933
  chr17:42254319-42254662
  hypo

SEQ ID NO: 34161 - DNA, 425 bp, Homo sapiens; identical to SEQ ID NO: 30934
  chr17:43246865-43247290
  hypo

SEQ ID NO: 34162 - DNA, 886 bp, Homo sapiens
  chr17:43324788-43325674
  binary
cgggcgccggggagaagggctgcttcttcactagagttggcggcgagggagcccgcttcgagggggcggaggctttcgtggctggcccagtatccctgcgggaggccggagggggcgagcgggcagctggggttagacacgccgggccagccccgcagcagttctccttccggctgccccgccccatttgcgccagtcctgcctcccacccgggcatctggccccttttcctttcgccctacccagtacttagtgacgccataagtgacctcgccttacatctccgcgcgtgccgcctccgtcaccgcctgccgggtccccatttcttccgggcctgcccccgctcctcgcctgcccctcccctccaccagccagtgtcgccccatctgtctgtcctccgggcacttgtcccgcccctcactgcgtgtccctcccccgcccgccggctctcacctaggccgagacacgccccgggctgggcgggatcttggggcggccgggctagtagggctggatcaggcggaagccggggcccggggctgggcttcgtgtcctgcgttccgggagcgccaacccctccaggttaggaatctgagagtacgggctgcgcgcacctggggcgggtgcctgggaggaggtggaggaggagacggtcctcagaacgggtcctgggggtcggaggcgagggcgggggttgtaagtggccgggagaggtccctcccgcgggtcccggcgccccccgccccgtcggggacgcacctacttcgtgcagtttgtgcagcgagcgcgccagctcctagttggagaggtcgctgatgcgcgccgcgtggcagaaggcgagccccgcgtgggagcgccccccaacccccgcagcctgggctgagcc

SEQ ID NO: 34163 - DNA, 269 bp, Homo sapiens
  chr17:4436345-4436614
  hypo
cgctctacctgcaccgcgcccaagttgtgcagaagacagcagagacgtgcaacagcccgccctgtggggccaaggacaggtggggccccgcggggtgggcccagggctggtgagggacctcggacaggagagcccctcagccttagccctgagccgcctcaactcgtgcgccaccatcctctgtccccacagcctcatctttggggccatcacctgctttacgggatttctgggcgtggtcacgggggcaggagccacgcgctggtgcc

SEQ ID NO: 34164 - DNA, 238 bp, Homo sapiens; identical to SEQ ID NO: 30938
  chr17:4685696-4685934
  hypo

SEQ ID NO: 34165 - DNA, 312 bp, Homo sapiens
  chr17:48687012-48687324
  hypo
cggtgcctccctgccccgtgaccctgaccagctagccacattgcttgtcttcctcaagtgccctgtgcccccagcttcgggctggacattcagagccagccacccaatgggctcagcgcaccccacccataggcagagtgaggtgggagctgaggggaagccgcccctgaggggccctgcccagcgcacctggtccggccagtgaccaatgtcgtgtttcgttcttttagatctaatgctggacgatgtaattgcttccggcagctcagccagcgctgcgtcaggtactgcgtctggggtgtgggctcatgc

SEQ ID NO: 34166 - DNA, 341 bp, Homo sapiens; identical to SEQ ID NO: 30941
  chr17:4890368-4890709
  binary

SEQ ID NO: 34167 - DNA, 122 bp, Homo sapiens
  chr17:49462715-49462837
  hypo
cgggatccatccgccatccttcccctcacatgggctcctctaggcccgctcccgcatccctttctgtcccctcccacaaccacagcgactcttcccataaacaaccgtgacctggtcatgcc

SEQ ID NO: 34168 - DNA, 359 bp, Homo sapiens
  chr17:60744479-60744838
  hypo
cgggcaccagcgcacccagcagcctggacggggaggccggggcggggctggtactggttactgggtagaaggttcaaggcgacgtgcacccaggttagaaagcgcggaggaccccgtggtctggggcggagctggagctgagcaccaggcttcccgaactggctcaggcttccgagggagcagagggaggtaggaggttctgagcagggccccgggagccacggtgtgagcttctctctccgggggtgctggcgccctgccctccccacagaccagccggacaaccccagtgaggagaactgtggagtgatccgcactgagtcctcgggcggctggcagaaccgtgactgcagcatcgc

SEQ ID NO: 34169 - DNA, 771 bp, Homo sapiens
  chr17:62776313-62777084
  hyper
cgttcctcgactaggaaagggtatacacttgagtcactaagcacactgggccccggaggcggggtcatcgagctgcccagagccaacaaaccccaaggtggacactgccccggcgccccttccccccggaccccgcagcgcactcacgtctgctgggcgggcctcagggagcccaagggccgggtgggcggggccggcaggttaggcccggaccatcgccctgggcggggcttccgaggtggtgccggagaggtttcgcggaatcggagctggcaacggcagcgaatagggacagcgacgctcaggagtgctgtcacccatacccaaagaagctgcgtctgggcggggcgaggaggaacctgaatgcctctgctggggaccttggggggcattgggacgaggaccggagcagaaagccggggtccggagccaggaaggctgcgtctgaaggggcgctggctggtcgctagcggagcccaaggagggtgggcctcccctgtcccgccttcccccttcccttctcccccggggatttgctgtcccggagtccctgcgtccctcccgcctgcggctctgggaatgccggtctggggctggttgtctagtgcgggcgttcccgttcgcggggaggtcattggcaccctgaatcacccactgcgagcccttccaaccggattgtagacctgccagctccgggcccacctcccccaacagggcctttcccggagcaacccggccgggcctggaaaaactccgagagggattcccagc

SEQ ID NO: 34170 - DNA, 272 bp, Homo sapiens; identical to SEQ ID NO: 30945
  chr17:65040729-65041001
  hypo

SEQ ID NO: 34171 - DNA, 595 bp, Homo sapiens
  chr17:72367880-72368475
  hypo
cgcagtggccctggcgcgccttgccaccaggaccaggaggccctcctactactaccttctggcgctcacagcctcggatatcatcatccaggtggtcatcgtgttcgcgggcttcctcctgcagggagcagtgctggcccgccaggtgccccaggctgtggtgcgcacggccaacatcctggagtttgctgccaaccacgcctcagtctggatcgccatcctgctcacggttgaccgctacactgccctgtgccaccccctgcaccatcgggccgcctcgtccccaggccggacccgccgggccattgctgctgtcctgagtgctgccctgttgaccggcatccccttctactggtggctggacatgtggagagacaccgactcacccagaacactggacgaggtcctcaagtgggctcactgtctcactgtctatttcatcccttgtggcgtgttcctggtcaccaactcggccatcatccaccggctacggaggaggggccggagtgggctgcagccccgggtgggcaagagcacagccatcctcctgggcatcaccacactgttcaccctcctgtgggcgccccgggtcttc

SEQ ID NO: 34172 - DNA, 1345 bp, Homo sapiens; identical to SEQ ID NO: 30948
  chr17:7254483-7255828
  binary

SEQ ID NO: 34173 - DNA, 230 bp, Homo sapiens; identical to SEQ ID NO: 30949
  chr17:72875508-72875738
  hypo

SEQ ID NO: 34174 - DNA, 282 bp, Homo sapiens; identical to SEQ ID NO: 30950
  chr17:7320371-7320653
  hypo

SEQ ID NO: 34175 - DNA, 88 bp, Homo sapiens; identical to SEQ ID NO: 30951
  chr17:73910336-73910424
  hypo

SEQ ID NO: 34176 - DNA, 117 bp, Homo sapiens
  chr17:73913802-73913919
  hypo
cgggcctcacctgctccagcagccggctctgctcattcagccgtgcctccatcttcccgatgacctcctgttgccggctccgctcctcctccatgtcccgctgctgctggcccagcc

SEQ ID NO: 34177 - DNA, 349 bp, Homo sapiens; identical to SEQ ID NO: 30952
  chr17:74003316-74003665
  hypo

SEQ ID NO: 34178 - DNA, 506 bp, Homo sapiens; identical to SEQ ID NO: 30953
  chr17:74003908-74004414
  hypo

SEQ ID NO: 34179 - DNA, 465 bp, Homo sapiens
  chr17:74005186-74005651
  hypo
cgggcttcctcctctccagcagcaggcgcttgctctgcagctcgtacaccgcgtcctccgcggcccgcctcttctgggccgcctcccgcacctcctggcggagccgctctgcttctttctccagcaccgggtccttctcgtggcgcaccacctccttgctcaccgtcttggtctccaccttggcccgctcgcgcctccactcgtcgcgctcaccctgcaggcggatgagctgctcctgggagcgcccgtggctgttgacgagctcgttgagctgagccttcaggcggtcgatctcacgcagcacctcggggctcctctcatgcctcaccacctcctgggtcacctccttgtactccaccgtgggcttctgggcccgcaggacctccaggtcgggcagcagcttctccacctccttctccacaccgctcctcttgcccgccatctcctgcagcttggccttgagcc

SEQ ID NO: 34180 - DNA, 48 bp, Homo sapiens; identical to SEQ ID NO: 30956
  chr17:74475354-74475402
  hypo

SEQ ID NO: 34181 - DNA, 830 bp, Homo sapiens
  chr17:74865491-74866321
  hyper
cgcgccccttcccagcccctcagggtccttcctcaccccgcggacggtcccatccgggtggcaaagttagtgtgcggcgccttggagctccccctccggtccctcccgtcccgcccgtctgcccctaggtcggctaccccccaacccctccgcctgtgccaccctctccccagcctttggtggcactgctctcctccccgcggggctcgggcctggctccgacgagagggtcccgagattagagcgaggactcgctcatcccaggattcgcccccgatcgcaggcgtcggagaggcgggggcaggggcggcgctgcagggctacggggcggctggagccgaggctgcggcggagcgtggtgggcgggcggtggcgaaggcgacacgcttcgggcggccaacacctgggggcccaggccaggcagggctggggccgcgcgggactcactggacccagccaggggcccccagggcccagcggtgccggggcagccccctctcctcccaggcatccgcggaaccggcccgcagcggggtggggagggggcgctgcccagtggacgcccggcggggcccgagtgtcaccccgtgggtagctgggcagcgaggaagctgggggagtgaccgccccggcgcgggggccggactcgggacgtggccacaggtgggctccgggcgcgggaaggagcccgagaaggcggagcttgcaggggccctgaactcttgccctccaggtctcggcccagccccactgtggtccccctgccggctccagacggggatgggggcggggagacggtggctcacctggagcccgcctcccagcacacc

SEQ ID NO: 34182 - DNA, 600 bp, Homo sapiens
  chr17:74965156-74965756
  hyper
cgcagccggcctcggctgtttaccaggcacccgttacgctaattgaaatgtgccaaatagctgcccggggcggggccgagcggagcagcgggctccgggtcacctgcggtgttgatgaggtattcaagaggaaaaagcgccggagcggcagcttcatttgcaagggaaatgacttgacgaggcccttcatttgcatctttcggcccagaggttctgattagctgcggaggaaaagcccgcctgttttatgcatgaggagctctgcctggagaccctcggctgctcacccgccccagccctgccttctcctcctaagtcggggaggaggagaggggtccccagagggcaggatccaaggctgaagcctaagaccaacccttggtggtgaaaatagaaatttcttgaggcaaggctgccataaagtgcagtgagactcatcggtgaggggggcactgtgcgatctccatccggggtcttcagggcaattgcatgagctcagcctgctaagagcctggcaggcagcgcgagctcccctggagttccggccgctccgcccagtggctctgtgcagcgcttcccgcccggagaacctagtgcccc

SEQ ID NO: 34183 - DNA, 84 bp, Homo sapiens; identical to SEQ ID NO: 30958
  chr17:75082793-75082877
  hyper

SEQ ID NO: 34184 - DNA, 181 bp, Homo sapiens
  chr17:75411761-75411942
  hypo
cggcaccgaagccgagggaaggcagcattagtatgagctcccagcccaccgggctcctgtctggagctgacgtgcgaccaaggcacacgagggaagcatggcgaggtggacggtgcggaggcataaggagcaaaataaggcagatgcagtggctcagtggctcctggtggctgcgaggagc

SEQ ID NO: 34185 - DNA, 170 bp, Homo sapiens; identical to SEQ ID NO: 30961
  chr17:76337740-76337910
  binary

SEQ ID NO: 34186 - DNA, 187 bp, Homo sapiens; identical to SEQ ID NO: 30962
  chr17:76482434-76482621
  hypo

SEQ ID NO: 34187 - DNA, 49 bp, Homo sapiens; identical to SEQ ID NO: 30963
  chr17:7748395-7748444
  hyper

SEQ ID NO: 34188 - DNA, 184 bp, Homo sapiens; identical to SEQ ID NO: 30964
  chr17:77769064-77769248
  hypo

SEQ ID NO: 34189 - DNA, 162 bp, Homo sapiens
  chr17:77899525-77899687
  hypo
cggggccacatagctatgccgcccaggggctgggcctgtcccagctctggtcccccggccccaggtcctggacgctggctccgcgcagcagcaggcggcctccggaggacacgatgtgactggctgccgctacgtcgcactcagatgagtctgcgccggatc

SEQ ID NO: 34190 - DNA, 190 bp, Homo sapiens; identical to SEQ ID NO: 30966
  chr17:77917679-77917869
  hypo

SEQ ID NO: 34191 - DNA, 452 bp, Homo sapiens
  chr17:77923970-77924422
  hypo
cggtatccccccaaaccctcgagggaggtgttgtgttttgtttttttttttcaacgcagcagctttgattgctttatcggtgtgttcacagagagcctcacacaagaaaacggggccctcacgaggaggtggcccgtgggtgcgggcgggcggccaggccccggccctccttccctctcgctcgttcccggttcccggccggctctccgcggggccagctgggcggacccggacctcaccttccgcagcttgtactcctcctccacctggcccagctcattcaggtggttgagccaggcggagacgccgagcctcttgtacatgctctcctcggggtgcgtctcggaggacggcagcttggggcggcggatggagaactgcatgcatgtcttatcgggggcgacctgctggacgggaggaaaactgggcaaaggtcaggatctcagccgcgc

SEQ ID NO: 34192 - DNA, 164 bp, Homo sapiens
  chr17:78587649-78587813
  hypo
cgggctgggccgcgtgttctggataagtggctgtggagcacgatgaagcgtctatcgcagcatcatctctgcacccagatgtggccgtgctgagtggattcctgccccagatcttgggaagaaggttggctttcctcctggtgttggtggaaggcctccccggc

SEQ ID NO: 34193 - DNA, 162 bp, Homo sapiens; identical to SEQ ID NO: 30968
  chr17:78590602-78590764
  hypo

SEQ ID NO: 34194 - DNA, 310 bp, Homo sapiens; identical to SEQ ID NO: 30969
  chr17:78598720-78599030
  hypo

SEQ ID NO: 34195 - DNA, 194 bp, Homo sapiens; identical to SEQ ID NO: 30970
  chr17:78649377-78649571
  hypo

SEQ ID NO: 34196 - DNA, 77 bp, Homo sapiens
  chr17:78774705-78774782
  hypo
cgctaacaatccattgtcgtgaataagtgagtctctgtgtgctgctgcttccgaggctctggtagcacggctgcccc

SEQ ID NO: 34197 - DNA, 124 bp, Homo sapiens
  chr17:78874437-78874561
  hypo
cgacagcagcatcacccctcggtgctcacctggtgaccgtctgccaagggcctggtggccccgccaccctacctggcccatgctccatggggttctcggttcactctcgtccctccactcacac

SEQ ID NO: 34198 - DNA, 60 bp, Homo sapiens; identical to SEQ ID NO: 30971
  chr17:79060187-79060247
  hypo

SEQ ID NO: 34199 - DNA, 196 bp, Homo sapiens; identical to SEQ ID NO: 29898
  chr17:79060680-79060876
  hypo

SEQ ID NO: 34200 - DNA, 257 bp, Homo sapiens; identical to SEQ ID NO: 29900
  chr17:79074754-79075011
  hypo

SEQ ID NO: 34201 - DNA, 169 bp, Homo sapiens; identical to SEQ ID NO: 30974
  chr17:79253772-79253941
  hypo

SEQ ID NO: 34202 - DNA, 261 bp, Homo sapiens; identical to SEQ ID NO: 30975
  chr17:8012317-8012578
  hypo

SEQ ID NO: 34203 - DNA, 98 bp, Homo sapiens
  chr17:80277699-80277797
  binary
cgtgtgtgcagagacgggtgcgcgactccatgcgtgtgtgcagaaacgggtgcatgtggacacgtgtgtgtgcagagaagggtgcacgtgactcacgc

SEQ ID NO: 34204 - DNA, 514 bp, Homo sapiens
  chr17:80332182-80332696
  binary
cgtcgtgaggggtcagagatggcgctgacccccgagtccccgagcagcttccctgggctggccgccactggcagctctgtgccggagccgcctggcggccccaacgcaaccctcaacagctcctgggccagcccgaccgagcccagctccctggaggacctggtggccacgggcaccattgggactctgctgtcggccatgggcgtggtgggcgtggtgggcaacgcctacacgctggtggtcacctgccgctccctgcgtgcggtggcctccatgtacgtctacgtggtcaacctggcgctggccgacctgctgtacctgctcagcatccccttcatcgtggccacctacgtcaccaaggagtggcacttcggggacgtgggctgccgcgtgctcttcggcctggacttcctgaccatgcacgccagcatcttcacgctgaccgtcatgagcagcgagcgctacgctgcggtgctgcggccgctggacaccgtgcagcgccccaagggctacc

SEQ ID NO: 34205 - DNA, 357 bp, Homo sapiens
  chr17:80394871-80395228
  hypo
cgactgggacccgggccggccgcatacactctggagtctcctacactgagacccgggcctggctgtctcaggcggctcccatgttggctctgggtacagccccgggaggcgtgtccagggccgtgttggccgcctcccctggagccactcacctgtttgctttctcacccagtcctcctcatgcagaagtaccggcggtgcggctttccgcagctgtgggcagccagtgccttcaagggtgccacggggcccagccaggccgtgccccctgttgagcaccacctcaggaaccacgtgcagtggctgcaggtggcgggcagcgggcccacggactcactgcagggcatcatcctgacc

SEQ ID NO: 34206 - DNA, 910 bp, Homo sapiens
  chr17:80571137-80572047
  hypo
cgcccccgactacagtggtgggagcgggaggtggccaggggttcacacaggcatcaacgccaaacacagggtgggtatgggtcagggctgcgttccacagggcacaagccgcctgtccccgcaagacatcccagggccacaggggagggaggacagaccagaaacgcagccggagtcatccatgcccacgcacctgtacgatcagacaggaaagctgctgagtaggcaccgtctgaggcagtcactctggagtcccttcgcacccacgtccggggcacaggaggttcgtgggggaggcagcagcccggccttgtttcccatacactgcgcttcccatcagttccacttgaaaagcagctgcgctcccgagtccgccggcctagggacaccgtgtccttgccgctctacagtgatttttaaaaagcacatgcctggggagggccggtgccgccagggcctcacatgaggcacgtccgtgcaggccctcgccacgttcctggtgaacgggcctgtgacacagccccgccgtccgcatcagttctgaggctgttcacgtgcactgcgagaaaacccacccttcttgcatgcatttcccccagattcatgtttatcaactggtaattacgctcctactcccccacccagagtcagatctcaagtgttagacaagccagggtgacgccggctcacttgaagctgccacttcaacatgcagggacattgctgctgccagccaccctccacctccacaggccagcaggagcctcagacctcccagagccacacaggcctcctacagatgcatttcctccctccctcctccagaggtgcccttggggcacagggagagaggagggcaggccgccccgtcccgacacagggagagaggagggcaggccgtcccatcccc

SEQ ID NO: 34207 - DNA, 139 bp, Homo sapiens; identical to SEQ ID NO: 30983
  chr17:80763321-80763460
  hypo

SEQ ID NO: 34208 - DNA, 385 bp, Homo sapiens
  chr17:80965837-80966222
  hypo
cgtggattccagacagaccaacagcgcccagccgcgatgctgccggcaccttcctctgcaggagacctcgcgctctcaagaggaggcgcagggaagaggcacgctctcaagaggaggaggaggcgcagggaagaggtgcgctatgcgcttaatcctgcaccgagacgtcagattctcagggcaggagcttttgtgggcaccgcacctagcacagggcctggacccagtgagcagatgtgaatgagaggcctgtgcgctggcctgagaggctggctaactttctccaggttcctagaagaagccactttcaaggctttcgagaagtgttgtgagctaattcatttgaaagcctctgtgccaacaggcggagcagaaagcgcaggcc

SEQ ID NO: 34209 - DNA, 328 bp, Homo sapiens; identical to SEQ ID NO: 30985
  chr17:80995234-80995562
  hypo

SEQ ID NO: 34210 - DNA, 395 bp, Homo sapiens
  chr17:81049931-81050326
  hypo
cgcagggttcaggggcttcagagggggttctgtgagcagggcttggcttgaaagccatttggggcatgcacctcatcccgcggccaggtggcatccggggaaggggccgggccgatggccctgactggaactcactgccctgctgggtgaggccccacgccggtggcaggtggacgcgtcgctgcctgcttagggatccccttcctggaatcttggcctcgctggcccttccagccacatggggggtcccgcgggatgggatcctccttttgggtgccgctgccgtcgcgacccagggaagtgggcagcagagctgtggggagtgtctgcccttcgaggaagctgggaaatgagggtggtcccggcgccgtgggccgtggaggtgggttgggggc

SEQ ID NO: 34211 - DNA, 467 bp, Homo sapiens
  chr17:81062114-81062581
  hypo
cgcgaccatgggtacgttggccacctgaaggttgagtcccgcagcctagagactggagcgtggggaccaggaggagcttcttagcggaactgggctggggctcatgcagccctccaggagcccccgacgcgacgccctggctcatcccgggtgaagaggctgctgagtctgaactgatgacagtggacgggtggccgccggttcccaacgcatggttgggcctggaacccaggtgactctgggagatgtggtcacagtcacagccgtctgtgggcctttgggttcaaaacagcgcgagtcacaggagacagaagggaatctgagcttgcgattgctcattcttgtcaccctcctggctctgggacacctctgccatctcctaccaagggtaccccattcctggcgagttggaaagtggcctcatgggcagaaaacgagggcaaagggagctgcgtgctgtgagagac

SEQ ID NO: 34212 - DNA, 145 bp, Homo sapiens; identical to SEQ ID NO: 30988
  chr17:850237-850382
  binary

SEQ ID NO: 34213 - DNA, 186 bp, Homo sapiens; identical to SEQ ID NO: 30989
  chr17:8977478-8977664
  hypo

SEQ ID NO: 34214 - DNA, 186 bp, Homo sapiens; identical to SEQ ID NO: 30990
  chr17:9233928-9234114
  hypo

SEQ ID NO: 34215 - DNA, 257 bp, Homo sapiens; identical to SEQ ID NO: 29910
  chr18:10485485-10485742
  hypo

SEQ ID NO: 34216 - DNA, 514 bp, Homo sapiens
  chr18:10589052-10589566
  hypo
cgtgtgctccgggagtgtgagccccagcttctgctttcactgaattctgctgccagccacgtccttgatactttgtgggtgatttatttcattggctcgctattacttggcagcggcggtggctcctcaagccagcgtgggctccaggtggccccgggccgggaggcgatggccccgggccaggaggcgtggccacggccgctcgccggcgtccgtccccaggaacggccagcactggggcagcggaggaggcagcggtggtggtggcaccgggtagaaggcggtggcactgggtagaaggcaccgccgccgcccgccgcgggaggcttccgcggagactcagggctgcagagccagcggaggctgaaggaagagaaaggtaattttcctactcgcatatattaatttcagtaaacagataaaacaattagtaaatcaaacatataaaacagaatttttaaagaaaataatctcccaaaatatataaaagtagaatagttaaaaaaacagaacc

SEQ ID NO: 34217 - DNA, 423 bp, Homo sapiens; identical to SEQ ID NO: 30992
  chr18:12433995-12434418
  hypo

SEQ ID NO: 34218 - DNA, 56 bp, Homo sapiens; identical to SEQ ID NO: 30993
  chr18:13499663-13499719
  hypo

SEQ ID NO: 34219 - DNA, 419 bp, Homo sapiens
  chr18:13826252-13826671
  hypo
cgccggcatctgggctttctgcacgggctgcggcattgtcttcatcctgtactcagaatccacctacgtcatcctgtgcctcatctccatgttcttcgctatgctgttcctcctggtgtctctgtacatacacatgttcctcctggcgcggactcacgtcaagcggatcgcggctctgcccggggccagctctgcgcggcagaggaccagcatgcagggcgcggtcaccgtcaccatgctgctgggcgtgtttaccgtgtgctgggccccgttcttccttcatctcactttaatgctttcttgccctcagaacctctactgctctcgcttcatgtctcacttcaatatgtacctcatactcatcatgtgtaattccgtgatggaccctctcatatatgccttccgcagccaagagatgc

SEQ ID NO: 34220 - DNA, 120 bp, Homo sapiens; identical to SEQ ID NO: 30996
  chr18:3051295-3051415
  hypo

SEQ ID NO: 34221 - DNA, 219 bp, Homo sapiens
  chr18:34823778-34823997
  hyper
cggaaagtctctggagcaagcgtggaaggcgagtgaagcggaaggtgagtgaagcgcgcgcagctcccagagggaagcgagaggcgaggatgacggcggcggcggcggcggcgacccgggcgacgcgaccgttcccgaccgacggcgtggcctccaccggcgtcggcagccaggcgcccgcaggtgtggggcgagttcggcctggcccttggggacaac

SEQ ID NO: 34222 - DNA, 105 bp, Homo sapiens; identical to SEQ ID NO: 30998
  chr18:44260345-44260450
  hypo

SEQ ID NO: 34223 - DNA, 985 bp, Homo sapiens
  chr18:44773396-44774381
  binary
cgggagacagaaggcctcggtggtgcgggtgctgggccagagggggcggcgggggcggcggcggcggcggcggcggggccgggtggtggcgctcggaacccggctcgtcgggctgcgggggcagcagcagaagcggcgacggcggctgcggggggtggtggtggtggtggtggtggtgagggtggtgatggtggtggggatgcgtctgggccgagtggggcgcgcccgccgacgccccgtgcagcttggccaggctctccgcgtcgtccttgccgcccactggccggaaggcgctggaatggtggtagctgccaccgcccgctttgcgcccctccagaaggtgcggatggtggggcgccggaacccgggagcccgcggggccagacccggcggccgcggcccctgccccggcagctgccacagagtccgcgggcggcgtggagcccgcgctgcagtccccgccgctgccgcccgggggcgactcgaagagcgcgtcgcgagagccggcgcccccggcaggaggaggtgggccggagcccgggccgttggccactacctgcgggggctgccccggcgggggcgcggcctcggcgctcccagcagcaccgcctggctcagccaggtccaggaaggcctggcgcagcagggccgggctttcgcctagcgcgcagcctagcgccgagggcggctgaggcgggggctgcaggtaggtgggcaccgggagcccgccaggggtccgcggcggccagaacatgcagaagggcggatagaaggcgtccttgcggcccgcgggccagaagaggccggacaagccggccttgggcgccgcgcccgcgccgcctgcgcccgcgccccccagggcctcagcggcggcacccgcatcctctttcttatggcacaagctgaaggcggcggccgcggcagggaaggtgtaggggtgcgggaagagcccgccgcagcccgggaacttctgcaggacgccccc

SEQ ID NO: 34224 - DNA, 249 bp, Homo sapiens; identical to SEQ ID NO: 30999
  chr18:54694241-54694490
  hypo

SEQ ID NO: 34225 - DNA, 172 bp, Homo sapiens; identical to SEQ ID NO: 31000
  chr18:56008826-56008998
  hypo

SEQ ID NO: 34226 - DNA, 486 bp, Homo sapiens; identical to SEQ ID NO: 29913
  chr18:59483218-59483704
  hypo

SEQ ID NO: 34227 - DNA, 979 bp, Homo sapiens
  chr18:63417693-63418672
  binary
cggagagatggatgggctgcagcccctcctactttcacccctcttctttattttcctgcgaaggaatccatctgtacagatccgccaggcgggaggtggaggagggtgcgcgagggtgcgcgcgtgtgtgtgtgcgcgcgtggcggccgagcggctccgtcttcgcgttcttttccagtagcccccaccgggtctctgggaggcgccgaagtctcagtggctccctgggccggcctccgacagcgctgacagcaggcgcccgccgcccaccatcgtcgccctcttcccctccctcttcggccccggctccggcgcgctctctcctcctctcctgcgcgccctctcgccctctctctggccgcgcgctcccgctggctccggaccctgcgtctcagctgcccgggcgagccggaggggcccctcgcagtgagcagacgcagcgggcccccggcgcccgaggccggggcagggtccccgcgcaccgcggagtgggctgtgattggaggaggagcccgtgccgggcgggcccgagcgggtgtcgagccggttcctccagtctgccccgcgcgcggagctgcgcgcactgggtccccaagagcccgcgggcgtccggcagccgagcgcacgttctttcggatgcacacgcccgggtccctggcgtctgacgccgtggggagggcagcgaggccccaggtgagtgtgtctgcctgcgcggggctggggaggcgccgctgggcagatgtgcgcccttgctgtgcgcctttggaagcaggactaatcagtgagcggagagcgggcggggatgtccgtgtggagtttcccttggcgtccccaagttactgcgtgttgcagtgagatgtggctctgcaaggcaggacaggcttgtggacggaggcgggggcgtttggcccggaaagccggtgttgacagacaccaggtgcgacacgaggagtagtagttgagggtaagagcaaatccc

SEQ ID NO: 34228 - DNA, 153 bp, Homo sapiens; identical to SEQ ID NO: 29916
  chr18:74069268-74069421
  hypo

SEQ ID NO: 34229 - DNA, 684 bp, Homo sapiens; identical to SEQ ID NO: 29918
  chr18:74083302-74083986
  hypo

SEQ ID NO: 34230 - DNA, 935 bp, Homo sapiens; identical to SEQ ID NO: 31006
  chr18:74091392-74092327
  hypo

SEQ ID NO: 34231 - DNA, 510 bp, Homo sapiens; identical to SEQ ID NO: 33213
  chr18:74171117-74171627
  hypo

SEQ ID NO: 34232 - DNA, 226 bp, Homo sapiens
  chr18:74195379-74195605
  hypo
cgcctccctgcccactcctgtgggaagctccctctcggcatctgtccgtcatcagcatctgtccgtcatcggcatctgtctgtcacgggtcatctgccgcaccacactgagaacccatgagtgccaaatgtcccccgtcagctggcccacccgcatttcatcttcctggcttaagaaggtgagtctcagggcccagccgtctatcagaactgacctggtcttctcc

SEQ ID NO: 34233 - DNA, 608 bp, Homo sapiens; identical to SEQ ID NO: 33218
  chr18:74325503-74326111
  hypo

SEQ ID NO: 34234 - DNA, 430 bp, Homo sapiens; identical to SEQ ID NO: 31012
  chr18:74696524-74696954
  hypo

SEQ ID NO: 34235 - DNA, 353 bp, Homo sapiens
  chr18:76129277-76129630
  hypo
cgcagtaacacacggcacagaccgcgtgcctttcctccatctgcttaccgagtcggcgcggccacttaccacccatggcagcacattgcaaggtttgtccgtataaaagaaagtgccggcagatcgtgacgtggaggcctcggacctgtacactctcccgtgactctgccacaggccaggctttgctgcgatcactaaaacctggttcgaaatgagccactttagccctccgcatggtggcctcctaggcatccaggcagagggaccctccccgacagcgctctgggggcagcccaggaaggctcagtgctgcggtaattcggggcctccaggtccaccttacgctcatccac

SEQ ID NO: 34236 - DNA, 524 bp, Homo sapiens
  chr18:76435960-76436484
  hypo
cgttcactcaggaagccgaagcccagaagagtgaggtctcaaagttcacagcacgtggcctagaattcaggggtgcagagctcctgcttggtaactcatcccctgtgcggtgatgcttctgatcccacagcaatgcctgcttctgcgaggctggtccagggctggaacggagccctgtgccgtgatgcttccgatcccacagcaatgccacgctcctccagagctggagcagattccgatcccacagcaatgccacgctcctccagggctggagcagattctgatcccacagcaaggccgcgcttctccaaggctggagcagattctgatcccaccgcaatgccgcgcttctccaagactggagcacattctgatcccaccgcaatgccgcatttctccaaggctggagcagattccgatcccaccgcaatgccgcatttctccagggctggagcagattccaatcccacagcaaggccgcgcttctctaagactggagcagattctgatcccaccgcaatgcc

SEQ ID NO: 34237 - DNA, 178 bp, Homo sapiens; identical to SEQ ID NO: 31016
  chr18:76552775-76552953
  hypo

SEQ ID NO: 34238 - DNA, 232 bp, Homo sapiens; identical to SEQ ID NO: 31017
  chr18:77083049-77083281
  hypo

SEQ ID NO: 34239 - DNA, 576 bp, Homo sapiens
  chr18:77270851-77271427
  hypo
cggggcatcctctgccggggcatcttccgccggggcatcctccgccgggacatcctccaccgggggctcctccgccggggcatcctgctccggggcatcgttcgccggtcttgtcgctgcggtggaagtgtcgtgttcccagccaggctgggagtggtcgctggcgaggcctggcgtgggcccgcggtgtctgtcagggtgccctgggccagccccgctgattcgatttagagctaacgagagtccaccaacggcaattacaggaacctaatggccttcctgccgcaccgctccgtggcacccggctcgctgtgatgaattgctcattatgtgcagtgttggaatagcctccacaagattaataattggataatcaatacagaaattcaatcttggggtgtttttttcactccggggtcaatatgtcctgaagattacaaggcccgactctgcctcccccctccccgctgcttccgcgttgggagtttggccagcacctcgccacacgatgggtcatggtgcgttgtctccgtacctccgtgacttttctattctttgcaaacagcaggttctgcc

SEQ ID NO: 34240 - DNA, 51 bp, Homo sapiens; identical to SEQ ID NO: 31020
  chr18:77456042-77456093
  hypo

SEQ ID NO: 34241 - DNA, 31 bp, Homo sapiens; identical to SEQ ID NO: 31021
  chr18:77482822-77482853
  hypo

SEQ ID NO: 34242 - DNA, 765 bp, Homo sapiens
  chr18:77509030-77509795
  hypo
cgtttctgaaggtgtgtcctgctgtcaacagcactctgggtgtttttgtcggccttgtgaggggaacatatttctaaacctcaaacagagagtcacagctggcatttcccattctttgccatcctcttgctgccattagaactctgccacggatggcttcctcgcttgattttagaaagaaaagaattgttggaactggttcttgcacctctcgccctccccctcctctccctgcttgccccagggtcccgcctggctctcgtctgccccgtcttcactttcggtcggggcccctgcccctgcccctgctctgctcagtgcccctgatacgtccaacccagcgtcgctgtgagggagtcaaccacacctgccagcacccccgagtctggccccactaggaggggccagggctcccttgagcaaggcatcagcacacaggcagggagccgggcaccagactgtgagggtcgcgccccgtgcacacgagatccaggcccgccccctcctggacttggtgaccgtcccgagctcgacctgagagggcacttcggctctcctgttcacagtcatgactgccccctccccgaggtcagcgccatgcactgctctgggggcctgaaacaccgcctctgttcgcaagggtctcctgtcccgtccacctgccagtgggttgagctcttccaggggttcgggacacccctcacggcagcaccttcacgtttacgagaactgtctctgtcttgttttgtttcaagttctcaaaac

SEQ ID NO: 34243 - DNA, 441 bp, Homo sapiens
  chr18:77549975-77550416
  hypo
cgtccgtgcccctccttgtcccggggagcacggctccatggcgcccgctgtggagctgcggttctcaccatgggcaggtgcgaggccgtagactggtgtggtcagaccaggggactcctgcgttcaccctgggccccggagactagtgatcccgctccccagcagagcaccgccaaaagccccgggtgccggagctgtcctgcaagaatgaacgggcaggagacacaagagcgtggcggggccttccgaggatgcggtgcaagggcgctgttagcacccacgcgaggcggcagcgcatggaggaagcctcccatcgtaagcgcgtttctgcctgaaatgcacgtgtccttataggcagcggtcttgccactcatggacggagaggcagcatatgtttaaaagatgagcacacaaaggactgtgcacctgccgcggagtggc

SEQ ID NO: 34244 - DNA, 576 bp, Homo sapiens; identical to SEQ ID NO: 31024
  chr18:77608097-77608673
  hypo

SEQ ID NO: 34245 - DNA, 235 bp, Homo sapiens; identical to SEQ ID NO: 31025
  chr18:77642685-77642920
  hypo

SEQ ID NO: 34246 - DNA, 400 bp, Homo sapiens
  chr18:77644520-77644920
  hypo
cgatgcagtggaggagcagggctgggtctgggcctgggcctgggcgtggcagctccccaggcccacggggcaggaattctagattctgggattcctttcatcgttgctttttgtgttttctacctagagcggagaaatgtttgtggtttccaaagagaccggacacgcccaaggcccacagacacgtggcttcgtgatggggagccacgggggcaggggtccgcccggctctgtgttcctcgggggggctcatcctggggcccaggaactcgggagcggtttacccacaggttcctgtgcgtgggagcaaacttgcttttcccattcacagaaacacagtagcgtgcgcgggtcggtgatgcagccaagacaccatccctgaaactgtgataatgagagc

SEQ ID NO: 34247 - DNA, 675 bp, Homo sapiens
  chr18:77808879-77809554
  hypo
cgtcggctcagtgcctcctagaaagtggagtgtgggcacgtttgcaggggatccaaccaggcgtctgctcagtgcctcctagaaagtggagtgtgggcacgtttgtaggggatcccaccaggcatcagctcagtgcctcctagaaagaggagtgtgggcacgtttcagagaaaactggcttaggcctccctgtttctggcgtggccttccctgggagcgagttagggacacggaagctcacccgcttctgaatgggtccactcctggggatttccgcggccttccctgggagcgggttagggacacggaagctcacccccttctgaatgggtccactcctggggatttccgcggccttccctgggagcgggttagggacatggaagctcaccctcttctgaatgggtccactcctggggatttccacggcctttcctgggagcaggttagggacatggaagctcacgcccttctgaatgggtccactcccggggatttccatggccttccctggatgatccactcctggggattttccgcagctctccagatgacgtgcacgcacactaaacacccagaagttagggaggcactgatccagtgaagtcctcagatcaaccttgtgagctttttacaagtacctgtcactgttaaactgctgatgaaatgtgaaac

SEQ ID NO: 34248 - DNA, 912 bp, Homo sapiens; identical to SEQ ID NO: 31030
  chr18:77943609-77944521
  hypo

SEQ ID NO: 34249 - DNA, 836 bp, Homo sapiens
  chr19:1004884-1005720
  hypo
cgctggccaacggctcagcgccccgtgccctgcgcaagtgctgctacggctactgcattgacctgctggagcggctggcggaggacacgcccttcgacttcgagctgtacctcgtgggtgacggcaagtacggcgccctgcgggacggccgctggaccggcctggtcggggacctgctggccggccgggcccacatggcggtcaccagcttcagtatcaactccgcccgctcacaggtggtggacttcaccagccccttcttctccaccagcctgggcatcatggtgcgggcacgggacacggcctcacccatcggtgcctttatgtggcccctgcactggtccacgtggctgggcgtctttgcggccctgcacctcaccgcgctcttcctcaccgtgtacgagtggcgtagcccctacggcctcacgccacgtggccgcaaccgcagcaccgtcttctcctactcctcagccctcaacctgtgctacgccatcctcttcagacgcaccgtgtccagcaagacgcccaagtgccccacgggccgcctgctcatgaacctctgggccatcttctgcctgctggtgctgtccagctacacggccaacctggctgccgtcatggtcggggacaagaccttcgaggagctgtcggggatccacgaccccaaggtgggcggcctcggggggctgcgggtggccttggggggctagcggtggccccgggctgggctgtgtggggcaggggtggtcagctggacgtggaggacgtccactaggccaactctggtcccaagagacatttattcaattaatttatttatttaaagaaaaatagcc

SEQ ID NO: 34250 - DNA, 413 bp, Homo sapiens
  chr19:10370250-10370663
  hypo
cggcctgaccggccccccgccccgcccccaccccgcccccaggcctaaatgtgcacagcatgctcaagcaccagacgctggtcctgacgctgcccaccgtcgccttcctggaggacaagctgctctggcaggactcacgttacagacccctctaccccttcagcctgccctacagcgacttcccccgacccctaccccacgctacccagggcccagcggccaccccgtaccactgttgatgtgaagcacctcttctgagccaggccgagcccctggccgacttgggagcctcaggcccacgcccacccttcgaggaaggtgtcacctggaccccttcattccacggaggaagctgaggccacagggagcggccatcgccattgggaaggggcgactccacggaaagcccagac

SEQ ID NO: 34251 - DNA, 1317 bp, Homo sapiens
  chr19:10402144-10403461
  hyper
cggactcttcccccttgcagagcgaccagatcgcgtagagctgatgccgctgcctccctggcagccggtgggcgagaacttcaccctgagctgtagggtccccggcgccgggccccgtgcgagcctcacgctgaccctgctgcggggcgcccaggagctgatccgccgcagcttcgccggtgaaccaccccgagcgcggggcgcggtgctcacagccacggtactggctcggagggaggaccatggagccaatttctcgtgtcgcgccgagctggacctgcggccgcacggactgggactgtttgaaaacagctcggcccccagagagctccgaaccttctgtgagtgggtgtggggaggagatggggacccagtggggtcggtcggtgtttaggaggtttagaggtagatacatctgaatgctgaccccgacttcaaccctcgccggctgagctgtttccccctccgtgccttgaggatgataatacgataagatagtgcatgtcaagtgcttaggacatattgagcgctcggagttagttcaaacttggttcttcgacccctagccctgtctccggatgccccgcgcctcgctgctccccggctcttggaagttggctcggaaaggcccgtgagctgcactctggacggactgtttccagcctcagaggccagggtctacctcgcactgggggaccagaatctgagtcctgatgtcaccctcgaaggggacgcattcgtggccactgccacagccacagctagcgcagagcaggagggtgccaggcagctggtctgcaacgtcaccctggggggcgaaaaccgggagacccgggagaacgtgaccatctacagtaaggaaggaggcggggtctccgcggctccgaggtgggaccagaggaatgcgaaggcggggcgaagagtgggcgggacctcagtaccggaacaggcgtggcccgaggggcggggcaggtgggggcggagacgtaatcgctggggaggaggagcctgtacagcctgagaggcggggcgccgtaccctagttcgttctcagcaccccgaggattcgggcagataaggggcgggccttgaccggagggaggggtatggtcagtatactacgaccaaatgctccgcccccaggcttcccggcaccactcctgaccctgagcgaacccagcgtctccgaggggcagatggtgacagtaacctgcgcagctggggcccaagctctggtcacactggagggagttccagccgcggtcccggggcagcccgcccagcttcagctaaatgccaccgagaacgacgacagac

SEQ ID NO: 34252 - DNA, 457 bp, Homo sapiens
  chr19:10405940-10406397
  hyper
cgatcgttgtgggccggagcagggcatttgatcagtggctgggccggcgctaagccccacttcaccttctgtgcccttcagaccggccagtggtggccgaacttgctgcctcgccccctggaggcgtgcgcccaggaggaaacttcacgttgacctgccgcgcggaggcctggcctccagcccagatcagctggcgcgcgcccccgggggccctcaacatcggcctgtcgagcaacaacagcacactgagcgtggcaggcgccatgggaagccacggcggcgagtacgagtgcgcagccaccaacgcgcacgggcgccacgcgcggcgcatcacggtgcgcgtggccggtaagtggcagctggggagaggcggggcgaggtatctgagagggggcgtgacctgggtcttggggcggccggccccgcctgcctccctctcggtcccggtagactagac

SEQ ID NO: 34253 - DNA, 263 bp, Homo sapiens
  chr19:10406914-10407177
  hyper
cggggcatgaggactgacttcgtgcctgtgggagtgcggggggcggtgggagaagccccccggagcttggccaccctccgcgagggtctccaccccgcaggtccgtggctatgggtcgccgtgggcggcgcggcggggggcgcggcgctgctggccgcgggggccggcctggccttctacgtgcagtccaccgcctgcaagaagggcgagtacaacgtgcaggaggccgagagctcaggcgaggccgtgtgtctgaacggagc

SEQ ID NO: 34254 - DNA, 508 bp, Homo sapiens; identical to SEQ ID NO: 31037
  chr19:11144009-11144517
  binary

SEQ ID NO: 34255 - DNA, 177 bp, Homo sapiens; identical to SEQ ID NO: 31038
  chr19:11199850-11200027
  binary

SEQ ID NO: 34256 - DNA, 55 bp, Homo sapiens; identical to SEQ ID NO: 31039
  chr19:12749512-12749567
  hypo

SEQ ID NO: 34257 - DNA, 803 bp, Homo sapiens
  chr19:12951477-12952280
  hyper
cggggccatgcttgtgtgggtgtggtcagtcgcagagggacggtcattggggggcggagactcaggtgggcggagactcaggtgggacggacagaaaggaggagtcgtacctgaggggcggggccatcccagatgaagccagaatcgtcttggaaggggccaggctgactcggcaacgaaaaaatttagagaggcggggccacaggcgaaggggcgtggtctccccataataggcgggactagactaaagacaggacatgctgctgtttgcacgccgctttagggaacgagagacctgacaggatttgccccctctttctctcataggcagcagtcccctggacagcccccgaaacttctcccccaacacccccgcccacttctcgtttgcctcctcccgaaggtgagtccctcccctccagggccccagaaccctgggcagaccctccccaaccactgtctgggccgccatctgttctcctcctaattgcacccgagctggggcctgaggggaccagcgagtgccccaaggtctcagcgggaaggagcgcctagccttcggggcggggcctataagaaggcggggtccaatcgccgatctggaacggggaaggcggtggggctccctttgcggcaggtcgaaagcgcgtgcgccctgggcgcggggtcttagtctctccgagccttgctctcctggccaggtgtttccatagcaacaggacggggcagccaagatgacgtgcgcaagcgcagattgcgcgatgcctatcgagggactcttggtccccgaggtgggggaggac

SEQ ID NO: 34258 - DNA, 115 bp, Homo sapiens
  chr19:1357664-1357779
  hypo
cgacgccccagtcagtcctgcgtgattgtggcgagggcgcgtctggcaccgggaaggtgtagatcatctagaatgacggcgattccgacgccccggtcagtcctgcgtgattggc

SEQ ID NO: 34259 - DNA, 871 bp, Homo sapiens
  chr19:14181154-14182025
  hypo
cgcgtccgccgattcctcctccttggtcgccgcgtccttggctggcgtcagaaaaatggctacaaacttcctagcacatgagaagatctggtttgacaagttcaaatatgacgacgcagaaaggagattctatcagcagatgaacaggcctgtggcaggtgcctcccgccaggagaacggcgccagcgtgatcctccatgacattgtgagagccagagagaacatccagaaatccctggctggaagctcaggccccggggcctccagtggccccagcggagaccacagcgagctcgttgtccggatcgccagtctggaagtggagaaccagagcctgcgtggcgtggtacaggagctgcagcaggccatctccaagctggaggcccagctgaacgtgctggagaagagctcgcctggccaccgggccacggccccgcagacccagcacgtgtctcctatgcgccaagtggagtccccggccaagaagccagcctcaccagcagaggatgacgaggatgatgacatcgacctgtttggcagcgacaatgaggaggaggacaaggaggcggcacagctgcgggaggagcggctacggcagtacgcggagaaggccaagaagcctgcattagtggccaagtcctccatcctgctggatgtcaagccttgggacgatgagacggacatggcccagctggaggcctgtgtgcgctctatcgagctggacgggctggtctgggggacctccaagctgatgcccgtgggctacggtatccggaagctacagattcagtgtgtggtggaggacgacaaggtggggacttacttgctggaggaggagatcactaaatttgaggagcacgtgcagagtgtc

SEQ ID NO: 34260 - DNA, 743 bp, Homo sapiens
  chr19:14584140-14584883
  hyper
cgagagggagcgggaaggagcgtggctcgaggggccggtgcgcccctcaccagcattgggctccagcagatgcacgacaccaccatgataccgacaagctggcccaccatctccacgtcgtgggcgcgagctctgcgtgccgagccgctgctccgagagccgccaaagaaggtggaggccgaagcgatggacgaggcggacgaggcggaggccgagcggggtccgtgcgccccccagcgacgccggctgtcggggcctgaggccgggggaggccgtcgggagcggcgtcgccagcgggcgcgtagcagggccaggccgctgagcgtgttgcacaccagcgcggcgaggagcgcgaccaggccgaggctggcgaagaggccagcaagcagtgcctggcgccagccgcccgggggacccaggccgatgaagcaccacgtgcccgggtactgcagctcatagcggcccacgcgcgccagcggcagcagcgccacggccaaggccaccgcggccaccgcggccagcgccaggcgcgcgcgggcgaccgagacccgcgcggcgtggagcagcggccgcgtgacgcccacgcagcgctccacggccatgccacagcccagcagcagcgggcacaggccgaagaagaccatgcagccgcccaggaagtggcaggccccgccggccggagcgcgccccgcagtgtacagacgcagcaccagcgcgcccgggatcacgtggcccgccaggtc

SEQ ID NO: 34261 - DNA, 881 bp, Homo sapiens
  chr19:1482000-1482881
  hypo
cgtggaggatgggggacaggaggtgcagtccctcggggagccgccgcggcaggtgtagcaggaggcatggcagctggagcagaccctcagcgcgggcgccgccgtgtgcccaggcccagcggtcaccagccttgtgtggttgaagaaccgcggggggcagtaggccaggcagagctgtcccaggatgtaggcggggccgtcacacgctgctcggggacacgcacgcaaaggcccgtcagcttgccacccgcagcctgttactcgccacccgcccgcctggggccacatgcacgctgcccacggtggccgccaccgcctcccagcagtgggccctgccccgccggcactcaccctggcacagcccctctgtgtcccgctgcacacacgcgctgctggtcacctgggggcctgtaggccgcgctgtcatgtcctcggccgtcccatagagcagcagcgtgtagcggtacaacgtccctggacaggggtcgcgggtgggcacaggaggaaaaggaggctctcggcagcctggtcctggtagtccccgggctccctccccttcagctcccacgcggggccctggactggttcacatctctcagggaattgcacacctactgtgcgcctgtcactggacaccgacatctcccgggtgactgcacacctactgtgcgcctgtcactgggcacctacatctcccgtgttaccgcacacctactgtgtgcctgtcattgcacaccatctcccgggtgactgcacgcctactgtgtgcatgttctcttggagaaggccactgggaaccccttttgcagtgcggtcaccaaggctagctccagagcccctggggggaggttggagagccaagccccgcccaccacagcccc

SEQ ID NO: 34262 - DNA, 550 bp, Homo sapiens
  chr19:1496346-1496896
  hypo
cgcgtcgtgcgtccgctgttcctaaggcaccacggggccgtagacagaatcatgaacgacctcagcgggcgagccctggacgcggcggccggaataaccaggaacggtgggtgctcgcaggcgcctggctgcctcaggccatctcccgggtctggacctgtctctctccaccttgcctccctttctgactttggccgccccctctcactgtccgcctctctctctcacgcttccgggaaccagtcttgcaggtcctggcccgtagccgggcaggcatcaccccggtggctgtggccgggccctccactcccctggaagctgaccgtacgtaaccgctgtggggagataggagctgtgtgtgtgtgtgtgtgcgcgcgcgcgcgcgtgtgtttgagcgtatgtttgctgtgtgcacatgtattattgtgtgtgcatgttttgtcatgtgcaagagggtgcgtgtgcatgggctcaagtgtatgtttggtgtgtgagtgagcaagggagtgagcatgttttctcacgtgtgcatatgtgtgtgtgtgcccac

SEQ ID NO: 34263 - DNA, 366 bp, Homo sapiens; identical to SEQ ID NO: 29953
  chr19:15302345-15302711
  hypo

SEQ ID NO: 34264 - DNA, 941 bp, Homo sapiens
  chr19:1577427-1578368
  hypo
cgaggcaggggggccggctggcagtggagcattctggcagcgccgggcgaccaagtcccgactggcagcggctggagtttggttttcagaagcgaaggctggcgttggcacacagggaaggctgcccgatgacgtgcctcgactgtgttacatttactgaaggagagcggcctcctgggcatgccactcaggcacggtgaggctctgtggcaccaccagccgcatggcagggcagagagtggcgccgtcctgcatgccccccacagcagaccagagtcccgtcctcacgctgcacagtgggtgatgtgagtttcaaaactacgcctccagaccgagaaaccctcccagctgtcagcaagccgtggcgccgagctgccgggcacctgctggctgctctccagtctcaaggagctgggacagcgggcatggggaggagctggcctcgagcccaaaggtcgtagggagccaggcagggcccaggagcacccggcacttcccgaagccggactctgtagaggacgagcgtggagggtctttcgggtgggggcagccccagctgtgtgccccgaggccccgggaagtggggacgggccgaggagggagccaggagcacggccttcctcctgggtgtctccaaggctgggcttcgccgccgagcctggttcacgtggggccgaggaccgcgtctgcaggcggctccagcaggcagcacgggctctcggcagggcctctggaaaggacagggagggctggctttagcgactccacgggacggggacgcttgggctcttctagggagatgggaagctcttgggaggcacccgtcatcccaagcacatctgtgttcaccaggcagtccccactgccaggacccgactccagggagcccccgtggccccgcagcacctgccctagacgtgctccatctccgggtccgggtc

SEQ ID NO: 34265 - DNA, 369 bp, Homo sapiens
  chr19:17264714-17265083
  hypo
cgcagagtagctattacttggcctccaaaaacaactattttcctcccaattttgacctgtaggaactaccatgtgttttattatttgttacttggggtcagcgaggaagagcgccaagaatttcagctcaagcagcctgaagattatttctacctcaaccaggtaaacagcctcaagcccgagccacaaacgccacctctgttcccggcctcaagctgtttatgtatagccgggaagtcagaggcagcctgccctggcccccgaacccgctcccagaaggcagcattaaaagaacccattcattcccctggtcctggggccctgccccaccagctccagccaaaatcactctggcacgccacccttgcc

SEQ ID NO: 34266 - DNA, 793 bp, Homo sapiens
  chr19:18054252-18055045
  hypo
cggggccgggcttttcggggcaaggctgcgcccaaggccccctgacgctcatgtccacccccagcgtggcggaggaggcggccgaccggcacccagaaagacgcatgcgggcagccttcacagcctttgaggaagcccagctgccgcggctcaaacaagagaaccccaacatgcggctgtcgcagctgaaacagctgctcaagaaggagtggctccgctctcctgacaaccccatgaaccagcgggccgtgcccttcaatgcccccaagtgagcccagaacttggggagccagttcacccacgggtggtccaggtcacgactctgcacgcccttaggccaggtcagctgcgagggtcacagagcgttccgggggccaaggcgccgggccccggggccatgctcttatcaccagccacccgtcctcccgccagagggtccctgccccgagtgacaccccatcccctcccatcccccggcgcgtgtgtgtagagcctcagggctgagtgcccaataaaggtggcggcaaggctgcggtgaggcacttgaagcctaagtgagtgggtggggagaggcgggcgaagaatggggagaaggaacagctttggggacctgctgtgaaccgcactgggatcatagctagaaaagacaagagcccccaacagcgcgctccttcctgctgccagctgtgcttcatcggctcctgccagcacccctccttggctgtgccacttgtccagtgaggcacctgctccactgtctcctgcacacgcttagagaggtggaggtggaggc

SEQ ID NO: 34267 - DNA, 500 bp, Homo sapiens
  chr19:18117804-18118304
  binary
cgatccccatcacgggctgagggtgaccgtgtttgtttatgaccgccccctccacccacacacctcactgaggtggtggaagtctcctgagccaggctcagaggcggacagtcacggcaggggatgggttcagcggcagcgcattacgctgccacgagagggcgccagcgtcccgcagacgacgcagaggcaactcccgctggagaaactccatgcgacttttctttggggaaactgaagcccagagagaggtcacgccgtcccgtggccacaccgcagctgtggacctgggggtgcccgagcgtcccctgcattcagctctgtggcgggacgggggctgaggatgactggagcaggcacaagggctgcggggaaggtagggtttgccagaggctgaaaattgggaagggaacatcatttcgtaggtaccgctcctgggcgaatgcgccgaggcgcgaccgagtgacggtatgtcaagagcaggttgatgacccgggagc

SEQ ID NO: 34268 - DNA, 101 bp, Homo sapiens; identical to SEQ ID NO: 31051
  chr19:18255890-18255991
  hypo

SEQ ID NO: 34269 - DNA, 612 bp, Homo sapiens; identical to SEQ ID NO: 31052
  chr19:18368482-18369094
  hypo

SEQ ID NO: 34270 - DNA, 366 bp, Homo sapiens
  chr19:18879355-18879721
  hypo
cgggctcccagcagccaccgccgcagccccagcccccgccgcctcctccacccgcgtcccagcagccaccacccccgccacccccacaggcgcccgtccgcctgccccctggtggccccctgttgcccagcgccagcctgactcgtgggccacagccgcccccgcttgcagtcacggtaccgtcctctctcccccagtcccccccagagaaccctggccagccatcgatggggatcgacatcgcctcggtaagcccagggtggggtccctcggggcctgactgggggtcttgtagaggacagcccgggggctgcagaacagtcgggttacctgctgcatgggccaggggtcagaaccccagcgaac

SEQ ID NO: 34271 - DNA, 349 bp, Homo sapiens
  chr19:18988706-18989055
  hypo
cgagccaaaagtcttgagtcgtctttgattcttttatttctgtttcatctacacccaaggcgaatctgatgggttctcccttccaaacagggtggggggtctgacgctcctctgcctggctacagccccggatgtgttaaatgtctgcatctcgcacctcccgttccaaaaaacgtcacggagctctgagccactgcttccctgaaaccatcgttcccacgtcaccgatggcccccaccggccaaatcagagggcctggctggtcggcaccttccagggccttccacaacctcctgccccggctcctgctcaaacactcctcacgttgcctatgagacactgcacaccc

SEQ ID NO: 34272 - DNA, 531 bp, Homo sapiens
  chr19:19391401-19391932
  hypo
cgagtgacagggcaggaatttgcagagccagagacaagagagctgagacggcatgtgggcagcatgcatgggcgcacgcacaaacgggctctcagaaggcagctccgttgctaacagacaccaggtgtaagcgcgcacagattcagagtctggcgtaagactcagctgtgcgactcccttagctccttcaggggaggcagccaaccatcctcagagcagctgacatttaatttggcatcagctgtggaacttggcaggctccagtaacactgacacatagaaagatgctgcaacagccccatccgggtggcagaaaccaccacccctcgggcggtgcggtgcttcccgggggagaaggtgagcaaaggggtgcagcgggccctctgggaagggaaaagatttgggtccttccagctcatcaacactcgggctttgccgctaagaatggcccacatttgcactcttagtccttccttggtttacagggcactgagggatgtgggggagccctgttggggagacgcaggagcc

SEQ ID NO: 34273 - DNA, 180 bp, Homo sapiens
  chr19:19447926-19448106
  hypo
cgccttgttttttttttttcttacattcccaaacgtgactatttcctttcagaattccgttgatgcagcaaagccgctgctgcggaaggcgatccagatctcacagcagaccccatattggcactgccgcctgctcttccagctcgctgtgagtaccgcggcccgggaacgagggtgccc

SEQ ID NO: 34274 - DNA, 106 bp, Homo sapiens; identical to SEQ ID NO: 31057
  chr19:19680307-19680413
  hypo

SEQ ID NO: 34275 - DNA, 434 bp, Homo sapiens
  chr19:19737446-19737880
  hypo
cgcacgtagaagaaaatgcgggtgtacacagccaccatgagcaggaagacaagcaggctcgacagagcccagacggccaaataggagcggctgagcaggggtgccatgcgtgagcagcggtccagggcacagaggcagtgccaggagtgggcaggcagcagccccaggcccagggcagccacccacacgcccacaatgagcatgaccacgcggccacggggcaggcggctgtgcagctgcacggccatcacactgcggtgccgctccacggcgatggccagcagtgtggccaccgacgcagtgaggcttgtgtccagcaagccctgccgcaggaaccagccctcaagtgaaagtcgggctgtgcggggaccagtgtggaacatgaggaagaggtaggccacgcccgcgaagaggtcagccgcggccagattgcc

SEQ ID NO: 34276 - DNA, 597 bp, Homo sapiens
  chr19:2302466-2303063
  hyper
cgggtgacgtcacctcctcggctctgcgccccgccgtccacaggcgcgaagccggagctggggttggcgaccgagaaccttcctgcctcccctccccagcaaggggcacgtcccaccaggcccggactgcccgtctgcccctgcagggcccctcgctctggtggcgggctcggtgagctctgctgcccggtctcgggagtctgggggagcgcggcgtcgacccctgtggagggaggactcgtgtttcaaggacagagcctcattaccatgcacgaccagccgcagctgaggccgcagaggcctttggcaggggggccgggccggcggcagggacggcgttggcggtggtggacgggagtgggggtctgtcctgaacaggtgggggtggtccctgtgctggcccccgccatgcgatcgcaccccaggactctcctcctcttcctaagccccagcatgtgcctggtgccgcgcgggtgctggaggcacagcggcttccacgcagacgcccgcagcaccacagcctgtgcacggcgcatccacgccctgttacaaatgttccattcaacgccttctagcacattcacagatcgtccgccc

SEQ ID NO: 34277 - DNA, 45 bp, Homo sapiens
  chr19:2337311-2337356
  hypo
cgaggccgtgcggggctttaggtgagggctgggatctaactcagc

SEQ ID NO: 34278 - DNA, 239 bp, Homo sapiens
  chr19:2339508-2339747
  hypo
cgcctgggtctggggaggccccatgtccagggctctttatgcagatccaagctgcggttgctgcccacacgccagcctctggcccggcctagtggccaccccagctcaacccagggacgcgggccctgccaccctctgctgtgtggtctcctctgccctggggacgttcggggcggttccttgcacttcagtcccccccgggtcccctcctgctcccgggttttctgccccgttccccc

SEQ ID NO: 34279 - DNA, 301 bp, Homo sapiens; identical to SEQ ID NO: 31063
  chr19:2413723-2414024
  hypo

SEQ ID NO: 34280 - DNA, 601 bp, Homo sapiens; identical to SEQ ID NO: 31064
  chr19:2461998-2462599
  hyper

SEQ ID NO: 34281 - DNA, 598 bp, Homo sapiens; identical to SEQ ID NO: 31065
  chr19:2579147-2579745
  hyper

SEQ ID NO: 34282 - DNA, 101 bp, Homo sapiens; identical to SEQ ID NO: 31066
  chr19:28296843-28296944
  hypo

SEQ ID NO: 34283 - DNA, 452 bp, Homo sapiens
  chr19:28341898-28342350
  hypo
cggcctgctggccgctcctctgtcaggtctccgggtcaactagatgtcggccacgaacgccagacttagcctccggctcgccatgtttgaggtcgaccagcaggccctctcaccggagtgagctgtaaggagggatgctcagtgaaccaatcaagacgtgggccacggaggtcagcagggctctgggcaattcatggtcctgacctggcaagcaccactctgggacctgagcgttgcaaacccatctacacccgtccaacctgtgttggccggcgctcctcgctcgctcaggcctccgggttgacaagagttcagccgtgagcgcctggtttagccgccagcttacagtgtcggaggtcaaacagcaagccctcccccggagtaagcagtgagaagggaagcccggcggaccgagtgcaacacgggctgcagcggggagctgggttcgggac

SEQ ID NO: 34284 - DNA, 259 bp, Homo sapiens; identical to SEQ ID NO: 31068
  chr19:30165123-30165382
  binary

SEQ ID NO: 34285 - DNA, 341 bp, Homo sapiens
  chr19:3114752-3115093
  hypo
cgtatcccgaccccagggtctccattggcccgagccctccgggctgcttcagacactgccgtaggtggcgcagtgcgcggtccaccccctcctggtggctttccgtcctcccgctggtttgggtgctgtgtccctgtcctgcccccccacccccggcagccggcctgagcacccaccgctgtgttgcagctacctgaccgacgttgaccgcatcgccaccttgggctacctgcccacccagcaggacgtgctgcgggtccgcgtgcccaccaccggcatcatcgagtaccctttcgacctggagaacatcatcttccggtaccgcccgggccacagcaggc

SEQ ID NO: 34286 - DNA, 1142 bp, Homo sapiens
  chr19:31767664-31768806
  hypo
cggtggacagtttggataagtcccgtagccggaagcctaagtgtgactctaggtgactgatgtacgtggaaggagtcctgatttgggacgcacaatcgttacaaaagaagacggggtggccagtgtccaagtttttgaggaactttgttccacctgtccttcgaagctggtatttcacgttggccagccagtggctgatggtggtcatggacagcccggtgaacctggagatatgcatccgctcctgggggctcaggtctgacatgatgtacttcccttctgaggtctgccggaggctggcggcaaactgggcctggaggatcaggaggtgctgggggttccagtttgactggcggcccttcctcttctgggcgggcgtcgactcctcagcctcctccagagtggccccgtcaatgtcagacttctcggagatgctggaaggagtggaggattttgacgtgtggctctctgtcaagttcttcagcatatcggatatatctgacaaggcattctcgcgtagcggcgagtttgacatgaatgatacgacggcagatgtctttgccgttgtcaccgtggatgaggaggttgccggggctgtggacgtgggtgacagaagcactgaacccaaggagcagcctttgtcactcttcccttttgtcaagtctatgggctggtcgttgttgacgtggtagaaatagcggtcgaggtggtctgccttcttggactgcaggggcggcggggtggccacagcagccttctccgccaggctgttgctcatcttgaaaagcatgctcatggggtccagggcaggcagggagggcttggcggccttgcccaggtgaatgttcatgactgactgcagggcgctcaaagggttaacaaaaggctgttcaggcgggtggtcggtgatgatggccgtgctgccactcaaactgctggctaggggcttcaccagctccttgccattctccaccggctcagcgagggggctcccatccttgcacccatcccgcggggggctggggctgttctcctggctgcggaagcccccatcgctggatgcctccatcttgatgggttccccgacttcgctgctacatggggagggagtggcccgcttgggcggggaaagcttcccatcc

SEQ ID NO: 34287 - DNA, 199 bp, Homo sapiens
  chr19:3219527-3219726
  hypo
cgccgcgccctgccactcccacgcgctttacttcctcagtaacatccatggcacgggcatcctgcagtgaccgatgcccaccagactgcatccgctaacaagacagggagaccggcctgtggtacccagatgtgcccaagctcacagcctcactattctccgtgctcacagcctcgctattctccaggctcacagcctc

SEQ ID NO: 34288 - DNA, 247 bp, Homo sapiens; identical to SEQ ID NO: 31074
  chr19:34177611-34177858
  hypo

SEQ ID NO: 34289 - DNA, 86 bp, Homo sapiens; identical to SEQ ID NO: 31075
  chr19:3494538-3494624
  hypo

SEQ ID NO: 34290 - DNA, 300 bp, Homo sapiens
  chr19:35581628-35581928
  hyper
cgctgtcccaaccacttaatttattttaacttgcttaaccctcaaagtcagtttgaggtcagtactcttttcggagagatgggtacggagtcctggagaggttaagcaccacgacagagccgagattttaagcactcggtcagggagttgggcaaatgtggcctgcagatcatgtttccttacccgcgctttttctcctccctgcatagccgccacgtgtcctaagcacagcagctaccagcaacgcttggacccgcgccgggtgcagctctgcgtccccgcggccgccctgcctgctcc

SEQ ID NO: 34291 - DNA, 403 bp, Homo sapiens; identical to SEQ ID NO: 31078
  chr19:35617152-35617555
  hypo

SEQ ID NO: 34292 - DNA, 234 bp, Homo sapiens; identical to SEQ ID NO: 31079
  chr19:35738737-35738971
  binary

SEQ ID NO: 34293 - DNA, 32 bp, Homo sapiens; identical to SEQ ID NO: 31080
  chr19:3691238-3691270
  hypo

SEQ ID NO: 34294 - DNA, 202 bp, Homo sapiens
  chr19:38905516-38905718
  hypo
cgctgcagggtggatgctgcccttggagggccaccagctcctgcagccgcaggtagaggttgttcagcttgggtaggtgcaggcggccgtcaggcaacctgtcgggctgtgcctcatgcagggacaccaggtccttgaggtgcacgcccagtacaggcagccggaaacccgcgcagccagcccaggtgcggcggtagcgggc

SEQ ID NO: 34295 - DNA, 575 bp, Homo sapiens
  chr19:38976252-38976827
  binary
cggagcgcctggacctgcagcgcttccactcgcacaccctgcgcctctaccgcgctgtgtgcgccctgggcaacaatcgcgtggcgcacgctctgtgcagccacgtagaccaagctcagctgctgcacgccctggaggacgcgcacctgccaggcccactgcgcgcaggctactatgacctcctcatcagcatccacctcgaaagtgcctgccgcagccgccgctccatgctctctgaatacatcgtgcccctcacgcctgagacccgcgccatcacgctcttccctcctggaaggagcacagaaaatggtcacccccggcatggcctgccgggagttggagtcaccacttcgctgaggcccccgcatcatttctcgcccccctgtttcgtggccgctctgccagctgctggggcagcagaggccccggcccgcctcagccctgccatcccgctggaggccctgcgggacaaggcactgaggatgctgggggaggcggtgcgcgacggtgggcagcacgctcgcgaccccgtcgggggctccgtggagttccagtttgtgcctgtgctcaagctc

SEQ ID NO: 34296 - DNA, 272 bp, Homo sapiens; identical to SEQ ID NO: 31083
  chr19:39663613-39663885
  hypo

SEQ ID NO: 34297 - DNA, 473 bp, Homo sapiens; identical to SEQ ID NO: 31084
  chr19:40362772-40363245
  hypo

SEQ ID NO: 34298 - DNA, 36 bp, Homo sapiens; identical to SEQ ID NO: 31085
  chr19:4064382-4064418
  hyper

SEQ ID NO: 34299 - DNA, 97 bp, Homo sapiens; identical to SEQ ID NO: 31086
  chr19:4064872-4064969
  binary

SEQ ID NO: 34300 - DNA, 166 bp, Homo sapiens; identical to SEQ ID NO: 31087
  chr19:42813649-42813815
  hypo

SEQ ID NO: 34301 - DNA, 867 bp, Homo sapiens
  chr19:44222791-44223658
  hypo
cgcacagcctttgagtcgggtgacctcccccaggccgcctctcacctccaggagctgctggcctccacggaaagcatccgcctggaggtgggcgtcacgggcgagtcgggcgcgggcaagtcctccctcatcaatgccctgcgtggcctggaggccgaggaccctggcgcggctctcacgggcgtcatggagaccacgatgcaaccgtcgccctatccacacccacagttccctgacgtgaccctctgggacctgccaggagccggctctccaggctgcccggctgacaagtacctaaagcaggtagacttcagccgctatgacttcttcctgctggtctccccccgccgctgcggggccgtcgagacccgcctggccgctgagatcctgtgccagggcaagaagttctactttgtgcgcaccaaggtggacgaggacctggcggccacgcgcacccagcggccgtcgggcttcagagaggccgctgtcctgcaggagatccgagaccactgtgccgagcggctgcgggaggccggcgtggctgaccctcgcatcttcctggtgtccaacctctcgccggcccgctacgactttcccacgctggtgtccacctgggagcacgacctgccctcccaccggcgccacgctggcctgctgtcgctccccgacatctcgctggaggccttgcagaagaagaaggccatgcttcaagagcaagtcctcaagaccgccctggtgttgggcgtcatccaggccctgccggtcccagggctggcggccgcctacgatgatgcgttgctcatccactcactgcgtggctaccaccgcagctttggtctggacgacgactcgctggccaagctggcc

SEQ ID NO: 34302 - DNA, 237 bp, Homo sapiens; identical to SEQ ID NO: 31090
  chr19:45567162-45567399
  hypo

SEQ ID NO: 34303 - DNA, 80 bp, Homo sapiens; identical to SEQ ID NO: 31091
  chr19:4697654-4697734
  hypo

SEQ ID NO: 34304 - DNA, 705 bp, Homo sapiens
  chr19:4816460-4817165
  hypo
cggtgggggggtgccagcctgccatgcgtgcaggggtggcggctgcgggcaccccggccaagtgggaaagggtggcggggctcccaggggcacctggcccccaaagggcattcgagccccatagggcgccccagtcccaaatgacatgtggctcccaaaagccacctggagctgctccatctgtgcctggtaggacaagtagctctggaggtaggctgagtaggctgcgttcagtgccgccgcctgcatccgctcaccgtccaggtgttggctctgttcccgcagggctcgggtgtcctgttccttcctccacatggcctttcgggcctgaagcctgtggggcttgaaggtgttggccaccttcctggcgaagatctgggagtgttcgtccagccgcaccagcccggagagcaggctggccgtgtcggagctgagctgggccggggagctctccaggggcaggaaggggatgacacagtctggcgacccctgtcgcgtgaggttgctcatcatggcttggttcacctggtgcaggctcaggcgacagtcgaagttggaggtgagaagtaggatgatgaaagctgagtggtctatggcgtcctgcaggcagctcagctccccgcgccccggcacctggaaatcctcgcagaaggtggccccgtcgggcacgccaagggcctccagcttctcccgaacccgcagggc

SEQ ID NO: 34305 - DNA, 499 bp, Homo sapiens
  chr19:49127280-49127779
  hyper
cgcgtgttagagtctctgtctttgcagctaaagacctcctccctcacgccccttttcttttgtgaattcaatggatgagacaggcccactctcccttaacaaagatggcgacaacggcgctgtctatggggccgcgacgtcgtctccgctgcgcgtcggccctcacccacgatggcggccagtctcccgaagcgcgaggccccgcccagctctcggcctctcccgcggccggtccctgcaccaagctcgcgagctgactggctccaccccccgcgccctcgtattggtgcggcccaggccggctgcacggccattggctgagcggatgcacaccctccccccacccctaggtctgatgggggctgttggtgctgacttgcgggaccgcctggaggaggacccggcgtgtgaggagggtgcgggggtcggggcagggaccggagtctaggggactgagggaccaagaggaacagagactcaggcccgggactggggcacc

SEQ ID NO: 34306 - DNA, 231 bp, Homo sapiens; identical to SEQ ID NO: 33254
  chr19:50789768-50789999
  hypo

SEQ ID NO: 34307 - DNA, 153 bp, Homo sapiens; identical to SEQ ID NO: 31095
  chr19:50979533-50979686
  binary

SEQ ID NO: 34308 - DNA, 328 bp, Homo sapiens
  chr19:51197452-51197780
  hyper
cgcacacacacgcacgcggctgcaggcagtcacacacacgcacatcgacacagccacactgacacacgcaccgtcgcacagtgacacgcagcggaaaaagaggaggggaggggaagccgggggcgggatgcgtgtgtgatggaggggggatgactgtgaatgggagagaggggtatgaatggggggacttgccaacaccgtgaagaggtgtggggatgtggggatcagagggacaggggcctgggatgtaggcggatgcgggtaagccacggtggctccccacagggagggctccggggaatgggggcgctaagggcggcagaaaggc

SEQ ID NO: 34309 - DNA, 195 bp, Homo sapiens
  chr19:51535218-51535413
  hypo
cgctgctggttacgcggacgggcaggcgcagccgcagcagccggaggtcgtgctcgtggctcgtcgaggctcccaggtagccgggatgggtcacagagaagccgctgtgccggatctgctcggtccagtcgagctggctgaggctgtgttcccccaggcgcacccagtacctgctgccggtggcgacggctgagc

SEQ ID NO: 34310 - DNA, 248 bp, Homo sapiens; identical to SEQ ID NO: 31097
  chr19:52390956-52391204
  hyper

SEQ ID NO: 34311 - DNA, 143 bp, Homo sapiens; identical to SEQ ID NO: 29974
  chr19:53806012-53806155
  hypo

SEQ ID NO: 34312 - DNA, 422 bp, Homo sapiens
  chr19:54109766-54110188
  hypo
cggcaaggggttctcgggacatatcaggtagtaggggcactatgagggtgagcgccgctgagacaccaaaataggccaagaagcagatgaagatcgaggtcacagtgcccaaggggatggagcggtgagggtggaggcggtgagggtggagggcttcttctcctgcgggacaggtatatgcaccgggcggtgagggtggagggcttcttctcctgcgggacaggtatatgcaccgggcggtgagggtggagggcttcttctcctgcaggacaggtatacgcactgggccaggaaaatgcacggaagtgaaggtacaaaaccctcttccctcttccccatctgagaacagggtagcctttaatgaaacctgtgcccagcggcagcccaaacagtgcccaaacccccgatgagacagaatgacc

SEQ ID NO: 34313 - DNA, 77 bp, Homo sapiens; identical to SEQ ID NO: 31101
  chr19:56104962-56105039
  hypo

SEQ ID NO: 34314 - DNA, 396 bp, Homo sapiens; identical to SEQ ID NO: 31102
  chr19:56151971-56152367
  hyper

SEQ ID NO: 34315 - DNA, 641 bp, Homo sapiens
  chr19:56728484-56729125
  binary
cgcgtggagacccagcatgactgctgactgattgcaagtccccaggagggctttatttttgcttttcaacatcctgttctgcaggttccttggctctttttgcccgtatgccgaagagccgggcattgggacgggccatgcggagactagcgaaggctttgaaattcttctcctcgatgatgactccagctttctccttctaggcattccggttgggcatgaccggtcctgtcagccgagcggccagtttcagttcttcagcagaactgtctcccttctcggaggccgagggcttcccggggaagcggatgcgtttggagcggggctccttcagccgccgcacgttggcctgcagggactgcgcctcctcggatccgcagaaatgccggcgtccgggcccccttcttcgcgtgccggccaccctgagctcctccaggcggaggccgcggccgtgcgcaccttcgtgtggtaccgaaccgtggggcagcgcacgatgggccggatgggccccgacgcggggcaggggcgaggcggcgcgccttggcttgcccggcctggcgcctgcggatcttctgggccggctggttgaaccgcttggccacgcgccgctgcagtccttggggaagcggggcttcgagatc

SEQ ID NO: 34316 - DNA, 309 bp, Homo sapiens; identical to SEQ ID NO: 31103
  chr19:58556364-58556673
  hypo

SEQ ID NO: 34317 - DNA, 91 bp, Homo sapiens; identical to SEQ ID NO: 31104
  chr19:58878569-58878660
  hypo

SEQ ID NO: 34318 - DNA, 553 bp, Homo sapiens
  chr19:5961947-5962500
  hyper
cgcgtggttccccttgttttccatggccagtgcttactcctgcacagacaccatctccttcaggaagctcccactgtgagaggcgtgcctgccctgctgcactccctcccgagcaggccttatatcctgccacggggcacgcggagaccacggccacagcagctgaaacagcctatcacccagcgtacaccgcatcaacaccctgcaatgagtgtttgaactaggccctctctctgtcattcatctacacaacaccagctgctacgtactcacaaatatttactaagccctcattctgtgcagggcgccacaggaagagtggagaacaggaagctgagggcagacgcttcaggagaaaacatctgactgaaagggaggggcgtgtttgcacttggtgaccaggcactgtggagccctggcactcccagaggggtgtgtggtgacagcatctacccctagatgtaagttctagaaagtggggcctcgtctgttccgtttctctctgtattctcagtgccaaacacagagcctcacacttaacaggcactcaacc

SEQ ID NO: 34319 - DNA, 476 bp, Homo sapiens
  chr19:6007829-6008305
  hypo
cggtgagacagacgggtgcgtgcgcccatcacgtgcactcagcacacgtcaagtgagcagccgtgatccgggctacagcggggtgccctggaatcccaagggaggccacagagaggagaggagcaggcgatggacatggatgcggaggggctgctgcttcagagaggatgcttgttggggggctcggggctccagctcctcagcgtcacccggggacgcctggcctgagcgctggcggttcccgggagggacacgcaggagctgcctgcctgggctggggcggtcacctcgcagtgccgtctgtacaccagctgcagggccttgacgtcgtgcagtgtgacgccgtcctgcagcaggaagctgcccaggtcgggcgctgggaactcggggaagacgtgggagacatctgggggaggaacacgggaacatcagaaatggcgaggctcttaggacaccgtggacaactggaaggccac

SEQ ID NO: 34320 - DNA, 200 bp, Homo sapiens; identical to SEQ ID NO: 31108
  chr19:601344-601544
  hypo

SEQ ID NO: 34321 - DNA, 240 bp, Homo sapiens
  chr19:638348-638588
  hypo
cgaggtgtcattaaagaaactcagacgcctggggtggggccagtctcaccgctgtgggtcccatccccatcatttctcacaaggccctcagatcacccttccgcggtggggggcggacactctaagaagggaagacctgggctcctgctggcgagaaggcggtggacatttcttcagtgtctggtgccgcgccctctgcccagcgtgctccgtggagggtctcattgtcttcctccagac

SEQ ID NO: 34322 - DNA, 313 bp, Homo sapiens
  chr19:6664841-6665154
  hypo
cgcccagcctctgcttcgtgagttttctttcccctgaggcaccctctgagttctccacgtgtcagacccatgtccaatgcaccacgctccttccttcacaccatgaaagccccgaagtaagaccgggtaccatcacgcagtcgaaccaggcgttcatccagcacacggacgaccaccttctccccagcctccaggtgtaccacaccacccaggaagctgctgtcccaccagacccgggagctgctggtggcccgtccgcagggtgactgctggctgaccaacagctccagctcctcggggtagcggggtgtgc

SEQ ID NO: 34323 - DNA, 182 bp, Homo sapiens; identical to SEQ ID NO: 31113
  chr19:739235-739417
  hypo

SEQ ID NO: 34324 - DNA, 1037 bp, Homo sapiens; identical to SEQ ID NO: 31114
  chr19:7459644-7460681
  binary

SEQ ID NO: 34325 - DNA, 685 bp, Homo sapiens; identical to SEQ ID NO: 31115
  chr19:8274278-8274963
  binary

SEQ ID NO: 34326 - DNA, 689 bp, Homo sapiens; identical to SEQ ID NO: 31116
  chr19:8372877-8373566
  hyper

SEQ ID NO: 34327 - DNA, 305 bp, Homo sapiens; identical to SEQ ID NO: 31117
  chr2:10150733-10151038
  hypo

SEQ ID NO: 34328 - DNA, 125 bp, Homo sapiens
  chr2:10151899-10152024
  binary
cgtacaggcgggtcaggtgggcaggcatgtgtgtgggagagtcaggtggacaggattgagtacgggccggtcaggtggacaggattgcgtacgggcgggtcaggtgagcaggcgtgcgtactggc

SEQ ID NO: 34329 - DNA, 126 bp, Homo sapiens; identical to SEQ ID NO: 31118
  chr2:10328941-10329067
  hypo

SEQ ID NO: 34330 - DNA, 188 bp, Homo sapiens
  chr2:10344656-10344844
  hypo
cgccagccctgctcagcgctgtgcccagccctgggtgcagggaggtgcggtttgctctcagaggagcagctagctgggagcatccgaggccattagggacaggacgctaatgcatcggcgccccattgattctgcctggcttttgtgaacacgtctgcgctgactaatttgtttaattactcattgcc

SEQ ID NO: 34331 - DNA, 212 bp, Homo sapiens
  chr2:10600656-10600868
  hypo
cgggtcagattccctcagactggattgtggtctgagggcgccccaggcactggagctaacgtgggaggctggggatggaaaccagtcgttggagtcagccacgatgaacggcgtgcgggctgatgcgggagccacacaagcccgtatgcacagaaaagaatgacatccacagccgagacagcagcaatgagggcacatgggaaggatagggc

SEQ ID NO: 34332 - DNA, 35 bp, Homo sapiens; identical to SEQ ID NO: 31120
  chr2:106742088-106742123
  hypo

SEQ ID NO: 34333 - DNA, 205 bp, Homo sapiens; identical to SEQ ID NO: 29991
  chr2:110011299-110011504
  hypo

SEQ ID NO: 34334 - DNA, 215 bp, Homo sapiens; identical to SEQ ID NO: 29994
  chr2:110016725-110016940
  hypo

SEQ ID NO: 34335 - DNA, 146 bp, Homo sapiens; identical to SEQ ID NO: 29999
  chr2:110048964-110049110
  hypo

SEQ ID NO: 34336 - DNA, 617 bp, Homo sapiens
  chr2:113341835-113342452
  hyper
cggagatttggagcgcttgtgtctgaggctcaatcccgtcaggtgccgcgcaactcagcggcgcattctctttggacccgaggcaccaccatactttccattgcttacttccgttaaaccccgagcgctgccatggcaagccggaaatagggatgaagcaatttagccagaagagggcggaagtggctactcagggcgccgccatgacgagccgggccggaagaagaggtagggcgccgccgtgacagattagtcctaaagggaacggggttgttagttcaattggctaccggaaaaaaccaggctgggctgggcgccgccatgacaaccgataccggaaaaggcgggtcgttccccccggacagccctacgccggcaaaggtctcgagatgtgagtagtgagagcgcctaccccatacgtgctgccgctccccttcttttacccagtgatctagacctagtctaggacctcgggaactaggaccagcctccctccttcttggagatctgaccctcaggattcagcgccttcgctcacgagctccaaccctccgcatgcccaagccccgccctctaagcgtttaggcctcgccccctctcgcgctgcttaggacttc

SEQ ID NO: 34337 - DNA, 270 bp, Homo sapiens; identical to SEQ ID NO: 31125
  chr2:11965015-11965285
  hypo

SEQ ID NO: 34338 - DNA, 1484 bp, Homo sapiens
  chr2:119914356-119915840
  binary
cgcctcgcaccccccgcgcccctaatccgggtacagaagaaagcccgagaacgtgctgtacttgttattattgcctccgtgagccttcccgccatccagcttcacatacacttcgtcccctgaatccaagtgcagcaccacgctgttactggcgtagtcgtagttctggtcggcgtcctgtgcaatggcgctggcccggacctggggacaagcggtgggagcaggtgagccggggcacctcttcccgcgcctttgctcagcccacaccaggcgcgccactcacgggcctcccgcctgctgcttcagggtccacactcccaccccagctccatgttctctctccaacttagtcaactccttccaggtcccccctcctcctcgcgccgacgagtctgggaaatagggagaggggaagcttcatgaacactgacccagagtggaagggtgggagccaggggccagggccaagaggaaaggaggctgcagggcaagggggcgacctggagagaactaaagaactgaggtttccgagaagcccacggagaggcaggcagggacgcaagtggccaaggagtgtagtttaggtatgggggtctctgggctctcaaggcccaacatttggctctacgtcccggtgagcgcggcctcggcgcatcgggaagcggagatactgtggcaccgaggcgcgttcattcccggggctcgcagggtagcccgcgggtggagagaaaggaggctggttccctgggaggttcagggcgcgggcgagggtttacgggggccggtgagtgtaggggtcactgacctgcccgttcttgcagaggtccgcccacatgctggtgccgtcgccgccgcgcatgaggatgtggtaggtgaagaagtagatgccgcgtacctggcagctgaacttgcccgtggtggggtcatagtgattgccgaggttggtgaccacgtcatcgaacttcagcacctcatagccttcgtgggggctcttgagacccacatagaaggcgatcttggggccgctgaaggtggcgctcagcgcactggtcacttcaccctcggaatcgccacctaccccggccccgccgcccaccaccccgacgccgctggccgtgcccgccgtcagttgcagccctggcagcccgggccgccccgagtcgcccttctctcccggagggcccctgggtccaggcgggcccggctctccagggggcccccgcggccctggcttgcccggtcgccccgggtcgcccttgggtccctggatgaaaggaggaggagggttggcgctgaggtcctgcatgacttccagggcggcggtgctgggtccgggtggctgcgcctttgcacccgggggctccccgccgggcgcggcagtgtaagggtcgcagatcatgcggcaggtgcccatcatctcatagtgcgcggcgcctcggggcgccgcctgcagcagcagcggcacggcgatgagcagcccgagc

SEQ ID NO: 34339 - DNA, 650 bp, Homo sapiens
  chr2:120973785-120974435
  hypo
cggccctgctccactccagcactgtagttgtagcagttttcctactcatccgtttctactctttaatagaaaataacctattcatccaaacctttacattatgtctaggggctattaccaccctacttacagcaatctgcccttcagcgccaggggaatgcccgacagctaccttctcccccgtgaccgccgggctccgtatcctgggcgagccgcccggctccggatagcaggaaactggggagggctccggcctcgcctcgtcagccccggagccttcaccaatcccgggcccggaaagaccacgcccactgctggccccgcctagcacctgcgcaggtgcagtctccacctcaagccagctgggccttatgatagtcaaaattggtattaatcagccacacctagcattccttcacatctgcatccacgccttttaaaaagctatattatttatatgttcaggctccattatccataacctcaatgatgaacaagatatccgtaaaataggaggactattcaagactttacccttcacttcctcttcccttattattggcagccttgcacctacagatatgcctttcctcacaggcttttactctaaagaccttatcatcgaaaccgcaaatacatcatacaccaac

SEQ ID NO: 34340 - DNA, 255 bp, Homo sapiens
  chr2:122495325-122495580
  hypo
cgcgcccggccctaatttggttattctttcactcacttgtgtgtgagctctcctgtgtggccccgtccgtccgcggcccttggagaacttacagcctgagggcagcatggctgctttaagagaccaaagaggcttgtgggggagaggcacactgggtggcgccggagggtcccccttaggaggtggcgttagcaccgaggcctgaaggctaaagagcggggtgtggagaaccgagcgcctgccgtccgctggacc

SEQ ID NO: 34341 - DNA, 280 bp, Homo sapiens
  chr2:127801072-127801352
  hypo
cgcagccgaggaggggctcagccgtctaccctgtctccagcggaggagcttctgagaccaggagcgggggccgtcgggtgagcattcccctggaacacgaaggagcaaacctgcccggctgcattccgccctcccgctgccctaggcccgctataggctggataaagtgaaccaagcaagggtcccagaaacgtcacacgtgaactcgcccattcacactcacccattcccatgcacactggccattcactcagccattcacacgtgcacacattcgcac

SEQ ID NO: 34342 - DNA, 621 bp, Homo sapiens
  chr2:128158437-128159058
  hypo
cgggcgcactcccgccagtcgcaggagctggctccacccgccccttctgatccagtgtcccgcagtcctgcccgcttcaccgccctcgcctagcccccgcgggtggtaaaagtccagcccggcggagcgcccctgcctccttccacgcccctggcctgccctgcgcagctacgcccagcccgcgtccatcccggaccatcctgttgaaggcagtcccctggcacgcagggctgggagctcttagctgaggatggaaccgactgcaccaggagccgctgggaggaaggccgaggggcgcagaggagaggcaaggaaaaaacagcagcccaagaatcgggcctccctgttacagcaggagtcgcatctatttatatatgttatgtcttattgctcagcaaccagctctcggccggggcgtgggccgggaagaggggtctcctggtgcagcgggttggcgtgactcatcaccgccgcgcactctggcctctgggcctaggttaacagactcccgggtttcaggctgggcccaggcggccaggccctccctgctgaggaatctgggttggggcagtgccagctccctgcttctcacctggccacagaaggggtagcgggaggagc

SEQ ID NO: 34343 - DNA, 165 bp, Homo sapiens
  chr2:131486949-131487114
  hypo
cggaaccaacggctgcgacaggagccccactacctgctcccggctaacatcctgctctcagacctggcctacattctcctccacatgctcatctcctccagcagcctgggtggctgggagctgggccgcatggcctgtggcattctcactgatgctgtcttcgcc

SEQ ID NO: 34344 - DNA, 295 bp, Homo sapiens; identical to SEQ ID NO: 31131
  chr2:132301071-132301366
  hypo

SEQ ID NO: 34345 - DNA, 291 bp, Homo sapiens; identical to SEQ ID NO: 31132
  chr2:1482094-1482385
  hypo

SEQ ID NO: 34346 - DNA, 186 bp, Homo sapiens; identical to SEQ ID NO: 31133
  chr2:148602743-148602929
  binary

SEQ ID NO: 34347 - DNA, 230 bp, Homo sapiens; identical to SEQ ID NO: 30005
  chr2:1488408-1488638
  hypo

SEQ ID NO: 34348 - DNA, 971 bp, Homo sapiens
  chr2:151342572-151343543
  hyper
cggtacaggtgggcaccgaggcaccgcgggcggccggcagcgcgaagaggaggttcagctgctgcccggcccctgcgccaccagcgcattcctgggtgtaggcgtcacgggcgccgcggctgcctgcgctcagtttctttccctcaacagcggcaattgcacgtaaccgcgtcgcctctgggattttctcccgcctcccatcacccccgcggcgctccccgcctccccgccaaccagcaggttagatctaggaggggcgcccgccttgagccgggtggttccgccgaggcgcacgcagcgcccatgcaacaccccacagtatcgggccacctcggccgacccaaggcgacttgaccacgactccgcgggcggactgcgcctggccactagtggctccaaccgcggggtcaccctgcgggcacacagcgctctcctctccccactgctatctcctcgtccacgctgtcgtctgccgcccccacccagaagggatacaattttcgcccaacagggaccgtgggaatcccttgggaggggcgcagacggcttgtagcgcgcggtttcccgagacccgccgcgcatcccccagcgactggaaacccgccccaagcgccacgcggtcctcccactcttacccgaagtgtcccacaggctcaactctattctttgtgtgtcgatttcaaaactggccgtgtaattctcaaacactgtaggaacgtaattctggatagacaaaatgggcaaaagaggaaggaaagagggcaaagaggttacgtttaaacgcacgacacccattgaacacccttcccctccccgctccccagttaagaaagaaaaccttcacacatcagaccacacactaagcacatggaccctttccgaaacccctgtcctactccccactcaccccacccggctctcacagatctgctgacccgaatctcccaaccccaggttatgcacacaggaac

SEQ ID NO: 34349 - DNA, 91 bp, Homo sapiens; identical to SEQ ID NO: 31138
  chr2:1520228-1520319
  hypo

SEQ ID NO: 34350 - DNA, 237 bp, Homo sapiens; identical to SEQ ID NO: 31139
  chr2:1543326-1543563
  hypo

SEQ ID NO: 34351 - DNA, 461 bp, Homo sapiens; identical to SEQ ID NO: 31140
  chr2:157292161-157292622
  binary

SEQ ID NO: 34352 - DNA, 247 bp, Homo sapiens
  chr2:1688962-1689209
  hypo
cggacacctgcagccggagggcccccaaacgcagaccatccctgccccttgccccgggacaggtctgtgctcagcactccgcgcacgaatgggaaacgtgagggaaggaaaaactggagcaggaagacaaggaaaaccgccgtgggcgagcatgacgggcgggcacctgacgcgcgggtcccgaggaaggccgaacccgacagaatccctggagcctcgtctctgccaggcagtgtgctgacagggc

SEQ ID NO: 34353 - DNA, 998 bp, Homo sapiens
  chr2:177052978-177053976
  binary
cgcgcgtcacgctcccatttaaccttttccatgccgcgacgcccacactccgccctcgagggactagccccccccacgatccagagcagaagcggctcgccccgctgcatccacgggccctcacccaagcgtccagtcctgcctttctccccccacctcgcccaatacctgtccgagagcaggcgttctgccctctcgccccgcccttgcccaggcagcccccggtcgcgacggctctcctcggggctcgggggcgctgggcggcggccctgggctgctttggctaacttggctgcggggcaggcgcgaggagcggcgcgccgaccgggccgagcggagaggccgcccattggccggccagcgccacgtggccgcccccgccggtatattaggccactatttacctccggctcactcgccatgggttggagagggcagctcgggtagagagggctggcggagcggcgcagacggcggcagtcctgctcagcctctgcccggctccgtactccggccccggcctgcgccctcagaaaggtggggcccgaaccatgagctcctacctggagtacgtgtcatgcagcagcagcggcggggtcggcggcgacgtgctcagcttggcacccaagttctgccgctccgacgcccggcccgtggctctgcagcccgccttccctctgggcaacggcgacggcgccttcgtcagctgtctgcccctggccgccgcccgaccctcgccttcgcccccggccgcccccgcgcggccgtccgtaccgcctccggccgcgccccagtacgcgcagtgcaccctggagggggcctacgaacctggtgccgcacctgccgcggcagctgggggcgcggactacggcttcctggggtccgggccggcgtacgacttcccgggcgtgctggggcgggcggccgacgacggcgggtctcacgtccactacgccacctcggccgtcttctcgggcggcggctctttcctcctcagc

SEQ ID NO: 34354 - DNA, 279 bp, Homo sapiens; identical to SEQ ID NO: 31143
  chr2:1771840-1772119
  hypo

SEQ ID NO: 34355 - DNA, 595 bp, Homo sapiens
  chr2:182521331-182521926
  hyper
cggcgacttggggactcggtaacctgtccgggcagtgaggcgagcacggggaggggaggcgagaaaaggggagggtggagcaaaagctcgtgggtgtaggccttgggccggggagagggaggaagcgcggagggaggcgaagacgcttggggccgggcactcacccgccgggcgctcgggctgaatgggccgccaccgcagtgctcgctcgctcagcaccacgtcacaactgtccctcccgatctcgaagatgccccggagcagaatccgctcggccgccgcctccgtctgctgcggggacgttaacagcgccggaggcacagcggcagcctccgggggcgcctcttcctcccggccgccctccagggcactcacccggttcctgcgcctcctccagggcatggcggagtcgcaggctgggcccgagccaggggtccggggaggcctttggagaaggaggtggagggcgcggcagccccagctctagccgcgtccagcgctgccacagcaacggcgcgcagggcagggacccaggagggaggcggggccgcgcctgacccagtccagcaccctggcctgccagcctcgccgcttc

SEQ ID NO: 34356 - DNA, 559 bp, Homo sapiens; identical to SEQ ID NO: 31146
  chr2:1846385-1846944
  hypo

SEQ ID NO: 34357 - DNA, 171 bp, Homo sapiens; identical to SEQ ID NO: 31147
  chr2:191208170-191208341
  hyper

SEQ ID NO: 34358 - DNA, 891 bp, Homo sapiens
  chr2:20646879-20647770
  binary
cgaggcccggagagacccgggagagagctaggccgagtccaccgcccgagtctgctgcccgagcccgcgttacgcacaaagccgccgatccccggcctggggtgagcagagcgaccaccgcccgggagcagcgcggcgagacgcacggtgcgccctatgcccccgcgcccccaccgcccccgccgcggcagccgaagcgcagcgagagaacgcgccaccgcggggcccgggtgcagctagcgaccctctcgccacctgcgcgcagcccgaggtgagcagtgagcggcgagcgggagggcagcgaggcgttcgcgggccccctcctgctgcccgggcccggcccgctcatggcggccatccgcaagaagctggtggtggtgggcgacggcgcgtgtggcaagacgtgcctgctgatcgtgttcagtaaggacgagttccccgaggtgtacgtgcccaccgtcttcgagaactatgtggccgacattgaggtggacggcaagcaggtggagctggcgctgtgggacacggcgggccaggaggactacgaccgcctgcggccgctctcctacccggacaccgacgtcattctcatgtgcttctcggtggacagcccggactcgctggagaacatccccgagaagtgggtccccgaggtgaagcacttctgtcccaatgtgcccatcatcctggtggccaacaaaaaagacctgcgcagcgacgagcatgtccgcacagagctggcccgcatgaagcaggaacccgtgcgcacggatgacggccgcgccatggccgtgcgcatccaagcctacgactacctcgagtgctctgccaagaccaaggaaggcgtgcgcgaggtcttcgagacggccacgcgcgccgcgctgcagaagc

SEQ ID NO: 34359 - DNA, 228 bp, Homo sapiens; identical to SEQ ID NO: 31150
  chr2:208633316-208633544
  hyper

SEQ ID NO: 34360 - DNA, 426 bp, Homo sapiens; identical to SEQ ID NO: 31151
  chr2:216946200-216946626
  hyper

SEQ ID NO: 34361 - DNA, 799 bp, Homo sapiens
  chr2:2189479-2190278
  hypo
cgagtcccgcgttccttacgtgaggcggacgcagccgggcctcccagacgcccgcgttccttacgtgagggggacgcagccgggccttccgggccttccgggccttcccgagtcccgcgttccttctgtgagggggacgcagccgggcctcccagacgcccgcgttccttacgtgagggggacgcagccgggccttccgggccttcccaagtcccgcgttccttctgtgaggcggacgcagccgggcctcccagacgtccgcgttccttccttgagggggacgcagccaggccttccgggccttcccgagtcccgcgttccttccgtgaggcggacgcagccgggcctcccagacgcccgcgttccttccgtgagggggacgcagccaggccttccgggccttccggagtcccgcgttccttccgtgagggggacgcagccgggcctcccagacgcccgcgttccttacgtgagggggacgcagccaggccttccgggccttcccgagtcccgcgttccttacgtgagggggacgcagccaggccttccgggccttcccgagtcccgcgttcctttcgtgagggggacgtagccgggcctccccgagttccgcggtcattatgtgagggggacgcagccgggccttcccgagtcctgcggtccttactggttaactgtagtcccgcactgttaatgtttttcgttttttgaagccaagatagcgtgctcaccgcaaaagaaatatggacctcgatgaacagataatagggagaatctcatgcacccatcctggaattac

SEQ ID NO: 34362 - DNA, 184 bp, Homo sapiens; identical to SEQ ID NO: 32341
  chr2:219826725-219826909
  hyper

SEQ ID NO: 34363 - DNA, 88 bp, Homo sapiens
  chr2:220083558-220083646
  hyper
cgcccactcccctagcgcacgcgccgccgccacgcactcacgcagggcacgtacgccgtctcagcacggccccgctggctctgggccc

SEQ ID NO: 34364 - DNA, 163 bp, Homo sapiens; identical to SEQ ID NO: 31154
  chr2:224702626-224702789
  hyper

SEQ ID NO: 34365 - DNA, 250 bp, Homo sapiens
  chr2:232260775-232261025
  hyper
cggccccgcggccctggacaccgctccaggaccctggcggctgggaccccaggtcttgccggcagctgggtcccctctcccttccagacccctgagggccccctgcgtccgggccactctcctcctctcggggcttccttccgcgggacctcggaccgccgcccgcccggcccctctccgcccctcccgggctttccctacgaatggagcggacccggcaggtggagcgcccgcagcccagggcctcgcc

SEQ ID NO: 34366 - DNA, 257 bp, Homo sapiens
  chr2:233198455-233198712
  hypo
cgctgccgacggtgaggctgtgggtggtgccagccttccaggcctggctgggcagctctgggcttgtcaggctctgacccatcccgtcccgcagatggcactgtacttctgctcggggctgctgcaggacccagcgcagttccggcactacgcgctcaatgtgcccctgtacacacacttcacctcgcccatccgccgctttgccgacgtcctggtgcaccgcctcctggctgccgcgttaggtgaggggtgcagtc

SEQ ID NO: 34367 - DNA, 887 bp, Homo sapiens
  chr2:233283264-233284151
  binary
cgaccagacatccatgggtagagacccagaagcacgcagaccccagcccctctttccacccagacgagatgaccaaagccccatccctgactgtctcagcttacccctgaaagcctgcactttccctacctgtcgggggcacttgcgcagtgccgcactgacccttggggttcctggctttggcgccagccccagccctcacggagatgtcagcccagcccgccggcgcgtccctccctccctgccctcactgccttccagagggctgggaaattgcggctcccgcggctcggctgaacacttcagttaacccagggaaattacttgcgccttcctcccgcgctctgccgccaagcgctcccctcccctgctttccctttctctcctcttgcgcaccctcctcccacgcgcagggacccctagtcagggccacgccccgggtctgcggccgctggctgggcgctcgggaatcgcactcaggcggatgacgtagcgcgaggagttcctgtaatctaggctgatctagagagagaagagcgcggcggcactgtacacgccctgcaccttgtacagcagctggttgaggtcccagctggttgaggtcccgcgacccccggacgctccgccgcgccgcccaggtcccagcccccgcagtcctccatgacctctagcatgggccgaggactcagtagctctatctcgcgcatgtcgaggcacgaacggaaaaaggcgctcaccttgcactgggccgcgccgccgggcccatccctgggccgtgccagcaggcgcctcaggcgctcctctttctgctcgccgaaggccgcgatggtgccataggtgagcttttcgttgggggtggcatggcgcttcagtcagcagccgcagac

SEQ ID NO: 34368 - DNA, 399 bp, Homo sapiens
  chr2:234737283-234737682
  hypo
cggcccagttctgtaccaggagaagctgctgaagccggcagctttgctgctggagaagggtgccgaccaggaggaagacgaggccctgcgggtgctgtccctgcgcgccctcggcaacatggccctgggcgcccccaagaaggtactgtgcctggccctgggcccaggtcccgggagctgagggtgcaggccgggtgccctggtcagcctgggagggagggtgcaggctgagggctgcccatgcccctccaggtgaagcagtaccggaaggtcttgctggagaagtgcctgggccccctgagggagcccgtgagcaacagcgtgactgccgagggcatggaggccctgaccaagatcctggctgagctccgggaaggggatgtggggtcctctttcgac

SEQ ID NO: 34369 - DNA, 350 bp, Homo sapiens; identical to SEQ ID NO: 31162
  chr2:235950041-235950391
  hypo

SEQ ID NO: 34370 - DNA, 412 bp, Homo sapiens; identical to SEQ ID NO: 31163
  chr2:235961011-235961423
  hypo

SEQ ID NO: 34371 - DNA, 172 bp, Homo sapiens; identical to SEQ ID NO: 31164
  chr2:236459184-236459356
  hypo

SEQ ID NO: 34372 - DNA, 640 bp, Homo sapiens; identical to SEQ ID NO: 31165
  chr2:236648390-236649030
  hypo

SEQ ID NO: 34373 - DNA, 366 bp, Homo sapiens; identical to SEQ ID NO: 30025
  chr2:236685979-236686345
  hypo

SEQ ID NO: 34374 - DNA, 131 bp, Homo sapiens; identical to SEQ ID NO: 31167
  chr2:236791021-236791152
  hypo

SEQ ID NO: 34375 - DNA, 317 bp, Homo sapiens; identical to SEQ ID NO: 30027
  chr2:236801881-236802198
  hypo

SEQ ID NO: 34376 - DNA, 544 bp, Homo sapiens; identical to SEQ ID NO: 30029
  chr2:236839051-236839595
  hypo

SEQ ID NO: 34377 - DNA, 64 bp, Homo sapiens; identical to SEQ ID NO: 31170
  chr2:236897051-236897115
  hypo

SEQ ID NO: 34378 - DNA, 139 bp, Homo sapiens; identical to SEQ ID NO: 30031
  chr2:237018173-237018312
  hypo

SEQ ID NO: 34379 - DNA, 161 bp, Homo sapiens; identical to SEQ ID NO: 31172
  chr2:240061326-240061487
  hypo

SEQ ID NO: 34380 - DNA, 160 bp, Homo sapiens
  chr2:240165136-240165296
  hypo
cgctcccggctggataaattaacattctaaagtgtgtttggtggggggttgctgacatagacaaaaacaatgaaaccgctgtgactcaagagtagtataggtcacacctcactgtgcacaccccactgtgctaacagagctgcttttcagacacgggaac

SEQ ID NO: 34381 - DNA, 95 bp, Homo sapiens; identical to SEQ ID NO: 31174
  chr2:240316126-240316221
  hypo

SEQ ID NO: 34382 - DNA, 186 bp, Homo sapiens
  chr2:240690358-240690544
  hypo
cggtggctcggcaaagtcagtccctcacacatcctcgatccaggtcccgcacgtgccccggctctgaggtttagcctgttggctgatggggggaaaggtgtatggggcctttgtcgacagcacatatgccgggctgtggagtggggcccagggtgcctgcgagtgtctgcactccccaagcatcgc

SEQ ID NO: 34383 - DNA, 136 bp, Homo sapiens; identical to SEQ ID NO: 30040
  chr2:241697788-241697924
  hypo

SEQ ID NO: 34384 - DNA, 642 bp, Homo sapiens
  chr2:241864772-241865414
  hypo
cgcgtcaccccgccccgcgaaaggcacctccctcccagcccctggcaccttgtctcaggcattgagggacgggccaaggttgcagagccagagccaggagagctcggggcaggggcagatatcgcagggaggcaggagggcactgggctggcacctgggagagccaccttgatgctggcactcagtttaggggtcctttgtggggcccatggcaggtgggggcagagcagcggctgtgcacctgagcccaggtcagttaggcccagagggtttggggttccattcaagccccttgacttggggactctgagcgcctctcttaggagaggcttcctacccccaccatgccctgtgggttctctgtccaggagcaccggcctctgtcaggtgaacgcgctcctgcgggagcagctggaacatatgaagaaggccaatgacgcgctgggccgggagctggccgggatgacgggcagcgtgcagcgcctgcagggcgagctggagctgaggcgctgggcccagagacaggtgctcccccaacccttgctcacctcatggcggccgcctgtctgggtgcctatggctgggtagcaggcagggacatggtgagggtgcactggctcagtggctgtccctcttggggac

SEQ ID NO: 34385 - DNA, 211 bp, Homo sapiens
  chr2:241989249-241989460
  hypo
cgactcggacccctgcttcaacggaggctcctgcgatgcccatgacgactcctacacctgcgagtgcccgcgcgggttccacggcaagcactgcgagaaaggtatggcgggcaggggcgtccgggccggcgtcagcaccctggagagcgcccgcggtccgccgtcctgcttctctgctgtctctctccttgtttcgcgaattgctgacctc

SEQ ID NO: 34386 - DNA, 235 bp, Homo sapiens
  chr2:242148701-242148936
  hypo
cggccggctgttcgaccacggcggcaccgtgttcttcagcttgttcatggcactgtgggccgtgctgctgctggagtactggaagcggaagagcgccacgctggcctaccgctgggactgctctgactacgaggacactgaggtgagccacccccgctggaccacggtcacacccggcgagggccgccactgagcaccggctcccttccaggagaggcctcggccccagtttgcc

SEQ ID NO: 34387 - DNA, 726 bp, Homo sapiens; identical to SEQ ID NO: 31179
  chr2:242664623-242665349
  hypo

SEQ ID NO: 34388 - DNA, 130 bp, Homo sapiens; identical to SEQ ID NO: 31180
  chr2:242793077-242793207
  hypo

SEQ ID NO: 34389 - DNA, 210 bp, Homo sapiens
  chr2:242815156-242815366
  hypo
cgcaagggcggtggccacgttgcctacggcccccagggcaatggctgcttctcccaaggctattaccagaagaggcagctgaggtccaggttccacaaggcccgctgtgggtgccgccgggaggaagacgagcgccctggccgtgcctgccgtaggccgcacgccgagccctacgaggacttctggatctgggtgtccatgaccgtgtgc

SEQ ID NO: 34390 - DNA, 93 bp, Homo sapiens; identical to SEQ ID NO: 31182
  chr2:25464444-25464537
  binary

SEQ ID NO: 34391 - DNA, 101 bp, Homo sapiens; identical to SEQ ID NO: 31183
  chr2:25623195-25623296
  hypo

SEQ ID NO: 34392 - DNA, 465 bp, Homo sapiens
  chr2:2575361-2575826
  hypo
cggcagatggcggggccagcacctgagatatcccgttcccctgctatgctggagagggccatggtatgaagtggggggcttcacactgcccccggccctgatctgggaggcccttccaggcgaaggcggctcccggcttccccttcctgctgcccctcttcctccccatgcccgcctctccccccacgcctgcctcctccctcccgctcctcgctgcctcctcgcctccaggccacagtttctgtagctgggtcttcagacttcagaagtgtccttttattgtaaagacttcagtggtttcctagaaagcgccggattttcgagctttcttcctggcggggttgctttgtcctgcgcgacagcaggagttgtgggcggccgctgcaaggcccgcgctggccccgtctcccttcgcaggtgtcgaaccaggagtcacctccgcatctgcgcagcagcgggcccggc

SEQ ID NO: 34393 - DNA, 424 bp, Homo sapiens
  chr2:27308893-27309317
  binary
cgcccgacgtgtctacgtcggctgaagagacagcgggggcggcgggctcctggggtctcgcctgagacggggcacctagccctgggcgagcgccgcacccgggcccgcagcggcaccgcgcccagagcggcctctccccacgcccggggcgcgccggctcagggaggctcggggccgcccatgcagacttttggcctggcgcgatcccccaagaacccctccagggccggcctgcggaggagccgatcctcgcaccctccgctccctccactggccctccaggtcgattccctgggctccaggctcccccgcgcgggcgccgcccaccgccatactaaacgatcgaggaataaagacacttggtttttctaaaaaaaactaaacgaaccgttctgctacggtacggggtcgggggctgccgggc

SEQ ID NO: 34394 - DNA, 228 bp, Homo sapiens; identical to SEQ ID NO: 31188
  chr2:2769802-2770030
  hypo

SEQ ID NO: 34395 - DNA, 128 bp, Homo sapiens; identical to SEQ ID NO: 31189
  chr2:3307454-3307582
  hyper

SEQ ID NO: 34396 - DNA, 163 bp, Homo sapiens; identical to SEQ ID NO: 31190
  chr2:3321063-3321226
  hypo

SEQ ID NO: 34397 - DNA, 42 bp, Homo sapiens; identical to SEQ ID NO: 31191
  chr2:3349551-3349593
  hypo

SEQ ID NO: 34398 - DNA, 530 bp, Homo sapiens
  chr2:3352473-3353003
  hypo
cgatgcaggtaccgggcattttccagggaatcaacgactgaaaggagcgaggacctgaggcaacaccaggagctattaacccttcccagccaccactccccaggagagctggagctccagagtgagggatggcggcttccgactgtgcaggaggagaccagactccgttgtcacagaaggcaggggcagggctgcagtccacagccagtggagccttcccggcgtctctcctggtctgtgcacatgcgcacaggcgggctgctcgcagccggaaccatggggcccaggctgttcaggatggagctgtcctgattttcaggacatctcaccccagagacacggcatggcaacagcacgggtgcaccctttccacgtgtgtctgtacaaaagtgtacacttcaggtgcaagagcatacccatggcacatgcctcagagctgaactgcaaattcaaaggagagggaagcgagcagagagaggcagacatgcaggtttcagtcccgattctgccacgcaccagctccacactgc

SEQ ID NO: 34399 - DNA, 513 bp, Homo sapiens
  chr2:3750927-3751440
  binary
cgcccctcacctgcccgggctccccgttgccccctcacctgtctccgccctgtgccgcgcctcacctgcttgggctccccattacccaatcacctgtccctgccccgtgccgcctgctcacctgcccgggttccccgtcgccccgtctcctgccccggccccgagcccctcgccctggcggccaggcggtcacaatcgcccagggtcgcgtcaacacgcagcctccgcccgcctggcagccccgtcccgtccccgtccagcccccgtcccgtccccgtcccgtccccgtcctgcgccagcggctggagcggacctcccgtcggcggtgcccgggcctgggcgcggctctgcaggcgtcgctgcccgcgctgccgcagcctctcggccccggcgagcgaggagcggggcgcggctatgggaacccgcgggccctccgcgccggtggacaccacgcccgccaagaccatcgtggtgtaccgcaacggggacccgttctacgtgggcaagaagttc

SEQ ID NO: 34400 - DNA, 1195 bp, Homo sapiens; identical to SEQ ID NO: 32366
  chr2:45398-46593
  hyper

SEQ ID NO: 34401 - DNA, 211 bp, Homo sapiens
  chr2:47200517-47200728
  hypo
cgagagccttccagccaccgcatggtgcagggaaacccttgctaccctcatttatcccccgtcagggagggcctcagtgccgagtgcggcggaggatggatccctcccactgccgcaggttgccggttgaggtgaactgtttccacctggagggagctaaggaaagaaagaagcctgtacacaaagtcatacattcacacaaacaaatggc

SEQ ID NO: 34402 - DNA, 352 bp, Homo sapiens; identical to SEQ ID NO: 31198
  chr2:582796-583148
  hypo

SEQ ID NO: 34403 - DNA, 213 bp, Homo sapiens; identical to SEQ ID NO: 31199
  chr2:67624288-67624501
  hyper

SEQ ID NO: 34404 - DNA, 280 bp, Homo sapiens; identical to SEQ ID NO: 31200
  chr2:70369049-70369329
  binary

SEQ ID NO: 34405 - DNA, 794 bp, Homo sapiens
  chr2:71453820-71454614
  hyper
cgaaaaccccctattgctcccgaggggcaggggctgaccccagcggacgccccttttcgccgatggccgcgacgtgggaccccgcgcgctttccctccctacaggagctcgggcaggcgcgtgccgcccttcacagccccgacggcggcagaaagggaggcgcagggcgcccccagagccgggagaacggcgtttccctcgagtcctttccccagcagcccgggcacccgagcccacctgggctaaccagaagcccctccttcagatcgtactctgccactcctccgagagcttaagccgttgccgtagaggtcgccgtcgccacaacagtctcggcctttagtaccaaaacgtgaagcacagcacccgagaagcgccactaccacttgccaggttatctcttactgcacactgcctcctcgccccgcccccgaacccaagccattggttgccgggcaccgccccattcgtctattgggccaaagaagatgccgttcggtcacctagaatggcatatgtggtttttattggtctaaatgtgaagcagtgcccgcccactccctcagaagtttcagcttctgattggttttaatgtctgtcttttctcttccttcattttttttttcctgtggtggaacacctccttgagggagatgccggctctgattggctgaaaggacgctacgctagcctgggataggcattgggccaaggatgcgcccggcccactcgtgggggaggagaccaaggcgccgcactctgggtttgtttacacaggctcttgctcccgcttc

SEQ ID NO: 34406 - DNA, 125 bp, Homo sapiens; identical to SEQ ID NO: 31203
  chr2:72310184-72310309
  hypo

SEQ ID NO: 34407 - DNA, 698 bp, Homo sapiens; identical to SEQ ID NO: 31204
  chr2:73052641-73053339
  binary

SEQ ID NO: 34408 - DNA, 678 bp, Homo sapiens
  chr2:74229477-74230155
  hyper
cgaagcgggaatccccccccacccccccggcgtctgctccgctccgctccacccggaggcgcagtctgtcatctttgatcctggaggcgcagaggacgccttctgggtattaccttcggggtccccgcgggaggaggccgggggtgccctgggatgccccagcctgccggggagcggcacggcgggcctgggaagcagccagcgcggctcagcagcaccctcggctgcgcccccgcctcccggctgggcaggtccaccaggcgggggcagggccggccgcggggattggctggcgagcgcgccgccccctcgcacaccagccccgcggcggggaggggagcgcagccggcagctggccgccgcctcctctgcagtgcctccctccgtgcgctccctccggcggggataatgggaggcccgccggccgatgcaccagaggaggccggccgaggtagagcgcgcggggccggggatggccgggcggacgcgggccgggggtcgccgtcctctcggatctcggggggattctcagaggagaaatgaaaacaaaaacacactggaaggcgggggagcctgtctgccgtgatccaggcggcagctggaggcaggaagatggtcccagatagcctttctttcccaggctgtatcccctcccgttcgccttcttcccctccggcc

SEQ ID NO: 34409 - DNA, 288 bp, Homo sapiens
  chr2:74454017-74454305
  hypo
cgctgcacctctgggttgcccaggccaacctgccaggcaggagggggaagcccgtgcccactttaccatgaccgggaagatgatggcagccaccgtggatttgaggatccagagcaccgccaggcagaggatctgcaccagggtgaagaggtggatccggcgcagcggcacgtgccgcaggaaggcatggtccggctggtgcttggctggcatcaggaagagcttgcagcgttcccagaactagggggacagcgggggctcagccaggcagccagaccccgagggccc

SEQ ID NO: 34410 - DNA, 937 bp, Homo sapiens; identical to SEQ ID NO: 31205
  chr2:75060920-75061857
  binary

SEQ ID NO: 34411 - DNA, 154 bp, Homo sapiens; identical to SEQ ID NO: 31206
  chr2:7907371-7907525
  hypo

SEQ ID NO: 34412 - DNA, 246 bp, Homo sapiens
  chr2:8658301-8658547
  hypo
cgggagtgggaagcactccatccgggccgagggaggagtcatttcccagctccagtcagcacctgtttctccgcctctggcccatggtaggaagggagctgccaggcatcccgcccttgaggcctctgagcgaacgagagctggttcacaagctcggaacctggaggctcagaatgcggcggctgctagctgtgtgacaatggacaggtcactgaggtccctggcaatgggtgggaggtcgttagc

SEQ ID NO: 34413 - DNA, 152 bp, Homo sapiens
  chr2:875867-876019
  hypo
cgaggccggtttcccgtcgggctgcaaacggcagagcacgcggccctgtcccgggcaggctcggctccaggtggaacccgggacacgtgtacgtcctcagtggggcctccgcattccacactcgagcacatttgaaccccggacacctttac

SEQ ID NO: 34414 - DNA, 228 bp, Homo sapiens
  chr2:8849838-8850066
  hypo
cgcctcgtctccttccaggctgctgagccagtagcgttgaaccctctcacctgccgtccccgcctttcctatgccctttgtccttgtaggttgacgcctgtgtcagcagagagaggaaagagacgcaggcgatcattctcccgtccttacgtggcagacagggttatttgcgtagattgaccgagatgagtgtcctgcactctgaagaaccttggtggctcctccttc

SEQ ID NO: 34415 - DNA, 147 bp, Homo sapiens
  chr2:9289953-9290100
  hypo
cggtttcttgtctgtgtaatgggatcaatagcgcctcctccaagacgccatggggacttgctgggataccgtgtgagggcctcaggccgatggcatgcagggagtcctcagtgcccgggacgcgttgactgttccagcagccagtgc

SEQ ID NO: 34416 - DNA, 372 bp, Homo sapiens; identical to SEQ ID NO: 31209
  chr2:9609477-9609849
  hypo

SEQ ID NO: 34417 - DNA, 158 bp, Homo sapiens; identical to SEQ ID NO: 31210
  chr2:97530642-97530800
  hypo

SEQ ID NO: 34418 - DNA, 457 bp, Homo sapiens
  chr2:98350752-98351209
  hypo
cgcccctagagtccaccctcatgtggcttcatggggcacccacagctgtggccaggagtgtatgccagtgtgtgcgtgtggatgtgcaggaacacgcatgggcacccacctgcttgtgcatgctccagggacggcacccttgtctggggcaggtgcttgtgggggctgaggctgccttgctccccacacccctgcccctgacctgggagtgtaccgctgtgtgtgcccagcacgcataacgtccccagacaaaccgcggccgatgcccatggacacgagcgtgtatgagagcccctacagcgacccagaggagctcaaggacaagaagctcttcctgaagcgcgataacctcctcatagctgacattgaacttggctgcggcaactttggctcagtgcgccagggcgtgtaccgcatgcgcaagtatggccgcccctgccgtggtgggagcaccgcc

SEQ ID NO: 34419 - DNA, 572 bp, Homo sapiens; identical to SEQ ID NO: 31212
  chr2:98408820-98409392
  hypo

SEQ ID NO: 34420 - DNA, 791 bp, Homo sapiens
  chr2:98703022-98703813
  hyper
cgcccacgtccagtggctgagctacaacgaactgccccacctcttttaaagcgtctttctctgaactgtgcaaggaagagagcatcgcctgacagtggtgaggtgaaaattaaaactacacaggggtcaatgctctgctgaaaagtatgaaaagaagttcgtttgtagcgtttcccgcagtctcctcgcctctcctcggcctctggcgccttcctcccctgtctgctcgcaccctatatttctaccccagctcatcagtgtatttgtttgttaattcattcattctttcattcatattctccgctgttgttaattttcccattgacagtaggcgcaaggggcaacgccactcgccctgtccctctagcgtggcctctgtttgggggtctggggtggaggtcgtcccggcccgggtggttccggacgccggctttccgcacctggctcggtgacggcctcggcgccccgccctcttggccacggtccgcagccatcgccccagtgagggcgcggtctgtgggcggggccggctccaggagccgcgctgtgattggccgtgtccaggcaaccgcggagacgccgtcgtcaacagaccgcgctcggaaccagaggcgcgggtcacagagacctagaacagctggaatccttcgcccccggcgcgcagccttcgcccgccggaatcgctgccttatccaccagcgggatgcttacctcgcccgccctctcgggtcaggcgggcccgggaggatgggagggtggctgctgagcgggagccgccacgtcttccaccc

SEQ ID NO: 34421 - DNA, 164 bp, Homo sapiens; identical to SEQ ID NO: 31216
  chr20:10687213-10687377
  hypo

SEQ ID NO: 34422 - DNA, 78 bp, Homo sapiens; identical to SEQ ID NO: 31217
  chr20:19673407-19673485
  hyper

SEQ ID NO: 34423 - DNA, 253 bp, Homo sapiens
  chr20:24523866-24524119
  hypo
cgccccagtaccagagccaccgggtgggggccagcacagtgccggccagcctggacagcagcaggagtgagccgatgcagcagctgctggaccccaacaccctgcagcagtcagtggagtcccgctaccggcccaacatcatcctctattcagagggcgtgctgcgctcctggggggacggtgtggccgccgactgctgcgagaccaccttcatcgaggaccggtcgcccaccaaagacagcctcgagtaccc

SEQ ID NO: 34424 - DNA, 1166 bp, Homo sapiens
  chr20:25061761-25062927
  hyper
cgctgcgccggcagaggagcgcggtacccgggactcccttttcagcaccccaaggggcggacagttccagggctcgaggccccgtactcttccaggacccgtcaatcattcgatcatttccgcccgcgtttccacctggtaccttgttcggtgctgctggtgaccaccacaggcccgggccttcccgacccacgcagctgccagaggcggagactggcgcctggcgctggggggaaaaatggccctctggagatggttgttgaagaccccagggtctcatcaaaaggttccacccggaaccaggtggtggcggtctcacatcgctgagggaacaggaccccggatgagaggcagggatttaggatgcagcaaggggcaggcggcgcagctccgcgaatgcccctcccgcgacggggcctcgctctgggctccccgcctagatctgggccgctggggccaggggtgcggtggggcgatggtctgtgacccctgcgcggctcagagcctaggggacaggggcaggagcggaaagcgcgggcctgattaccggacgtggagacgctgtcgctgcgcttctggcggccgagcgcaggcggcggacggctgggagccagcggggcagcgggctcggggcccctgggcggcaggaacggcacgtccgctaggagcaggcagggtgctcgagcggccgccggcggctgcgtgccgaagccacagaggaggccgagtcccagcggtagggccccacgcgccaggctggagccgtcaagccccgggcccgggcacggcgcgactgccggaccctcgcagccagatccctgtcctgggccagcgggcgccggcagctcggcctccaagcccagcaggtccgtgatggcgaagccccgggggcgcgagcccctaggggaaccgccaggcaccagcgccctgctgctagtgcgcccgtcggaaagcgagtcccggccggtcatggttccttagcaagcaaggcgcgagcctctctggatcccgtttgcggagggcccagcttagaggaagctttataggattgggctgccggtcgggcgcgggaggcctgaagggctccaatcagctgggcgcgggcgcgtcgccgttccggaccccgcgagatggggacgccaccagttcccctcccctcggttacc

SEQ ID NO: 34425 - DNA, 297 bp, Homo sapiens; identical to SEQ ID NO: 31218
  chr20:25231684-25231981
  hypo

SEQ ID NO: 34426 - DNA, 976 bp, Homo sapiens; identical to SEQ ID NO: 32402
  chr20:25565494-25566470
  hyper

SEQ ID NO: 34427 - DNA, 484 bp, Homo sapiens
  chr20:2785591-2786075
  hyper
cggcacggcggcgcttcccaccaccaccatcaccaagcccggccctgcccctcctctcctttcccttccctcccctactccttcgctcactcacccggctgccacgtcccgtcccggggttacataacccggagagagaagcctgagcgatagcctgcgggctggggctgcggtggaggagccaagggttgatgcactgcctgacctgccctccggctcctcgcccccagcccgtattctcctcggggagccggcagccctgggtctgcccagatccggagatgcccttcccgccctccctccaagaccccctttggatcctgcattcctggtcatctctccagaaggaaggaaacgcgtccagcggtgtgcctttggccggcgcttggcctttgcaaagggctctccagggagatgctcccatccccacgaggagcgatgcccagaagtggcccgcaatcctctggcgtaagcggggccctgc

SEQ ID NO: 34428 - DNA, 148 bp, Homo sapiens
  chr20:2801696-2801844
  hyper
cgtggtcacagacgcgccgggagggagggggccacgtcgggcggcatgcgttgaggcgacaggagcgcctggtcagacagcagctgctctgaggcgggggaaggcgtggtggggggtcccctgcggtgggaaccctgcgaggacaccc

SEQ ID NO: 34429 - DNA, 262 bp, Homo sapiens; identical to SEQ ID NO: 31222
  chr20:30196349-30196611
  hyper

SEQ ID NO: 34430 - DNA, 270 bp, Homo sapiens; identical to SEQ ID NO: 31223
  chr20:30772699-30772969
  hypo

SEQ ID NO: 34431 - DNA, 145 bp, Homo sapiens; identical to SEQ ID NO: 31224
  chr20:32250068-32250213
  hypo

SEQ ID NO: 34432 - DNA, 237 bp, Homo sapiens
  chr20:33134788-33135025
  hypo
cgtgaggagggctggcgtcctgcgcacagtggaaggactggccttaggaacagggacagtgattccactcagcatagccagggagcggcccagatggcagggcaaggtctctgtggagtgagggcagcagggaaggtgcctcgcaggagaggagagaaaacatacacttccctggggacgcgggcggggagtttgacgggttcggcaggtggcccttttgcagcatctttttcagcc

SEQ ID NO: 34433 - DNA, 262 bp, Homo sapiens
  chr20:34147099-34147361
  hypo
cgggcacccaccgtgaggatgtacacattgccacccatgtctgtgaactccaggtcttctggccggcccttcctcctcctctgctttcgcttcttcttgccagcctgagcctcctgcgcctcccgctccacgtcctctgcctccttcagcttcactaccggccaccagcccctcaggcggcggcagcgaaacagattgcacctcggcccggccccattgcgggccagctgcacagagcagagctcggggccccgggccccac

SEQ ID NO: 34434 - DNA, 64 bp, Homo sapiens; identical to SEQ ID NO: 31227
  chr20:35929641-35929705
  hypo

SEQ ID NO: 34435 - DNA, 236 bp, Homo sapiens; identical to SEQ ID NO: 31228
  chr20:371973-372209
  hypo

SEQ ID NO: 34436 - DNA, 992 bp, Homo sapiens
  chr20:37356366-37357358
  hyper
cgtggtggtgagtggcaacctcatgtacaacagcttcccggggctgcccgtgtcgcagaagtcctggtccattatcgccacggccgtgctgctgccttgcgccttccttaagaacctcaaggccgtgtccaagttcagtctgctgtgcactctggcccacttcgtcatcaatatcctggtcatagcctactgtctatcgcgggcgcgcgactgggcctgggagaaggtcaagttctacatcgacgtcaagaagttccccatctccattggcatcatcgtgttcagctacacgtctcagatcttcctgccttcgctggagggcaatatgcagcagcccagcgagttccactgcatgatgaactggacgcacatcgcagcctgcgtgctcaagggcctcttcgcgctcgtcgcctacctcacctgggccgacgagaccaaggaggtcatcacggataacctgcccggctccatccgcgccgtggtcaacatctttctggtggccaaggcgctgttgtcctatcctctgccattctttgccgctgtcgaggtgctggagaagtcgctcttccaggaaggcagccgcgcctttttcccggcctgctacagcggcgacgggcgcctgaagtcctgggggctgacgctgcgctgcgcgctcgtcgtcttcacgctgctcatggccatttatgtgccgcacttcgcgctgctcatgggcctcaccggcagcctcacgggcgccggcctctgtttcttgctgcccagcctctttcacctgcgcctgctctggcgcaagctgctgtggcaccaagtcttcttcgacgtcgccatcttcgtcatcggcggcatctgcagcgtgtccggcttcgtgcactccctcgagggcctcatcgaagcctaccgaaccaacgcggaggactagggcgcaagggcgagcccccgccgcgcttctgcgctctctcccttctcccctcaccccgcccccaccagcccagtgc

SEQ ID NO: 34437 - DNA, 215 bp, Homo sapiens; identical to SEQ ID NO: 31229
  chr20:43976984-43977199
  binary

SEQ ID NO: 34438 - DNA, 928 bp, Homo sapiens
  chr20:44098777-44099705
  binary
cgagacgctcagctgtgcggcgtcccctagggctgagatctgagggccccgacgccaagggttagggagctctcgtactcccaggggtcagggactcctggtctggaagaaggagtctctgggggctgtaaggggactcctagggccagagactgagaattccttggggttaaggtttggagcaggaggtgggcatcctctggggctggcgctacgccccaccctcgactgtcccgggcctcccctcccaggcacaggagcagagaagactggcgtgtgccccgagctccaggctgaccagaactgcacgcaagagtgcgtctcggacagcgaatgcgccgacaacctcaagtgctgcagcgcgggctgtgccaccttctgctctctgcccaatggtaaccccacggcggccgagcgggaacggggcggggccgcgctgggctgggaggaggtgggagggcccgggttccgggaacaggggcgcccccggacccggggacccccgggaaagtcaaggcggttgaaaccagatccgtcagtcctctccctcgcacggcccaggggtagacaaaggcgtcgttgaaacgcagccaagggggggtccccacccctagctgggattcgagtctctggtgcatgacgggcttccgggcacgcacagccgggacattgttccccgcggcctggggacccggggccgcagtttccttctcgaaccggccgaagcctgccctgcgggaaagcccggagcctggggcgctcacctctcctcttggagtccctccctgggggcctcccccagccctggggaaagactgggagagcctggcctggcaagattttccccaattcctctgtccaggcggaaaggaactttacagatttaggaaaatgccccgctcatcttaaagatgtgtaagggagcatc

SEQ ID NO: 34439 - DNA, 588 bp, Homo sapiens
  chr20:44879699-44880287
  hyper
cgtgcccgtgtactcctctaccacgaagaactggttccacacccagccgcgtttgacgcggccggctcccagcgcgccgtcctgccgagctccgggcgccgacggcgagggtgtgcccgctgcccacaggcgccccagcagcgtcggcggcggcggcagcagcagcagcagcagtagcgcgggggacagcgcgactcccgcccggagccccctaccttcgggcctcggcctcatccttggcctgcgcggggctggggcccaggagcatggacgagaggcaccagggcgccgctgcttggtcgcacaacgatgcggcgccgtgtcacatggtggcctcagcgcggccgccgggatgtcgcccccgacggggcacccggacgggcccgcggccctgaacgccgcccagccgcgggggtacccggctggagggggagggggcgcggccgcatccggggcatggacagcccccggggtgcccgcccgcgcccccgtcgccgcgtcgcgtgcggatcaccaggcagcacctggacagctccagagtcggggaagcgccatggttcctgcgcagaaaggatgcgggttggggcc

SEQ ID NO: 34440 - DNA, 115 bp, Homo sapiens
  chr20:49435030-49435145
  hyper
cggccatcttgatctcgtccttccctcgagatggtttttattccgcagaggagccaggagtggaccacaaggtggcactctcgggcaccgatgcagggagccgttcagcggggac

SEQ ID NO: 34441 - DNA, 814 bp, Homo sapiens
  chr20:5297005-5297819
  binary
cgcatatctcgagagtggcgggaggcaaagcagccggaatgcccgagaaaaaagtgggcgtcagaggcccttgtcctagcgactcccccaccgcaccgactgagtcccgggactgcagggatctaagcccttacctgtctcggcgcctcctttctgtgcgctctgctgctccggaagccggatcgagagtcacagtgtggttgggcgcaggcgggccgctcggttttcacctcgaggacccggacttgcacttgcagagccgctgcgtgggggatgtccctcttttttcctcgccccggcgggctcctccggcgtgtcagggtctctgggttccagctggagttggcgctccggccccacagctctttccagcgtctcggacctgtgcgccccgccccgcgctggactccgccccggggtccccgcctgcctcctagtccaggccaagggtggatgcccagctcccccaccccaccgcgtgctctcgggctggtgcgtccagggcgcgggcaccgtagctccggccgcgctgacgcgagtccccggcagcgggggcagcctctcgcacggatttcagcgccttcgcatcccgtctgaatcggaccacacagtagccgggtttctaccgtgcgcttgggaacagtgagcaccgccctctgccgccagtcgtggcaccgcacccgggtcgcgcgcgcaggaggggagagtcctgtcttccggaggtgcccagtgccagcgtccgcgcccactagaaggtgaccctttcaaggaaagcccggctccgacgagtgcggtgtgggcctttggagatggc

SEQ ID NO: 34442 - DNA, 474 bp, Homo sapiens
  chr20:58514041-58514515
  binary
cgcagcttaggtgtggaggctccaggtggccggtccccgcgcggctcagatgaagtggatccagctctcttcgcactccccgcgaggcatgtgcagcgcgtggttgcgacatgtgaggctgtagtctcggtggtcgttgttgtcccagtactcggcacccgccacttggtagcgcaccgcgaagtgcacgcgggagccgagctccagcaggaagggcggtactggaaagccgaaggtgaaaacgtcctccgtgccctcggggcctgcgggcccgcgccaccgcgccaccgcctcgtgggtactgcgccagcccgagaaagtgtagcgcacagccacctgcttctcgaaggccacgttgcacacgcgcaccgtaccgctgatgccaaggtccgagcaagtgacacgctccaggcacacgagctgccgctgcaggcgctcgccaaagtcggcggcctcgacgggcggcgggaaatc

SEQ ID NO: 34443 - DNA, 408 bp, Homo sapiens
  chr20:60495300-60495708
  hypo
cgtggtgtcacagtgattgcatggaagcgtgtcatgattgtgtggaagcatggtatcgtgattgtgtggaagcgtggtgtgattgtgtggaagcgtggtgtcatagtgattgcatggaagcgtgtcgtgattggaagcgtggtgtcgcggtgattgtgtggaagtgtggtgtgattgcgtggaagcgtgtcttggtgattgcatggaaatgtgtgattgcatggaagcgcagtgtcacggtgattgtgtggaagcgtgtcatggtgattatgtggaagtgtggtgtcgtgatgattgcatggaagcaccgtgtcatggtgattgtgtggaaatgtggtgtgattgcgtggaagcgtggtgtcacagtgattgcatggaagtgtggtgtcacagtgattgcatggaagc

SEQ ID NO: 34444 - DNA, 33 bp, Homo sapiens; identical to SEQ ID NO: 31236
  chr20:60639846-60639879
  hyper

SEQ ID NO: 34445 - DNA, 252 bp, Homo sapiens; identical to SEQ ID NO: 31237
  chr20:60912922-60913174
  hypo

SEQ ID NO: 34446 - DNA, 351 bp, Homo sapiens
  chr20:61013047-61013398
  hypo
cgactgcccggggctcagcgggcaggcagggagatgcctcaggactcacgggtgaggggtgttgggcgggggccatatgggcttgtgagcattgctagctgccgggccctggccagctgcccgcctcagagctacagctggcgccggggagctggcagctgagtgccatccttccaaagacgtggtgctccagggcgcatggcccgtgaccaccaccggggtgtggagacacctgaatggagtcctcactgccggcccggcctgcgctgcctgctctcggcctccctgtgtgtcgcgtgatgttgtgtgccagggttgggcggtggctgtgtgaggcctgtgaggacacac

SEQ ID NO: 34447 - DNA, 290 bp, Homo sapiens
  chr20:61330805-61331095
  hypo
cgcccagcctctggtgttgtgtgtcagcaccccgagtggaccgggacaggctcccaagtggactgagacaggctcccgagtggaccgggacaggctcccgagtggactggagacaggctcccaagtggaccgggaaaggctcccgagtggaccgggacaggctcccgagtggaccgggacaggctccctctctcttgctgctgggatgtctccccgggagcttgcgtctctcgccaccctcacctcccagccagagggaagccaggaagccagggagatgcggcctgacc

SEQ ID NO: 34448 - DNA, 218 bp, Homo sapiens
  chr20:62028683-62028901
  hypo
cgtgaatgacgctgctgcctacctgggtgtgcacgtctcggccagaccccgcgttcaggtgttgggggcctgtgccccgacgtggggttgctgggtcgtctggtaattttatgcggaatgtttggaggagccgctgcctgtgtgttctctgcagcggctgcgccatgtcacctccccatcagcagcgctgggctcccgcgtctgcacgcgctcaccac

SEQ ID NO: 34449 - DNA, 343 bp, Homo sapiens
  chr20:62204139-62204482
  hypo
cgcgactgcgggcaaaggtgcaccggtttcggtggcgccggcagccgagcccagggctgtagtagtggcagacttggtagcacaggggccttgggaaggtgggccggcagcccaccacgcgccagaccttgctcttggtggcctgcttaaagcgggccagcaggatctcgcgggagcagtcatgctccaccctacggaggacgtaggtgctttcattgagccgctgggtgcagcgggagcagcccagacacaggtccaccagggcacacagccgggccagggacggccctctggtggccgcggggctgttgggcagcagggtggaccctggaggcgccacctc

SEQ ID NO: 34450 - DNA, 390 bp, Homo sapiens; identical to SEQ ID NO: 31244
  chr20:62273399-62273789
  binary

SEQ ID NO: 34451 - DNA, 103 bp, Homo sapiens; identical to SEQ ID NO: 31245
  chr20:62310122-62310225
  hypo

SEQ ID NO: 34452 - DNA, 424 bp, Homo sapiens
  chr20:62513518-62513942
  hypo
cgctcgttccccacagacgtggttgagcttgcattttctcccctcagcacagtctcatttgggaagaggaaagggaaacttgcacgcatgggccggtcagggcactgagaggcctttctgctctggcactgcctgccaggcgtgcacctcagggggcccgtccgctctagcaggcaaatggggcgtgttctctgtagtcagaggggctgtgagaagacaggaaagcgagcttagtgggtatcaggcaagggggtgaaattgggttgtgagatgagaaagcagcgtcattgcagggctggggggccgagactcggcagggtcgccgagagctcagtgagcgagcaatgcacaggcggctcctcgccgcaggggcctctgggggccgaggggctctgggcctgcaccccctctgtagacacctggc

SEQ ID NO: 34453 - DNA, 98 bp, Homo sapiens; identical to SEQ ID NO: 31248
  chr20:62581888-62581986
  hypo

SEQ ID NO: 34454 - DNA, 171 bp, Homo sapiens
  chr20:62839587-62839758
  hypo
cgctcggatgatgacaaggacgaggacacccactcccggaagtcaacagtcactgacgagtcggagatgcaggacatgatgacccggggaaacctgggcctcctggagcaggccatcgccctgaaggctgaacaggtgcgcacagtctgcgagccgggctgcccgcctgcc

SEQ ID NO: 34455 - DNA, 367 bp, Homo sapiens
  chr20:62863342-62863709
  hypo
cggaagggccagttcttccctgaggctccaggacctcagcggccctccctgcctcactcagaagccctttaacggctctgagttgggctccccttgtgtctggcttgagagagtctccaggcttctcctcccaacccttcgcccctgtactcaccccggcctctctgtacccaggtgcccagttccaggctgtgtggggctcggtcacatcagcgggaaatacgcctctcacaggagcgcatccggctgcccactggccgcccgcaggcagaaggaagggtccctcaatggctcgtcattctcctggaagtccctgaagaatgaaggaccgacctgccccaccccgggctgtgacggctctggccac

SEQ ID NO: 34456 - DNA, 881 bp, Homo sapiens; identical to SEQ ID NO: 31252
  chr21:36163875-36164756
  binary

SEQ ID NO: 34457 - DNA, 246 bp, Homo sapiens; identical to SEQ ID NO: 31253
  chr21:37582287-37582533
  hypo

SEQ ID NO: 34458 - DNA, 338 bp, Homo sapiens; identical to SEQ ID NO: 30091
  chr21:40506192-40506530
  hypo

SEQ ID NO: 34459 - DNA, 235 bp, Homo sapiens
  chr21:42613666-42613901
  hypo
cgcgtggcgtctacactgggtgacccatgtctacactgtgagtcctaagcgggtgcccctctctgtcgccctcccgcagccatcaagttctctggagaccttcttcgactccctggtgacacaagcaaacatccccaacgttttctccatgcagatgtgtggagccggcttgcccgttgctggatctgggaccaacggaggtagtcttgtgggtatcttttagtcttaaaggggc

SEQ ID NO: 34460 - DNA, 270 bp, Homo sapiens; identical to SEQ ID NO: 33370
  chr21:42617817-42618087
  hypo

SEQ ID NO: 34461 - DNA, 824 bp, Homo sapiens; identical to SEQ ID NO: 30098
  chr21:43160967-43161791
  hypo

SEQ ID NO: 34462 - DNA, 283 bp, Homo sapiens; identical to SEQ ID NO: 30099
  chr21:43161857-43162140
  hypo

SEQ ID NO: 34463 - DNA, 413 bp, Homo sapiens
  chr21:43725841-43726254
  hypo
cgcccacactccatgcagctctctttccctggctcggaatcgctgcaggcgccacagaccagacgcgcactgttccccactcctgcttatcggccgcgcggcatccccttgtcgcagcactccagcatccatgcagccgcgcggcaccccgtcttcggagcactccagaatccatgcagagcgcagcaccccacatccagagcgctccagaatccatgaagcacgcggcaccccctcgtcagagtgctccagaatccatgaagtgcgcagcaccccttaatcggagcgctctagaacccgtgcagcgagcagcaccccacacccggagcgctccagaatccatgaagccagcagcaccccacacccggagtgctccagaatccacgcagcacgtggcatctcctcgtcatagc

SEQ ID NO: 34464 - DNA, 114 bp, Homo sapiens; identical to SEQ ID NO: 31262
  chr21:44110034-44110148
  hypo

SEQ ID NO: 34465 - DNA, 445 bp, Homo sapiens; identical to SEQ ID NO: 31263
  chr21:45114158-45114603
  hypo

SEQ ID NO: 34466 - DNA, 105 bp, Homo sapiens; identical to SEQ ID NO: 31264
  chr21:45499846-45499951
  hypo

SEQ ID NO: 34467 - DNA, 98 bp, Homo sapiens; identical to SEQ ID NO: 31265
  chr21:45617247-45617345
  hypo

SEQ ID NO: 34468 - DNA, 236 bp, Homo sapiens; identical to SEQ ID NO: 29041
  chr21:45628864-45629100
  hypo

SEQ ID NO: 34469 - DNA, 226 bp, Homo sapiens; identical to SEQ ID NO: 31267
  chr21:45834132-45834358
  hypo

SEQ ID NO: 34470 - DNA, 285 bp, Homo sapiens; identical to SEQ ID NO: 31268
  chr21:46155048-46155333
  hypo

SEQ ID NO: 34471 - DNA, 85 bp, Homo sapiens
  chr21:46315941-46316026
  hypo
cgcctgcggtgtgagtgctcccgcctgcggtgtgagtgatcccgcctgcagtgtgagtgatcctgcctgcggtgtgactgctccc

SEQ ID NO: 34472 - DNA, 98 bp, Homo sapiens; identical to SEQ ID NO: 31270
  chr21:46686353-46686451
  binary

SEQ ID NO: 34473 - DNA, 219 bp, Homo sapiens
  chr21:46706806-46707025
  hyper
cggccgcgaagctcgtcttggccctgagaattcactgcggagcgcccgcccggcactgactcccggctccgcacacccaggcctggacccgtgtcacttgcaggggcctccggagccagcccacgctcagcctgagcaacccggcccccttcctgggctcccgaggctgcgccccgggcctcgcagacgaccccgcctgcagacccgggccgcagtgac

SEQ ID NO: 34474 - DNA, 632 bp, Homo sapiens
  chr21:46935349-46935981
  hypo
cgcggggcacagtgcagggacagcatggccaggcagctgccctgagtgtcgccagcacgctgtggccaccgccagagtgcggcacagggcagggggaatcctagggggcctgctagcaggataagcggaggcccccattgctaaggcaggcggccctcgaggcaggggtcgtggggatgcactgagggccgcctgcaaagttaccacaggggcgcccgagagtcactggttcacattctgaacaccgtcgcttggaagacactgcaaacccagcttgctgacaccaggaggatggacagccagctggggacaagtctcatctgcagcctcagggcctgaggcttgggcggagcacagagtgcagggggaaggggttgtcactgggctcaggaattcagctgcctgcggggccggggcctgggccaggtatgggtcgctctgtctctgctccagggaggctggccccacagcccccaggctgtcttctggggaaagcggcgggctctgggctggctgcaggcctccgaggcccttgtcctgcacgctcagtgcctgtgctgccttctcctccgcggcactcctcaggccctgggccgggggctgccgcgggtggtggccccgctggcagtgcc

SEQ ID NO: 34475 - DNA, 580 bp, Homo sapiens; identical to SEQ ID NO: 33432
  chr21:47413791-47414371
  hypo

SEQ ID NO: 34476 - DNA, 262 bp, Homo sapiens
  chr21:47421135-47421397
  hypo
cgtgctctgctgacaccgcccccgcctgcagaatgcaagtgcggccccatcgacctcctgttcgtgctggacagctcagagagcattggcctgcagaacttcgagattgccaaggacttcgtcgtcaaggtcatcgaccggctgagccgggacgagctggtcaaggtgaggcctcgccccgcccggctttctcaagcccaggtgcaccccgaccctgccggccgcccctgcccgcgccagacctcagcctcccgaggccacc

SEQ ID NO: 34477 - DNA, 258 bp, Homo sapiens
  chr21:47689571-47689829
  hypo
cgctgtggccactacgggcttgtggcaaggaatcctggcagcctccttggagccgctgccagaatgggcagcagagtgtgtgcgaggtgaggtggcgctctgtgcggtgggccgcggtcctggtcacattgcactgaacggaatcatgcagggcctagaacagcaggtgctacaggggctgctctgtcctcatccccaagttccgtggaagtggaacaaaataaccgactggaaaccccaagacacagtttactctgc

SEQ ID NO: 34478 - DNA, 67 bp, Homo sapiens; identical to SEQ ID NO: 31276
  chr21:47918529-47918596
  hypo

SEQ ID NO: 34479 - DNA, 361 bp, Homo sapiens
  chr22:18265358-18265719
  hypo
cgatctgaccccgtggcatccttcctttcctacaaactgcactgagacccaggtgtcatcgtgaagttcatgccagccagaggagccactgtggcgtttccggccataggcctgggcaggagccgctcccaggcgtgccgtgggcagggccgggtcagccttcagggaagagatgcctgtatgggaccaactcaggcagccacagagggatggcccagcaccccacaaaacccaaagtgctcagcgtctaggatctgtttacggggcagagaagtggatgttcttttcctggttcaaaggtagaaacaggcttggagagccgcacccggcatcagccagccaggcagacgcctggtctagc

SEQ ID NO: 34480 - DNA, 206 bp, Homo sapiens; identical to SEQ ID NO: 31279
  chr22:19799727-19799933
  hypo

SEQ ID NO: 34481 - DNA, 187 bp, Homo sapiens; identical to SEQ ID NO: 31280
  chr22:21011052-21011239
  hypo

SEQ ID NO: 34482 - DNA, 416 bp, Homo sapiens
  chr22:22057979-22058395
  hypo
cgcgtttcagaaactcccggcggggggatggtgggttctttcaggacccctaaagacccaggtgattctacacagggcactgtgtaggtgccatccaggccgtcccagggcccgtgccgctccccccgggctgaaccagggtactcacacggaattgaagaggtaggcgcgtccctggctcccctgaaaggactgaaagaagaaggtcccgtgagattggctgcgagtgctttctggaacgaagcggtgctgcccagaaccaggggagtccagccccgcggctgttagctgcgccgggacgcgtcaccgggagcagacaccggcgtcccccctccagaactccacttctaataacagccacttaacggagctgcaagctgtttttcattgtagacaggagtggctgattctgctgc

SEQ ID NO: 34483 - DNA, 279 bp, Homo sapiens; identical to SEQ ID NO: 31282
  chr22:22068426-22068705
  hypo

SEQ ID NO: 34484 - DNA, 354 bp, Homo sapiens; identical to SEQ ID NO: 31283
  chr22:22292773-22293127
  binary

SEQ ID NO: 34485 - DNA, 693 bp, Homo sapiens
  chr22:23800945-23801638
  hypo
cgccctgtggctcctggggagggttcccagagggctgccgggcgaagggagtcctttccaaaacggtttcctgagctctgatgcacacacatgcagctcacccccaagtctagcgttccattagtctaccgttccgttcttcccagcacattcggtgcgcagccgcgaccagtctaaccgtggcacctttccaccggccctgagccctggcgtgcccctccacgacatcccctgggcacggagttgtgtcgacaggtctctgtgactggctgggcatgttttcggggtttgcccgcggggcagcgtgtctcagagtttggctgtacgaagcggtgttgacgggtaaacccggttttgtctctccctccggcggttgagggctggttccgcgttccatctgttagtgatgggatcgtgttgccgtggacgtccgtgccgaggtctgtgtgtggacagcgctcagaccccctggctgcgcgcccgggcgtgtgctgggcccatggactctgcgttcagctctttgaggagccgccggctgtttgcagtggccgcatcacacacgctcccgccagcgacgcggagggtctgattcccctcgacccagcagctcatggtgtttgctctcagtggccgtcggcgcgaggcgggtccgtgtctcgctcagttgaggttcacgtttccccggtgcccggc

SEQ ID NO: 34486 - DNA, 180 bp, Homo sapiens; identical to SEQ ID NO: 31285
  chr22:24205104-24205284
  hypo

SEQ ID NO: 34487 - DNA, 646 bp, Homo sapiens
  chr22:24819901-24820547
  binary
cgggagccggcgtgcgagcggcaggtcagccggggtgctaggtctggcgtgcggggtcctgggtgccgggtccggggtgcggggtgccgggggtccggggctggtggccgggcggcgtggggccgtcgggggtgcggggccgggaggactgggaggctggggttctgctcccctcagggttcctttcccgccgccccgagaccagttccccggcgcggggtccgagtcctgccccgcggcggctgccggcactgcctgtgaagggcccaggcacagtcacgtcccaggcgcagttgcggcgccgcgtgcgggaccctccgagctgtcccaaactgcaccggaaggcgcgcaggggtaggcggggagggaaggcaagtgcggcggccggcgcggcgcggggtgcggagccgcaggtagcgggcggggagcgtccgtccgtcagtccgtccgtccgtccatgcgccgcagaccggccccgcgcgctcgcatgaaccttcgcgagctcctccagcagggatggaccgggggcgcagaggcgcttcctgaggggtggcgggccgggccccggggcgagggagattccccaggtggaggagccgggcggagaccggttccccgggaaggtgaggcgcgggcagagataccc

SEQ ID NO: 34488 - DNA, 305 bp, Homo sapiens; identical to SEQ ID NO: 30171
  chr22:25561932-25562237
  hypo

SEQ ID NO: 34489 - DNA, 194 bp, Homo sapiens
  chr22:29875919-29876113
  hyper
cgaacacactcgcaggctcttccgacgcgcacccgggggtcctcactggcccactccgggagtcctctgcccgcttccccgacctcgagggtctcctctgacgcagcgtcgattccccttccctcctcggtcccctgccccgcccctctcactgcggcggagccggtcggccggggggccgcaggggaggaggc

SEQ ID NO: 34490 - DNA, 99 bp, Homo sapiens; identical to SEQ ID NO: 30176
  chr22:31260817-31260916
  hypo

SEQ ID NO: 34491 - DNA, 163 bp, Homo sapiens; identical to SEQ ID NO: 31290
  chr22:31475566-31475729
  hypo

SEQ ID NO: 34492 - DNA, 345 bp, Homo sapiens; identical to SEQ ID NO: 31291
  chr22:31489493-31489838
  hypo

SEQ ID NO: 34493 - DNA, 201 bp, Homo sapiens
  chr22:31494664-31494865
  hypo
cgaggaccaggccagcccacgggccggcagcctggcggcgctcgagaaacggcaggccgagaagaagaaagagctgatgaaggcgcagagtctgcccaagacctcagcctcccaggcgcgcaaggccatgattgagaagctggagaaggagggcgcggccgggtgagctgcagaagtgggctgggcagtggggggcggggc

SEQ ID NO: 34494 - DNA, 127 bp, Homo sapiens; identical to SEQ ID NO: 31294
  chr22:36519474-36519601
  hypo

SEQ ID NO: 34495 - DNA, 800 bp, Homo sapiens; identical to SEQ ID NO: 31295
  chr22:38379141-38379941
  hypo

SEQ ID NO: 34496 - DNA, 230 bp, Homo sapiens; identical to SEQ ID NO: 31296
  chr22:38381994-38382224
  hypo

SEQ ID NO: 34497 - DNA, 767 bp, Homo sapiens
  chr22:38434385-38435152
  hypo
cgggcccaggcaggtggaagccatggctctggccgggtcacagggcggctggggtttgacctggcggccatgatgggctctggacccaggagccacccgggcacaggatgggacgggttgagagattggtcgtccaggcgttgagtgtgccctcgctcctccccaccttccgccgtggccttgagccccttgcgcccgcgcccatggggttaaatctctccctgtctctctctgctccaagttgttttccaagtgaggcagagaatggttctcttgttaccaacatggcttctgggcattgggtaatgcgctccctcttctcccgcagcgccacaaagggaccttttgttcccctccctgcccctctcgctggctcttcccggccccccacccacccaaactccctcctccccccgccggcgcccgcaccccggggctgcgcgctgaccgtggcggccgcggcgccctccctctcccagcgcctgcactggcggccgccatcttgcgagcggccctcagggcggcctgggctttcccagggttctcggggccggggcagtcgtagggggcggctggggctccacaggacgttcgtgacccaccttgcgccccccagggagtggcaggaccctcccgtccccagcctccgcgccaggcctcgtccctgcatgggacaagaggcagccctccgccatttcccgcggcccttgcctcccgggagcggctcccctctgacgactgagtggactgcgcttgagggggccgcc

SEQ ID NO: 34498 - DNA, 107 bp, Homo sapiens
  chr22:38687274-38687381
  hypo
cgggaattcgggctggcaggcggggcgggccgtggcacctgctgtcttgggaaacacaggtcaatacatccacacacacacacacacacacacacgcaggggacgcc

SEQ ID NO: 34499 - DNA, 524 bp, Homo sapiens
  chr22:38694460-38694984
  hypo
cggtgtaggcagcaatcagggcagcagggggcgccgccagcaccacccatgccctgctgcgggcacccaggagggaccccaggtgaagccagatcctccttgttccgacgggagacagcgccctgcctggccctgctgcccatggtggcacaagctgtcagcacggatgaggctggagggctctgggaccccagtgaggtcaaccacactgtccagctcgtacctcccgtctgtcgggagcccctcccgccaccagctcactctggccctctgagtcagggccttccccatccagtcccccaagcccgccttggcctccaggtgactcacgaatttcagcatgttccagtcaaagacgtagtcataggagaagccctgccggtggaagaggttgcggaagagctgacgtaggtaagagtagtcgggcttgtcgtcaaaccgcagggagcggcagaagttgaggtatgttgagaattcggctggagggtgttgcagaggatagagaaggccactgtgaggcccac

SEQ ID NO: 34500 - DNA, 219 bp, Homo sapiens; identical to SEQ ID NO: 31301
  chr22:39756401-39756620
  hypo

SEQ ID NO: 34501 - DNA, 53 bp, Homo sapiens; identical to SEQ ID NO: 31302
  chr22:40061917-40061970
  hypo

SEQ ID NO: 34502 - DNA, 511 bp, Homo sapiens
  chr22:40074986-40075497
  hypo
cggggccatctcgggggttgaatctcggtcttgctgcctccgagcgtggccctgggctggcctctgcctccagcagcctctgggatgtctccgtcctcatcctcaccgccctccctgccacgcaggacacgctgcgggactgcacccacgacgagcgcagctgcctgagcagcctgcagtttgtgtcgccgctgtacttcgtgagcttcgtgctcaccgcgcagttcgtgctcatcaacgtggtggtggctgtgctcatgaagcacctggacgacagcaacaaggaggcgcaggaggacgccgagatggatgccgagctcgagctggagatggcccatggcctgggccctggcccgaggctgcctaccggctccccgggcgcccctggccgagggccgggaggggcgggcggcgggggcgacaccgagggcggcttgtgccggcgctgctactcgcctgcccaggtgggcaggggctggagaggtgtgagggtcgccagagggggggcacc

SEQ ID NO: 34503 - DNA, 553 bp, Homo sapiens
  chr22:41634408-41634961
  hypo
cgggcagagcctggagctcgttgtggtgtaggctgagccgtctcagggcgggcaggccagccagggcctcgggggccagcacgctgagcgcgttgtgcgacagccgcagccagcggacgcgcagtagcccctggaaggccatggcgggcaggtaaaccagggcgttgtgggccaggtttagcgtggccagcgcacccagtgccccgaacgtccccggccgcagctcctccagtgcgttcccctccagctccagccgccgcaacgagcccagcccgtccagcgcctcctggggcagctcacgcaggtggttggaggccaggttgagcaggagcaggcggcccaggccacggaaggcgccctcggccaccagctccacctcgcagtggcgcaggtccaggtgtgtgaggtgaggcacgccctggaaggcggctgcggggatcaccttcagcaaattgccctgcaggtccagccgctgggtcagctggggacagcgaggagaaagtggggctgagccaggcagggaccccgcctttgcaagtgctgcttcttcccc

SEQ ID NO: 34504 - DNA, 189 bp, Homo sapiens
  chr22:45680605-45680794
  hyper
cgctgtggaagggctgccctggcctgggcacacagtaggcgctttgatgcgggctggagaaggtcctgcccggtgggattgcgccctggggcaccgcgcacgggtcggggaagcccggggcagggccgtatgcaaatagcgcgcgaggaggccgcggattggccagcccaggcgggggcggggcgcgcc

SEQ ID NO: 34505 - DNA, 710 bp, Homo sapiens; identical to SEQ ID NO: 31306
  chr22:46815686-46816396
  hypo

SEQ ID NO: 34506 - DNA, 209 bp, Homo sapiens; identical to SEQ ID NO: 31307
  chr22:47075172-47075381
  hypo

SEQ ID NO: 34507 - DNA, 224 bp, Homo sapiens
  chr22:47199296-47199520
  hyper
cggcggttttctctcctgtgggccttgttggagatctcgcttctgctgtgggagctggggcccggcccccaggagctgaggcggggagggcggttggttcttgcgacccggccgtcagcgttcagcgtcgccctctagtggccaggtgctgtctttgcagcctgggcttcatgaccacagcagggcacgttggccttgtgggtggggggtgcttacacttgcgc

SEQ ID NO: 34508 - DNA, 236 bp, Homo sapiens; identical to SEQ ID NO: 31309
  chr22:48996174-48996410
  hypo

SEQ ID NO: 34509 - DNA, 824 bp, Homo sapiens
  chr22:49138251-49139075
  hypo
cgggtggagcgggtggtgctgtgtggcggagctggcggcgcagtggagcgggcgttgtggtggacccggtggcgtggcagaccaggcgacgtggtggacccggccgcatggtggaccaggcaacgtggtagactgggcagcgtgatggaccaggcgacatggtggaccgggccgcatggtggaccaggcaacgtggtagaccgggccgcatggtggaccaggcaacgtggtagaccgggcagtgtgatggaccaggcgacgtggtgggccgggtggtgtggtgaagccggcagcacagtggagcaggcattatggtggactgggcagcatggtgtattagaagaggagagatggcctggggtgctcagcggggctgagtccccagctgggagctcaggtgcgatgaagcccaagggactgacggtgtgaggagggccctctgctgcctccatgcagcccacacgcggggcccccacagtgcggacatgttggggcaatgctgcctggccccgccctcagcccagccctgggacgcaggctcagcagcccccggattccagtcaacatccccaggactcactcgggtcaggcacagtgtccaagctgtgtgagtctccgggagccgctggaacaaaatgccacacacccggtggcttcaaaccatgaaacccgttctcactgttctgggtccagacgtctgtggtcacagtgtctgctgggccgtgctcccgcaggaggcagcagcagagggtcctccctgcctcctcctgccattcttccggttcgggggtccagacgtctgtggtcacggtgtctgctgggcc

SEQ ID NO: 34510 - DNA, 178 bp, Homo sapiens; identical to SEQ ID NO: 31312
  chr22:49698417-49698595
  hypo

SEQ ID NO: 34511 - DNA, 171 bp, Homo sapiens; identical to SEQ ID NO: 31313
  chr22:49698626-49698797
  hypo

SEQ ID NO: 34512 - DNA, 298 bp, Homo sapiens; identical to SEQ ID NO: 31314
  chr22:49729101-49729399
  hypo

SEQ ID NO: 34513 - DNA, 1272 bp, Homo sapiens; identical to SEQ ID NO: 31315
  chr22:50718718-50719990
  hypo

SEQ ID NO: 34514 - DNA, 828 bp, Homo sapiens
  chr22:50899033-50899861
  hypo
cgcaaaggtggccctgatgtccggcgggtaccgcagcttatgcagctgcttacggaagagctcggcgctgtcagaccccacctcctcgtcaaaggccattttcagcagctgtgtcagtaaaagcagcccttaggggtgtgggtggccccccagcccctcccccaactctgacactgccaggctccccttcccctcgcagccatgacagagagagaagcaggccccaggcaaaggcctgtatctgtgtcacacgaaggcaagcgcttgtgtaaactcgaaatctcagtggctgtgagctgaggcctgggtttgcaaggcacacccaagacacggacttgagggccggcgccccaaggaaaggacaaggacccaaagaccgcacatcaaacagtggacatcaactcaagagccacagtgagggccccagacatgcaagcgtaacaacagggccactgctggagactggcctaaaaatggttcatacaagaaagaccggtttgcaggagaaagaccagggcgggggatgagagccccacccgcgcaccgcgccccacctggaatgtgcaggagcgcagctggagcccgtcctgcaggagctggtccacaggggtctggacgctgatgcgcttctccttggtcagcgcagccaccgggaaggagcggaccaccacctgctccccaacttaggacaggccaggcagagtcagaagcaaggaaggtaagggggggggggtcccagaatctcagggtaccacagttatggggaatcccaagtgggtggggaaggagcagacaaaggcccgtttcccacgggcacccagaaccccc

SEQ ID NO: 34515 - DNA, 235 bp, Homo sapiens; identical to SEQ ID NO: 31317
  chr3:114070275-114070510
  hypo

SEQ ID NO: 34516 - DNA, 216 bp, Homo sapiens; identical to SEQ ID NO: 31318
  chr3:11578015-11578231
  hypo

SEQ ID NO: 34517 - DNA, 546 bp, Homo sapiens; identical to SEQ ID NO: 31319
  chr3:11655438-11655984
  hypo

SEQ ID NO: 34518 - DNA, 253 bp, Homo sapiens; identical to SEQ ID NO: 31320
  chr3:121741110-121741363
  hyper

SEQ ID NO: 34519 - DNA, 970 bp, Homo sapiens
  chr3:121902674-121903644
  hyper
cgcgatttgtatttattttactgtgaatctctggccttatatcagaaaaaaaaaaattgtgccaccctcggcacagagaacgttggtggcgtcgtaagcgccctaagcttctttccatcgccaaggagtaggggtcagggaagaggacagcgggaacaggatttgagagccgggaacccctggctcggcacgggagagggcaggagaggacctaagcgcggggctcgccgtctgctggggacccgagccggcctgtggccctcggggaaccgaagacgcgccctcagcgaccctgaagagtcagctaagctctctgcgggctaaggagacggtgaaggaaccgggactaactggggtaggggttagaaggcagcccgcgagtgggctacgaggggagctgggctcggcagttggggaccccgagggggcaagcgggcggggagcaggagaggggcggagctccggggccggggccggggccgcagcggccgcccagagggtctgcgggggctgctgtggccggacccgaaggcgggcgccgggagcgcagcgagccagacgcgcctctccaagaccgtgaccttggcatagggagcggggctgcgcgcagtcctgagatcagaccagagctcatcctcgtggagacccacggccgaggggccggagctgcctctgtgcgagggagccctggccgcggcgcaggtaggaccggggaacccaaggagggcgggaggaaagcgcccctggtgggggaggggccgtggcggggtctgggggccaagggctccgggccgaacgaggggcacacgccggagcagctccagcctgggagcattgggcgtgaacgtgggggaaagtagggaccagattacaggatcaaggctttccccggctcagaactggattgttcagtgcccctagaaggggcagcgggtcgcccacgcgaatgaacgggagcgcgcaccaaaac

SEQ ID NO: 34520 - DNA, 61 bp, Homo sapiens; identical to SEQ ID NO: 31322
  chr3:128004552-128004613
  hypo

SEQ ID NO: 34521 - DNA, 57 bp, Homo sapiens; identical to SEQ ID NO: 31323
  chr3:128713000-128713057
  hyper

SEQ ID NO: 34522 - DNA, 92 bp, Homo sapiens; identical to SEQ ID NO: 31324
  chr3:134080498-134080590
  hypo

SEQ ID NO: 34523 - DNA, 150 bp, Homo sapiens; identical to SEQ ID NO: 31325
  chr3:14386858-14387008
  hypo

SEQ ID NO: 34524 - DNA, 976 bp, Homo sapiens
  chr3:149374946-149375922
  hyper
cggcaggatcttcttccgccacgagctaggcttcggattcatgacagagttgaagagggcttcgaggtctgtgtctaggtcctgcgtgacgtggatcacttgctgcccaggcggcgggagcggagggggcgccgaggccggattcatcttctgcaaaaagaaggtcagatcagccttttatttaaagtcggaggaagtgggtaagagggttacagggtgagagggcgagatggtgggagaaagaatagagggaaaaggaaacgaggagacagataattgcccgcctggagatcccagacactcagcggtaagaccagcaggatgggggaggggtccctcctggcctcgagaattatgcaactttcttgaagcaaagaagttgcctggaggaggagaagatagggcgaggggtggagggaataactgcactcggggcttgctgaaccgcaggatggcaaaggaaaggtcgcacgattccaggacaggcagccccccgaaagaagttcagcccgagccaactccaccacgtctcgactccggaagcccgaggagcctggagccctggagtggtgccggatgagcgcgcgagctccagcgggcactacctgggcgggcagcgaagctgagcctgagcgcgcggcggccgccgtcccgcccgaacttgccgtcgggcctgggtcgctcgggtgagtcccgagattgcggagctggagccgaggcttggctgacaaatcccgacccgactctgtgcctggcagtctaagggcttcggctctcacatcccccgagctggcctaaggcgctagtgctgggcgaaaaggaggcgcaggagaagcagacagcgcggccgcagcagctcccggactgtcccataaacaaagtttggagcaaactcccacccccaggaaagaggcgggcccgaaagttgagctgttgaattatgtatgacctcctagtccctagccggccagccccc

SEQ ID NO: 34525 - DNA, 72 bp, Homo sapiens; identical to SEQ ID NO: 31327
  chr3:150848450-150848522
  hypo

SEQ ID NO: 34526 - DNA, 705 bp, Homo sapiens
  chr3:156533976-156534681
  hyper
cgacggctgtggttactcaaactgatctcatcgcaggtcgtcacgacacgcgcttcccctcgcctgcacgcggcgtggcgtgagaggggccctggcagccggcgcgcccacccctgatccttcgaggcccacgatgaagcccatcctacttgcaataacggccccgttctcattcttcaaaagacggctcccagacgtcaacaaagaatctaacctacacagcgccggccctcgctcctttcagcctcagcgagcgctgcccttcattaccccccagcgcacttctggacactgcgccgggtcgccggggtcagccgcccggccacgaaagtcgcccccagcgtgccccaggcgtcagtgcacgccgggctcccggctccaggcaggcggggtgaggcagctccgcgaaggccactcgctggcgaccccttcccgggtctcctagccctggccgggctgcccccgcgcccgcccccgccctcgaaatccaggcagtgcgggaggccgccttgctgctctctccgcccgcacagggccgcccgacggagcgggcagggagcaggcgccaaggaggccgagaggggcccaggggcgaggtcgactctcagcccgctgtccccttatcccacgtttcgcagcctgaggtgtttgttgtatatcgggaactgacacttttcggcgttaaaatgagggcgtcacctgctc

SEQ ID NO: 34527 - DNA, 554 bp, Homo sapiens
  chr3:160167477-160168031
  binary
cgcatccgtaaaggtccttagactcaccgcggggaggaagcggaccaggcaactccacagcacggaaacacagcgccacgagctccaggcggatgctgagagccgccccgagtccccgccctcctctgccccgaagggcttcaggtgcccagaccgggcggggcctcgcggagcctcgcagcgcaggcgcagtctgcaggcaacattcaactgcaaggcatcggccaatgggaactattgctgggctcgttcgaaagtaaacggtggacggcgcggcccgaggcaggtggcgggagtcagtttaaggctggcgcccagctttccgcgcctgcgtgctaggcgcaggccgcctctcggaagcttggcctcgcaggagcggctctctatcctgtggggagcttcggccagtgggcctcgtgagctggggtcccgcctggggaatccgcatggcaccggtggtctgggggagaggctgggcctggcgcgggacgaggcgaagcgccggtggccgacggcttctgaggaattatcttttacttggcgccacacggggc

SEQ ID NO: 34528 - DNA, 820 bp, Homo sapiens
  chr3:169539913-169540733
  hypo
cgtttaaagaacatcagggtcctctacctggataagaacaacctgaggagcctgtgcccggcgctggggctgctgagcagcctggagagcctggacctgagctacaaccccatcttctcctcctcccttgtcgttgtcagcttcctccacgccctgcgcgagctccggctctaccagaccgacctgaaggaaattcccgtcgtcatctttaaaaacctccaccatctcgagctgctcggactgaccggaaaccacctgaaatgtctgcccaaggaaatagtgaaccagaccaagctgagggagatctacctgaagcgaaaccagtttgaagttttcccccaggagctctgtgttctctacaccctggaaatcattgacctggacgagaacaaaataggtgccatcccagaagagatcggacacctgacggggctgcagaagttctatatggcttctaacaaccttcccgttctgcccgcgtccttgtgccagtgtagccaactgtcggtgctcgatttatcccacaacctcctccactccatcccgaagagcttcgccgagctcaggaagatgacggaaatcgggctgagcgggaaccgcctggagaaggtgccacgcctcatttgcaggtggacctcgctgcacctgctctacctgggaaacaccggcctgcacaggctgcggggctccttcaggtgcctggtcaacttgcgcttcctggacctaagccagaaccatctgcaccactgcccgctgcagatctgtgcactgaagaaccttgaagtcctgggactggatgacaataaaataggacaggtac

SEQ ID NO: 34529 - DNA, 75 bp, Homo sapiens; identical to SEQ ID NO: 31331
  chr3:176915778-176915853
  binary

SEQ ID NO: 34530 - DNA, 114 bp, Homo sapiens; identical to SEQ ID NO: 31332
  chr3:179391556-179391670
  hypo

SEQ ID NO: 34531 - DNA, 581 bp, Homo sapiens; identical to SEQ ID NO: 31333
  chr3:180546449-180547030
  hypo

SEQ ID NO: 34532 - DNA, 237 bp, Homo sapiens; identical to SEQ ID NO: 31334
  chr3:183209981-183210218
  hypo

SEQ ID NO: 34533 - DNA, 102 bp, Homo sapiens; identical to SEQ ID NO: 31335
  chr3:18462342-18462444
  hypo

SEQ ID NO: 34534 - DNA, 129 bp, Homo sapiens; identical to SEQ ID NO: 31336
  chr3:185365800-185365929
  hypo

SEQ ID NO: 34535 - DNA, 477 bp, Homo sapiens; identical to SEQ ID NO: 30190
  chr3:185374988-185375465
  hypo

SEQ ID NO: 34536 - DNA, 98 bp, Homo sapiens; identical to SEQ ID NO: 31338
  chr3:185441721-185441819
  hypo

SEQ ID NO: 34537 - DNA, 248 bp, Homo sapiens; identical to SEQ ID NO: 33458
  chr3:185445861-185446109
  hypo

SEQ ID NO: 34538 - DNA, 334 bp, Homo sapiens; identical to SEQ ID NO: 31340
  chr3:187443068-187443402
  hypo

SEQ ID NO: 34539 - DNA, 1430 bp, Homo sapiens
  chr3:187456733-187458163
  binary
cgtggttccgggagctcaaaccgaatggtgtttttaccgctgcctaacgctagagagagccctccatcaaggtttgaaaccgtcaacccctttctcgcccctcccctccttcccattgacctagtttggccagagcctcccgatttggagaatgccttccgcccttcccccctcctctccagccagagaggctacagaggctgttggattattggtaatctaataactccaataacccgctgaaaaatccaaagggaaatctgaaagtgtaaagcactgtttagggacaaggacaaggaattttaataaggctgcaactgccgtagtgaaccccgcatcaggggccctgccgtggggctcccggtctcagcagtgtttcagccaactagctgcacggctgcagacaccaccgtggtccggcggcagggggtgaggtcaaatcgcggagctgtttttattcttgggggaaaacactcttcgccctcttggctggggaacgggagggtgcaggagacgacagtaaataaaagcgaatttgataacgcgatggcctcgacagccgctttggataaccgaggtgttcggggacattgtgtcctgactttcatttctatcacgtttcctgccaacagtgctcttgcaagcctgcaagcttctaggaaatgcaataaaacagagggatgtgttttatcatcaagatctgaagaggagttgcagaagggacgttccccatacgctcagcgcgagacagccttccagaagggcccgaagacaatgccagcaaatcgcgtcccggagcagagatccctcggccgtcctggctggactgggctcagcctttgcaaaaaggctggcgggggaggggagaagcatgatctcctcaagcaaacaatgcctttaaaaatccgatctggaaagaagtcagccaaggtccttattcacgttaatgaagatggaaggcactaactgtccttggaaagcgatgagtcaaacttgaccgcgcttcaaactcgttcccagattcgtttccagtccgaacagaggcgcgtttctccgacgcggcctccgacggctcccgcagtgggaggggccgaactcgatccccgccgacccgggcgggggcgacggcgctgtctccccctgcagagcgcgcctgctgccgctaggggccgccagcatgcggacgcgcgtttgccatcttaagtcacgagctcggagaaagaaaactttacggaggaactgttgtggcacaaattctggcctatccacatgacccccaccccctcacacacacacacccggtttctcgccaggctactatgcagaggatgttaggaaggggaagagagcgatttcagaatcgaggctcgccctgcaagtctttggtccaggccttaacccccctcttaacacgcaaacccccgagctcc

SEQ ID NO: 34540 - DNA, 522 bp, Homo sapiens; identical to SEQ ID NO: 31343
  chr3:192635635-192636157
  binary

SEQ ID NO: 34541 - DNA, 223 bp, Homo sapiens
  chr3:193588113-193588336
  hypo
cgtttcacagatggggaaatggaggccgagacgtgggaatgctttatgccaggtcccgcatgaacagtggtagatctagaactcaggtgctacgctgtcggcctgctgttggtctgcggagctactatatagctgttgcgtgactcagggaacacctggggcgtgactgacaggtggagaagggtcaaggtggttggagcccaagcgtggataagacagcccc

SEQ ID NO: 34542 - DNA, 142 bp, Homo sapiens; identical to SEQ ID NO: 31344
  chr3:194061709-194061851
  hypo

SEQ ID NO: 34543 - DNA, 85 bp, Homo sapiens
  chr3:194374282-194374367
  hypo
cgacggagatggaaaggtgaacacagggaggagacaacgaaagcctttcagttcagtgccgtgacagacaaccatcgagggtggc

SEQ ID NO: 34544 - DNA, 1816 bp, Homo sapiens
  chr3:194407289-194409105
  hyper
cgcgcgtgtctcccccgcaccaaccttttttgcacactcgaagctgaatattttcttttttagagaatttacccgcacctcctgcggggttcctaagcactctctctgctcccctccccccaactccctaccacagggccgctcccagtagttttattcttcgatcttgcccgggccgagcctggcaggggccggtggctcagcgggcctcgcacccggcgctccgccgccgccgccgcccagctgcgccggggcgccctccggagatgctgccgtggaagaagcacaagttcgagctgctggccgaggcgccgccgcggcaggcgtccaagcccaagggctacgctgtgagcctgcactactcggcgctcagctcgctggcgcgggcgtgccccgaaggcgcgcttagccgggtgggcagcatgttccgctccaagcgcaagaagctgcacatcactagcgaggacccaacttacaccgtgctctacctgggcaatgccaccaccatccaggcgcgcggcgacggctgcaccgaccttgctgtgggcaagatctggagcaagagcgaggcgggccgtcagggcaccaagatgaagctgacggtgagtgcgcagggtatccgcatggtgcacgccgaggagcgcgcgctgcgccgcccgggccacctctacctgctgcaccgcgtcacctactgcgtggccgacgcgcggctgcccaaggtcttcgcctgggtgtaccggcacgagctgaagcacaaggccgtgatgctgcgctgccacgccgtgctggtgtccaagcccgaaaaggcgcaggccatggccctgctgctctaccagacgtcggccaacgcgctggcggaatttaaacgcctcaagcggcgggacgacgcgcgtcaccagcagcaggagctggtgggcgcacacaccatcccgctagtgccgctgcgcaagctgctcctacacggaccctgctgctataaaccgccggtggagcgcagccgcagcgcgcccaagcttggctccatcaccgaggacctgctcggcgaacagctggagcaggagctgcaggaggaagaggaagaggagcaacccgagggctgcccggaggaggaggagaaccgtgcggcagagggagatccagcagaggaggaggccgaggcgcagcgtgcgctagtggtcgccatgcactttgagtgcggggacttgttggatactctggagaatggccgtggggaggcgctaggaggcggcgggggctccctgggcccgggggccgggccgccgcctctgctgctgggcagcgcctccgacatgaaggctgagctgtcgcaacttattagcgacctgggcgagctcagcttcggcaacgacgtgcgcaccctgcaggccgacttgcgggtgacgcgcctgctgtcaggcgacagcacgggcagcgagagctccatcgagggcgggggccctgacgccacctccgccaccgccggggactcgtcccgccaggccgacggcgccagtgcagacgagccccactcgggctgagctcctccgcgcgtcgccggcgctccaccgtggctacccatccgtggtcccgacaacctccctgtcccttgcccgcccccaggaagggggaaatggggcatttggggcccagacctacacttggagcccaggtccagcgttcccccgaccgctttcccctacctcccggcccccgctcccgccccagcacttttggctctgttgcgcgtggggatgcggggagatttgagaggggaaaaccccgccaggagggagagagaggcacccctctgggatgc

SEQ ID NO: 34545 - DNA, 155 bp, Homo sapiens; identical to SEQ ID NO: 31348
  chr3:30713687-30713842
  hypo

SEQ ID NO: 34546 - DNA, 272 bp, Homo sapiens
  chr3:3221338-3221610
  hyper
cgcagcgtcctgctgatctccttcgccggccatgtctgtttacccgcaaaggaggctgggacagggcggtgccgaagactccgagggagggcccgtgtcgcgcggctgccgcgcaccggggccacagcgccccctggcggccccaggggagcagacggcggcgcgtacccaagcctgaaagtgatggcctaggcgggagggacaattacaggcctgcgctccgtcccggggacagaacgccgtcccctgccatccacggctgagtgcccggc

SEQ ID NO: 34547 - DNA, 205 bp, Homo sapiens; identical to SEQ ID NO: 31351
  chr3:39185671-39185876
  hypo

SEQ ID NO: 34548 - DNA, 277 bp, Homo sapiens; identical to SEQ ID NO: 31352
  chr3:42905952-42906229
  hypo

SEQ ID NO: 34549 - DNA, 917 bp, Homo sapiens
  chr3:48699752-48700669
  binary
cggctgctcagggggccctcgactattccgggcgctttgccttctccctcggagccccacgaagataggctccctgacccccaggccaggccccccatcctcccggaccccggaagactccggacaaagagctaaggctccgccaccgatatgcgcccttggccccgtagtggcagctaagcctgggtcccagccctggtgcccaccgccccccagctcctcctggctgagggggaacaaagagaggagaaggagcaggagtatgggggtcgaccgtcccccgaggccccgccacggcggccgcctcgccatcatcccccgcctccctgcacggcctccaccgccccccgccccggtccgggccttgggctggccccgccgctcgggccccctcccgggcccctgccgccgccccgggcccccgcccctccgcctgtctctccgcacccccgccgccctctgggcaccatctactccgcggccggagcccctccggcgtgcggccctggctttttccgcccccaccacagcatccccgacgctgctgccgcctcccgccgctccaacatggctcccggccgccccgatggttcgctccacctctgccccggcgcccgaaacacggtggtacaacccatcgcgcatggcagctctgaggaccgaagatgttgccgccatctttattgaggacgtgagcgttgctcctggtgctgaacagagcgcgaaggttcgccgtcgttgggtccgccctccccactttcggtcgccgccttcacccacctccctccttctagggcgctgtcccagctccgtctcccagcctttttctgtccttccagatctcttgttcccccttcctgaccactagttctgaaccgtgtcccggattttggtctgaaattttggtgcccatgagc

SEQ ID NO: 34550 - DNA, 787 bp, Homo sapiens
  chr3:49939702-49940489
  hypo
cgcctgcccccccaccgcgcccccagatcccctcagtgatggaagggaagcagcctgtgttcagccatgtgcatgcagctcacaagtaagggccccttctttcagcttaccgggttggggcaaaaactgggcgactggaagaagtcgaggcctcgccggaggcctggatggactggggattcacaacagcgctccacaccctcatcaattagtgtgtccagcaggtcaatggggaaggcacagacgacagagttggggcccacgccaggaccaccatccttgccagtcacaaagaccccaaatagtacttcctggccctcggcgatgctcagctcagtggcaagttgggcacccactggagcggagtgggccacccgcagcacagggtagggctgtccgccttctggggccccccggcgcctgcgttttggagcaaatctgcagtcgaggaccagctcccgatagtcacccaactctggctcagtggcgctaagccgtgccaggcgtgtgtgcagggcactaggatcatctgtcacgctggccggctgtacagtcaggaagtatacgaaggctcccgtgtggaagctgtgcacgtattcaatactgtaggagacaagatgcttgggcagcactgacaacgccacaaagcccggtgcgaatcccgaggcgtcagccttgagacgcctgatagacactgagcgtgggctgaagctggcagccacggctgcgtccagtgaggatgccacgtagaaataggaggcctggccttgctcaaccacagttacac

SEQ ID NO: 34551 - DNA, 681 bp, Homo sapiens
  chr3:50374299-50374980
  binary
cggtcggctttagtcatagctggataatgcccggctcaggtctaccacaagccatacagctgctttttccgtgttcaacctgtctgtgacagaaaccaagggggccccggcacccagcatctaggcggtggaatcggggtcttacgcacggttccgcgggcaggtccccggccaggacccgcggggagccacgtagccaggagggtggggctgcccaccgacccaggacgcggcaacggaccggggagggcggagctccagcgaccgcttcccctcccgcccgccggcaccccctggctcccacctggtcccggcgcggcctgcgagctagcgaggttcgcgcggtgaagtactgctcgagctccgagtccgagtcctcttggctgcagtagccactgctcgtcgtgctgctccaggtcatttcgaaagaaggcgcctccgcctcgcccatagccgtacccgcccgtcccccagtcctgcgcgtccgtagccgccaaccaccgccccggtcgcgtgcgtgcgtgtacgcgtgtcagtgtgcgcgtgcgcccgggccagagccgcgccgcaaccgttaagactgaaacgtagatcgccgggatctagctcttgtctcattggggcaggaacgccggggcggggacacgcacgcttcgcccccaggaatgacctcatcgctcc

SEQ ID NO: 34552 - DNA, 431 bp, Homo sapiens
  chr3:5137574-5138005
  hyper
cgttttatttggacgctctgaatccgttttcccctagcacatcggcagagcagaccgcctgcctcggccttgtcaacgccaagggtgttttggacggatgtgtctatcctgaaagcttccagcctggctttgaacttgacttggcaacggatgaaaacctcggcgagcatccccagacaaccccgctgcgcgtcagagcgctgctcccgcgtcctcctgccggcagaagcccctgcagtgcgccccgcgaccaccagctggaaccaaaaggcggcgcgcaggcgcggagcccacggggagcccaggctggggcgcgtgtcagctccgcctgacctgccaccttccctaggcagcggggggcgggggtggggggtggtgcggggagtcacatgcgtcccctccgaagctgggctggagttcatttacagctc

SEQ ID NO: 34553 - DNA, 686 bp, Homo sapiens
  chr3:51989952-51990638
  binary
cgccgctctgctgccggcctgcacgctcggggtggccgcacttggcctggcacgctaccgcctcatcgtgcacccgctgcggccaggctcgcggccgccgcctgtgctcgtgctcaccgccgtgtgggccgcggcgggactgctgggcgcgctctccctgctcggcacgccgcccgcaccgccccctgctcctgctcgctgctcggtcctggctgggggcctcgggcccttccggccgctctgggccctgctggccttcgcgctgcccgccctcctgctgctcggcgcctacggcggcatcttcgtggtggcgcgtcgcgctgccctgaggcccccacggccggcgcgcgggtcccgactccactcggactctctggatagccgcctttccatcttgccgccgctccggcctcgcctgcccgggggcaaggcggccctggccccagcgctggccgtgggccaatttgcagcctgctggctgccttatggctgcgcgtgcctggcgcccgcagcgcgggccgcggaagccgaagcggctgtcacctgggtcgcctactcggccttcgcggctcaccccttcctgtacgggctgctgcagcgccccgtgcgcttggcactgggccgcctctctcgccgtgcactgcctggacctgtgcgggcctgcactccgcaagcctggcacccgc

SEQ ID NO: 34554 - DNA, 117 bp, Homo sapiens; identical to SEQ ID NO: 31359
  chr3:52280022-52280139
  hyper

SEQ ID NO: 34555 - DNA, 535 bp, Homo sapiens
  chr3:52552592-52553127
  hypo
cgtgccgcacgcagatctaatgagcaacctgtcgcaggtatgcagcccccagagcgaggctgggcagggctgggtgctctggtggtggccctgcgtgggctgaggcggcagtcagggaccccactcccctcgcgactctgctccaggatgagctggcccggattcgtgcgcatcgccagctggtgtttcgctaccacgtggttggctgtcggcggctgcggagcgaggacctgctggagcaggggtacgccacggccctctcagggcacccactgcgcttcagcgagagggaggtgagccctggccctggcctgccccgctccatcccgccccgccccgcccctgcgcgccattgccccaggccccacggcccacgcagtcaagaaccccacctcccctagccagggggcgcctcctgctgagtccagcccgggactccgcccttgacctgggcctcgcccactgctgtgggcctgtcctgcccagcgcccttgtgtccttccgaggactgagccccgccccctgccctgactcc

SEQ ID NO: 34556 - DNA, 199 bp, Homo sapiens; identical to SEQ ID NO: 31361
  chr3:53195788-53195987
  binary

SEQ ID NO: 34557 - DNA, 506 bp, Homo sapiens; identical to SEQ ID NO: 31362
  chr3:54660189-54660695
  hypo

SEQ ID NO: 34558 - DNA, 970 bp, Homo sapiens; identical to SEQ ID NO: 31363
  chr3:66024122-66025092
  binary

SEQ ID NO: 34559 - DNA, 1570 bp, Homo sapiens; identical to SEQ ID NO: 31364
  chr3:66550318-66551888
  binary

SEQ ID NO: 34560 - DNA, 143 bp, Homo sapiens
  chr3:85010663-85010806
  hyper
cgggtgtctgacacgttacttaggtttttaatccgcgctgagacaatctcacagagaccctacttcacctctcagtaacttgcatttctcagctctgctgtgtgtgtgtgtatgtgtgtgtgtgtgcgcgcgcgcgcgccggc

SEQ ID NO: 34561 - DNA, 280 bp, Homo sapiens
  chr4:100867923-100868203
  binary
cgccccccgcgggcccctagggcgcgatccgcatccgtcccggcccaggaccaacctcctgggccggggcgtccgagctgactcggtggtccgcgcacggcgccagcaggctcgaagcggacctgcccgggaggcggacgatagcagccgggctgcccatcgcggggaggggttccgcccgggacccgattgccggcattggtagcgccgtgccctgtgacctccaggcgaggccctcgcagctcaggccaggaggacagggtccgggaaggggacactc

SEQ ID NO: 34562 - DNA, 1352 bp, Homo sapiens; identical to SEQ ID NO: 31367
  chr4:106156138-106157490
  binary

SEQ ID NO: 34563 - DNA, 71 bp, Homo sapiens; identical to SEQ ID NO: 31368
  chr4:110343729-110343800
  hyper

SEQ ID NO: 34564 - DNA, 281 bp, Homo sapiens; identical to SEQ ID NO: 31369
  chr4:123300379-123300660
  hypo

SEQ ID NO: 34565 - DNA, 306 bp, Homo sapiens; identical to SEQ ID NO: 31370
  chr4:1254365-1254671
  hypo

SEQ ID NO: 34566 - DNA, 128 bp, Homo sapiens
  chr4:1282403-1282531
  hypo
cggagagtggcagacacgatgcgaaccgtgaaaggacgcaaagagtacagagtgcatgcttccatctctataggaaggtcaggaacgctgttacggggagcagggttagaatgatggggatatagccc

SEQ ID NO: 34567 - DNA, 167 bp, Homo sapiens; identical to SEQ ID NO: 31372
  chr4:1326509-1326676
  hypo

SEQ ID NO: 34568 - DNA, 869 bp, Homo sapiens
  chr4:140656292-140657161
  hyper
cgtacagcaggtagcctggcaactgagagcacaataccgagcagatggtgttcgcacggcgtgatggacatcacacacgacagcctgagacaatccaggaattccctggtgactcgaggccctctttgcacaaaatgagttctctctccattgccgtgtatctctggggttatctgcccccctcctccgactgacactgaactggtttctcattaccgacttttcttccagccggaggggaggaagaattcaagtgggggagggcgcgggaaggggacgtggagggaaacggaagggctgggagtggggtaggggggcagtggcgacctccggggggggagggtggcggacaccagaccccagggccgacagcccgggagggaccgggttccaggaccccagctgcacaaagccggcccggggagggggcgataaggagcgagcctcgggtcggcccggcaccgctgcttcggctcagagtccttgcaatcgcttggcctacgaacaacctaaatgaaatttagggttttattgaaaaagtcccctggggcctaatttagcctctcgactccagcctatatgcttacaagtcctcaggggactccggctaggaagtcaggagtggggcccgtgcgtccccggcaggacctagactgcctctcggcgcaggcggccctaacaaagaagcccacgaggcggtcccgggcgcgggcaggggcggtgcggcggcgctcgggagacccgcgaggggccctggaggtcctcggcccgcgcgcgccgctcgggagcccgcgaggctgcggtgtgctccagcgggcgcatttcccaggccccgccacatcgtgtgtgttagtggctgggaaggacac

SEQ ID NO: 34569 - DNA, 174 bp, Homo sapiens
  chr4:141207770-141207944
  hypo
cggcatgtgcagccgtgtgcccgcgccgttcctcacgtgcacatgggtggcttgagcgcataagcatgactgccaatatcacggttggttagcttgtggcccaatactgggcggtgtggtgtgtgcgggaggcggggcgctggagccgctgtcaaggacgactgtgggagtcac

SEQ ID NO: 34570 - DNA, 923 bp, Homo sapiens; identical to SEQ ID NO: 31374
  chr4:141564347-141565270
  hypo

SEQ ID NO: 34571 - DNA, 1596 bp, Homo sapiens
  chr4:149364661-149366257
  binary
cggtttccctccaaccgccccctcctcgattctcctcccgcccacccaaatgctgcagttactaagcaaaaggatggggttcctaactttgatttctaaggacttttaggcttctcatgtaaggccccgttttaggctccccgctggcccggagtcagcatcagtgacgtatacacctaaatctggtcccccggccctcggcgacccgcagcccggcggcggcagctgtgcggcctcccgcctcaccctcgcttcgcgcccgccaaagcccgaggcgggggaccgggggacaccctgtgcccaaaggcccctcctctccttaacagttagttaagctccgggattccggacccctaacccagggctgagacttgaactctcagccgctccagtcaggaactccctggagataggggcgacagcggcagcgccgcgagctggtcctgaccccagactctaatgcccctcggtccccagcttggagctgcccccggcgtccccgcagccaggagtccccgccgagcgtcccaactttcccgcggggcccaccgtcacgcgcactctcccggcccagcgaactgggcatcgatctcacgtcggcagagcgcgggcggcgggcgggagcaaggggagtcccggacctagagcctgggcacgcgaggcggcggcggctccgcaagcgttgccgaattattcattattaaaggaatggacgtgtctcttttactaagtttttatctcctttgaggagggccggtcttgccctggatctcagcttcttgcaaaatctaggttagaaccgtgcaggggcagccgccgcgatcactcgcccgccacccagcacccttgccccagggccgccagcgggcaactcgtctcctgcccgcatcccacctccgctcgccaacccgcgccctctgccctgggcgcgcaacctgccttgcccggggccgcccctgcgctctccggaccccctctcgccgctgtcagcgcaaagtgactgtcgctgcactcaccttttctaggacatggtggggaggctggggcgggggaaggggaacggctagactcccgccgccgctgctgccgccgccaccagcaagtccaatattggctgatcggcggtgaggatggagaggatgataatcccggcagtggcagtcgccctgctgacggtgggtagagcaatagtgctgttaccctacaagaggcggcgaggcagcggcgccaaatcgcgcagagggggacgcgggcacccgcccgcccccagcggcggcggccgggcctctggcgggcccctctcccggggctgcgcgtccgctcggcgttgacagcggcgtccctgggagccgggaagtccggcaggaggatcccgcgcccgccgctccgcagcgccactctccgcgccccctccccgggccctgggtggccggtgacagctccggcggccgagcgcgtgtgtgagggggcggtcgcagggggagcctgcgcccccctccccgggtcacgccctcacgagcgggaggaggcggcaccgcgtccggccacccgcgggtgggaaacgggcaggggcgccggcagccgccctcccactac

SEQ ID NO: 34572 - DNA, 908 bp, Homo sapiens
  chr4:154216342-154217250
  hypo
cgcttgctcagagccacctgcgtgggcaggtgtagagtctccttctcgccggtggagggcactgccccgggctaggccccgccctgtgggacgagctcaccaggcctccggttttcccgcaggtcctccagtcgcagctggatactctgctccaggggcaggagagcattaagagctgcagcaacttcacagcgcaggccctcaaccatggcacggagaccgaggtcctactggtgaagaagcagatgagcgagaagctgaacgagctggccgaccaggacttccccttgcacccgcgggagaacgaccagctggatttcatcgtggaaaccgaggggctgaagaagtccatccacaacctcgggacgatcttaaccaccaacgccgttgcctcagagacagtggccacgggcgaggggctgcggcagaccatcatcgggcagcccatgtccgtcaccatcaccaccaaggacaaagacggtgagctgtgcaaaaccggcaacgcctacctcaccgccgaactgagcacccccgacgggagcgtggcagacggggagatcctggacaacaagaacggcacctatgagtttttgtacactgtccagaaggaaggggactttaccctgtctctgagactctatgaccagcacatccgaggcagcccgtttaagctgaaagtgatccgatccgctgatgtgtctcccaccacagaaggcgtgaagaggcgcgttaagtccccggggagcggccacgtcaagcagaaagctgtgaaaagacccgcaagcatgtacagcactggaaaacgaaaagagaatcccatcgaagacgatttgatctttcgagtgggtaaggagagggcttctgtgcccgacgcctgagctggcactggttaaggggtaactgggcac

SEQ ID NO: 34573 - DNA, 120 bp, Homo sapiens; identical to SEQ ID NO: 31379
  chr4:159093914-159094034
  hyper

SEQ ID NO: 34574 - DNA, 230 bp, Homo sapiens; identical to SEQ ID NO: 31380
  chr4:170679064-170679294
  hyper

SEQ ID NO: 34575 - DNA, 992 bp, Homo sapiens
  chr4:185939454-185940446
  binary
cggcggaacagcctattaaaggcttacttaattactttaatgactctggacaggctttaaaacgcactcggcgctgggacggcgggcttgctgggatttgtaaacaggcgatcatgtgagactcagcggtgggactaaaagaggcgacactgttttgtgagggtcctcgccccccggtgcccgcggccgctgcgcccctgcgctccgcgcccgcgactgctgcaggcgcttgctcgcccgccggccccagtttaccgcctccttttcccgcccgagctgttgccatgcaaatgttattcctgggccgatcacgtgtcctttgaagggccacgtggattaacaaagctgatctgcccccagctcgcccccctcggctgctaattttttttttttcttaacttctttaaaactgatcttgaatgcatacatcctccaaacgcagctcccctaatcctatggaataattcaactcgtgaatgcatctggagccctagatgaccgctttataaggcagccctcggagttgggaggctgcagtctacctgggacactcgaggaggcacacgaggcggaaaagtggacgggtgccccgcgccaccgcctctcccgagggcgcgtactgaccaggatgtcagacaagctcaaggaacgcaaagtgagtcggctgagcccaaatggcacttgcgccctggtggtggaggcatctgactcaccgacccgccacttgggtggaccgatggcagggaagtgcccgcacgggactttgagtgtggaggaatctcgagtggtttgggaagggggtggggtagagagaggagggtgctcaaccaggtagaagtcctgcctggaggctggcggccacctccccaaaggcctgggtagggtggctggaaggggagcgcgccagcgcgggcgtcagaaggcagagctcacctggcccgagcgtggcgggccaggagtcccttcctagagcgaatctgagcagtgtgcgc

SEQ ID NO: 34576 - DNA, 346 bp, Homo sapiens; identical to SEQ ID NO: 31382
  chr4:188427955-188428301
  hypo

SEQ ID NO: 34577 - DNA, 482 bp, Homo sapiens; identical to SEQ ID NO: 31383
  chr4:189552385-189552867
  hypo

SEQ ID NO: 34578 - DNA, 702 bp, Homo sapiens; identical to SEQ ID NO: 31384
  chr4:190462487-190463189
  hypo

SEQ ID NO: 34579 - DNA, 893 bp, Homo sapiens
  chr4:20256023-20256916
  hyper
cgctcttgtcgcaggctggcgcggaggggatagcagggagactcaaaagagagaaacttgccttccccgattttttgtcaccctcctgggggcgaaggttaggaagaaggggtcatggagtgcctgggggtgcttctcacaggtcgcggggagaagggtgccccaggacggcgacacctcgcatagtagcctcgcgcagccccccgccccccacttctccggggaggggaagacggcgtcaggcccctagggacttgtctcagcgggcgactgcgagggaggaccgtgtcccatccgttaagcgaagttagcactggttctccagcgcaaaccagcccaaccaggtcttaccactgcggcgacccggcggtgcccggctgccccctccggcccttcctgctgaacccctgcgtccccatccacctttctggcagtttctgcgccccttcacgtggcagcagttcccctgccttcccctcttcgcgctccgttgctcgcagacgtccccgcctccctgtctttgcgagtctctaatgaagaagtaaatgcagacccggtgttgacggcccacgcgctcctgatgaggcgcttccagagttcagcgaagtggagcatggaggccgttctctttgtgaacgccgaggccgccgccccgcgccagtccggccgccctaggcacgttccgctctcgcggttgcgtgtgggccgggagtaagcgaagggcgcggggctaggccggcaggggccagcgcgtctggattcgtcccgcggcctctttgcccccggggtgtaagggtttcgggccgtggagaggaggcgctctgacccgcacgtctccacccgcgcagcccattgcacttcaagtcgcccttcttatccaacccatttctctc

SEQ ID NO: 34580 - DNA, 304 bp, Homo sapiens
  chr4:2305600-2305904
  hypo
cgctcggatgcggctcagggcaaggggcccggcgctggcacagcccgctcccactgccccgcacaggcacgcggctcacaccaggggcgggatgggccggggctgcggcaggtgagctgagggcttggcactgcgcccatgtcacctgacaggcacccggaacatcagaaacagggaagcgggcccgctggcgcacattttctggtgcatgacgccccacagggcaggtgcctctgcagccagctcctgcccctgcccctcctcacacacagaccccacactcggccagggcccagcacctgcc

SEQ ID NO: 34581 - DNA, 207 bp, Homo sapiens
  chr4:2460372-2460579
  hypo
cgccctgggctggggcgggaccaggcagggaagccggagcagccccactcaccgtggcaggtccgctgtctgggcagatggccaagctgatgctgcagcgtgcagagagacggctccgggaggacaggtccaggaaggagctggtggagcaggtgatagaggggcagaagaacgccaaggcggcccagacgaagctcgcgaagggcc

SEQ ID NO: 34582 - DNA, 852 bp, Homo sapiens
  chr4:25656694-25657546
  hyper
cggcacagaactggggagctgttgggataagcatgggggtggactctccctgggacagatcctatctcacagcagtttggagaactgttgtatacacacgcaggtgacacgaggcagagcaggatgtgaaacgagcgcagtggtttgccaaacccgcagcaggcttaggacggagtggtgagaacagcccccttccttttcctcagcttgacggtcccagcctttcccattgcggacctagagcccagactcccagggcagaaagcgccccacagactgataaaggtgaacaatccaggctttgtttccaagggctttatccctgactttccaactggcttttatctgtgtcttcacgtctctgacctcttgagcctcacaggagctagactagaaggttcaagttcttgaggagaaggcaggggcgggagagccccacttgcgggaatctcgtgcggaccgagtcggggcgggagagggcgcgcaccagccaggctagggcgcgcggggcgccgaggggcgcggggccgtttggggccgttcgggccagttcgcgcggcggggcccgtcggagcttttctctcggcagcctggctggccgcgcgtcttctccgcgcagcgggcgaagtcgcgatgggttcattaaggcggcaggtaggcagtgccccggcggcggctgcggcaggcggtcctggaatgtgcgaggggcgtgatgacagcggccagcctctttgcgcaacaccttcgccatatatacccggggcgctgcgctccacctggccgccgcctccagcccagcacctgcggagggagcgctggtgagtaccgccgccggggcaggggcgcttcctc

SEQ ID NO: 34583 - DNA, 105 bp, Homo sapiens; identical to SEQ ID NO: 31389
  chr4:3514612-3514717
  hypo

SEQ ID NO: 34584 - DNA, 305 bp, Homo sapiens; identical to SEQ ID NO: 31390
  chr4:41218387-41218692
  binary

SEQ ID NO: 34585 - DNA, 927 bp, Homo sapiens
  chr4:512569-513496
  hypo
cggcccattgtctacaccgtcggggatcctttttcctaaaacaaaatggggtatgtgttctgacactgaaatacgttttagaacccacagccaggcccgtgcagtccctcggtggcgtccagtctgttggaggctttgtgcccacccggctctctcagtgtagtgggaccggctttttctcacctctggacttttgcacatgctgttcccatcagcttgatgctcttcctgcagttttttgcctggcgaattcctgggtaccgtttacatttcagcgtaaacatcagaccttcctggtccagcgcccactcccaatccaaaatcagttcctccccattaccaaaaatccctcattgataccctctacttttccttcctgggaaacttgtaattacagctgtaatgcagtcacagtttgtaattacgcttgtgtgcgtgcgtgcgtgtctgtgagccctactggatccaagccccagcaggcaaggattgcacctgcttgctcgccatgctgtgtctcccctggcacagcgcctggcacagtgcctggcacgtcgtccacgctccatggatatttgtttcgatgcatgcacaggtgcacccccatagctttgtgactctctgataggcggtggggtgtggacacaggcgtccccccatccagggtggtaggtgtagcaatgaaggatgccagccctggaaccagactgcctgagtttcatttgcagcttttacccactggcactgtggcccaggtgcgtgactcaccctctgtgtctcagttgcctcctctggataacagttctgatgctcatccctgcctcatagggtcattagggaggtgaaacgagcgagccgcctagtgttgctggctactggcacttagtgcagagcacctggtgccggcagcagtggggtgggcctgcaggc

SEQ ID NO: 34586 - DNA, 76 bp, Homo sapiens; identical to SEQ ID NO: 31393
  chr4:529368-529444
  hypo

SEQ ID NO: 34587 - DNA, 167 bp, Homo sapiens; identical to SEQ ID NO: 31394
  chr4:56413698-56413865
  hyper

SEQ ID NO: 34588 - DNA, 864 bp, Homo sapiens; identical to SEQ ID NO: 31395
  chr4:57179991-57180855
  hypo

SEQ ID NO: 34589 - DNA, 398 bp, Homo sapiens
  chr4:619513-619911
  hypo
cgcggcctgcgaggacgggtgcccgccggactgcgacagcctccgggacctctgccaggtggaggagagcacggcgctgctggagctggtgcaggatatgcaggagagcatcaacatggagcgcgtggtcttcaaggtcctgcggcgcctctgcaccctcctgcaggccgaccgctgcagcctcttcatgtaccgccagcgcaacggcgtggccgagctggccaccaggcttttcagcgtgcagccggacagcgtcctggaggactgcctggtgccccccgactccgagatcgtcttcccactggacatcggggtcgtgggccacgtggctcagaccaaaaagatggtgaacgtcgaggacgtggccgaggtgggtctgtgcggagcctcagggaggc

SEQ ID NO: 34590 - DNA, 840 bp, Homo sapiens
  chr4:62068155-62068995
  hyper
cggttttggctggagaaagctgccactttcgtgggtggcccgggctgcgctgtgctggtagtgggcactgggcggggggcggcggtgttgcacgaatccgggcggccgcggcgccggggcggggtgggcagagcattggtggtcgcggttggcgggttacaggtaggagagaaggcacctcggcgcttctctgaggagaagggaaggctccaggctgcagcgcagcgtctgagctgccgcgacccagcctccggtcccacgtcggagctcagaagcttagggtgccaggcccccagcactataggtgggtgtgtgtgtgtctgtgcgtgtgtgtgtggtgtgtaggggtgggggcgacctcctctaccagccttacttggcggcggagtcagcgtttgagtgtgtgcgcatttttgcgccccagggacggcagagagatatttgcggggatgccggagctgatgctgctggagctgagcttgcttattgaaatcgcctgggatcctcttaactggaaaatctggtttgaggaggccacgggggcccccgcagggtggcgaggaaaccttgccgtgtccccttcccctggagaggcgcagctcggcgacatgcgtgcggcgcgtgagagtcgctggtgcagcgctcgatgcaccccagaatggccctgatgagaacctcatagggtagtcatctctccagcaggttgaagtaatcgagtccagccagcgtaactcctggtccctggaattctctggccactttcctacctctgatagaaacatgcgctgcttttatttatggccagagatatcatagcagttgggagaactcgaggcttgc

SEQ ID NO: 34591 - DNA, 821 bp, Homo sapiens; identical to SEQ ID NO: 29192
  chr4:6271360-6272181
  binary

SEQ ID NO: 34592 - DNA, 883 bp, Homo sapiens
  chr4:628551-629434
  hypo
cgtcgtggcggtgatcatggcagtgaacaagctcaacggcccattcttcaccagcgaagacgaagatgtgagtgtggggggcacctgggcagccgcgcgtctgcctccctgcctgcctgcccgcccgcctgttctgtgctgcgcatccacctctttacctgcctgcccgcctgcccgtgtgttctctgctgcgtgtctgcctccttacctgcctgcccgcgtgttctgtgctgcgtgtctgcctccttacctgcctgcccgcgtgttctgtgctgcgcgtccacctccttacctgcctgcccgcctgcccgtgtgttctctgctgcgtgtctgcctccttacctgcctgcccgcgtgttctgtgctgcgtgtctgcctccttacctgcctgcccgcgtgttctgtgctgcgcgtccacctccttacctgcctgcccgcctgcccgcgtgttctgtgctgcgtgtccacctccttacctgcctgcccgcctgcctgcgtgttctgtgctgcgcgtctgcctccctgcctgcctccctgcccgcctgcccgcgtgttctgtgctgtgcgtccacctccttacctgcctgcctgcctgcccgcgtgttctgtgccacgcgtctgcctccctgcctgcctgcccgtgtgttctgtgctgtgcgtccacctccttacctgcctgcctgcctgcctgcgtgttctgtgccacgcgtctgcctccctgcctgcctgcccgtgtgttctgtgctgtgcgtccacctccttacctgcctgcctgcctgcccgcgtgttctgtgccacgcgtctgcctccctgcctgcctgcccgcgtgttctgtgctgcgcgtctgctgggctgctgggctccacgtgctcatctgcacatc

SEQ ID NO: 34593 - DNA, 164 bp, Homo sapiens; identical to SEQ ID NO: 31402
  chr4:6950171-6950335
  hypo

SEQ ID NO: 34594 - DNA, 571 bp, Homo sapiens
  chr4:81189434-81190005
  hyper
cgctcttccagcgcgggttggtccaccaggcagagccccagccagggcctgtcaggtacccagggagaccggaaatgtagccaggagacagcagcgctcacagtcacctggtttcagtgtcagcctggttgctcctagatgttcctaacttgctccatctcagaccaaagactccacgggccattgggctccttcttacacaggctccagaggagcgtggacaccaccggcggtctgaagatttggcagccagcagtctccagaggggggtcggaggcgcgcaagtgggtaaggcggtaggctggctagcctcctccggtgggttaagggggcctaatgcggaagacctgatggttcatgctgagagaaaagcaggtctatgcccgcccctctgcgcctgtctagtctatctgatcgcgctgattcagcagcctgcggcgcacgtggtgagggcgcctggagcgcccagctggagagagggccctccgcacacgcaccagcgagtcccagggcctccctcacactcccgagaggaatctatttccatattttagagtttatttcactcatc

SEQ ID NO: 34595 - DNA, 477 bp, Homo sapiens
  chr4:81307585-81308062
  hypo
cgggtcaggcaagggggtcaccaccttgcgcccaccactgccgccacggcgcggggctgccctcttctcgcgggcggtggtggggggggggggtgccgccgggtttgcaggtccttttccttctgggggccgagacgacagcggtgatctttgaggtatttgtggcggaaaaagcccttggcacagccagcatagcggaacttgtagtagcccgtgtgggcgcgcaggtgctcggcgaggtgggcacggcggctgaaggacctgctgcacagggcgcatttgtggagcttcatgccggagtgggagaggacatgggccttcagcttgtccggccggttgaacaacttaccgcagcttgtgtgcgtcgataaagggcatttatatttcttgaagggctggtggatcaacatgtctctcttacagtttgtccttgaggttgaatgcggactcgcacaccgagcatttgtagggcttctc

SEQ ID NO: 34596 - DNA, 82 bp, Homo sapiens; identical to SEQ ID NO: 31403
  chr4:8386747-8386829
  hypo

SEQ ID NO: 34597 - DNA, 167 bp, Homo sapiens; identical to SEQ ID NO: 31404
  chr4:8398721-8398888
  hypo

SEQ ID NO: 34598 - DNA, 126 bp, Homo sapiens; identical to SEQ ID NO: 31405
  chr4:859220-859346
  hypo

SEQ ID NO: 34599 - DNA, 229 bp, Homo sapiens
  chr4:8607722-8607951
  hypo
cgaggtgaagctcatcggcaacattcatggcaacgaggtggcgggccgggagatgctcatctacctagcccagtacctgtgctctgagtacctgcttggtaacccccgcatccagcgcctgctcaacaccacccgcatccacctgctgccctccatgaaccctgacggctatgaggtggcagctgccgaggtgagcgcccagatgcctggatcctgtgggccaccgccc

SEQ ID NO: 34600 - DNA, 320 bp, Homo sapiens; identical to SEQ ID NO: 31406
  chr4:94748540-94748860
  hyper

SEQ ID NO: 34601 - DNA, 240 bp, Homo sapiens; identical to SEQ ID NO: 31407
  chr5:110225-110465
  hypo

SEQ ID NO: 34602 - DNA, 939 bp, Homo sapiens
  chr5:112629411-112630350
  hyper
cgcttgcctcaaagactcaggagtccagatccgggcaggaaataaagttctaaagcggctttgaagtgctttctccccagacccctccccagcgcgggtcattcatctcagcctagggaagagaccaccttgcctgaacgtagccaaacgcatcgcacgtgggagccaagtgggagatgaaataatccaatgcgtccccctcaccaccaccacccccaccaaattagttaccgtcggcttaaactcatcgggaatgtccgtgtattttaccgatcagggaaataaaagggtgtatataaattagtggaagcgggtgggaaggaacaagggatgcagactgtcgtgagtaaaacgcctcgcggcttggtgagaggttgtttcttttttaagccactcatttcagactgaaatatcaagccagttcaggtcatttcctgagtagcactacaagttaaaacaagatccagaaaatctactaatcttcaattgcgctgcctccagactgggagcacagggggatagggtgtagggctgtggggaggtcgaggggagggggatttgtggaaaagcaaacgcccgagaaaccctagctcccgacctcagctgtttcttacctcactcagctcggccgaggagtcgtttccatatttcatggcaactccggaattcatgatgcacttttcagagctgggctctcagtcccccaggtctcggagcttaagagttggacttcacaggctcaatatccactgcttggtcccttctgccacattttagtctagacagccattttcacccaggacagttgcgaagcgcaaacggaggatgcaggcactcttaaaaagagcagccgtggctcgcgtttcacggacgagccattgctgcaggaggctcggtggcgcggcgcgctcgcagctgcggcagcggcggagcccgcgc

SEQ ID NO: 34603 - DNA, 359 bp, Homo sapiens; identical to SEQ ID NO: 31409
  chr5:12794972-12795331
  hypo

SEQ ID NO: 34604 - DNA, 187 bp, Homo sapiens; identical to SEQ ID NO: 31410
  chr5:132072695-132072882
  hyper

SEQ ID NO: 34605 - DNA, 709 bp, Homo sapiens
  chr5:132082800-132083509
  hyper
cgggagtcctggcccaaggcgggcgcagtctccagccgccccacccctggctgggggctctgctcagggagcacggccggcaggggggaggaggcgtgcgctaggcagcagcggggatggagggaagggagggggtccgccacccgcctgtgcgcgcccagtcctgccgcatcctgggtgcgcgccgcccacccgcggggcgagtgcccaggaggcgaggcgcggcccggtgcgccagaggtagctccaccgcgagcgttgtgggtggggcccgccgagcccgcctccccacctcccccggcggcgccccaggctgcagtgttccgggagctgggttataaaatgccgggttaagcggcaactcagactcaggatcccgctcacgacatggcctcgggcgctcagctcccgccgcagccgtcgagctcagaggtcagcgccgtccagagcccaggcgggcgtcccggcgccggtctggaggaaacagccctgggcgttcctctcccgccgtctccgggggaggcccctctgccccgaagcaaccggagcaggtgccctgggacccgccagcccggagcggcctccctccacgcggcgtccgcagcagtccccgtgcggccccggcgcggtacggcgccagccgggaaaaccgcagacgcggtccccgccgccgccccagagcaagctccgcggccggctccacagtccc

SEQ ID NO: 34606 - DNA, 145 bp, Homo sapiens; identical to SEQ ID NO: 31412
  chr5:135188298-135188443
  hypo

SEQ ID NO: 34607 - DNA, 102 bp, Homo sapiens; identical to SEQ ID NO: 31413
  chr5:136983271-136983373
  hypo

SEQ ID NO: 34608 - DNA, 248 bp, Homo sapiens; identical to SEQ ID NO: 31414
  chr5:139742899-139743147
  hyper

SEQ ID NO: 34609 - DNA, 153 bp, Homo sapiens
  chr5:140593331-140593484
  hyper
cggcgatattaacggtggtgttgtaaccttacatagtctcggggtgcatacaggcagagttgggaatattacatccattatcattccacaaaatgtaagatcctgtgaggacgcgtggtggcgctgcaggataagaaggcacaaaccagaacc

SEQ ID NO: 34610 - DNA, 343 bp, Homo sapiens; identical to SEQ ID NO: 31415
  chr5:1409813-1410156
  hypo

SEQ ID NO: 34611 - DNA, 259 bp, Homo sapiens; identical to SEQ ID NO: 31416
  chr5:14461130-14461389
  hypo

SEQ ID NO: 34612 - DNA, 157 bp, Homo sapiens; identical to SEQ ID NO: 31417
  chr5:14492755-14492912
  hypo

SEQ ID NO: 34613 - DNA, 87 bp, Homo sapiens; identical to SEQ ID NO: 31418
  chr5:148724812-148724899
  binary

SEQ ID NO: 34614 - DNA, 341 bp, Homo sapiens
  chr5:150536722-150537063
  hyper
cgaccggacgttcagctctctgcacgcaggcagccctcccccgacaccacacacaagccattttataagcagctggagggtccaacgctcttgctctcagtcttgggcctcagccacacccttctctgcgggtcctttgactggcgtccagctgaccccaaccccggaccttcaaagtctcttgagcccccccaaattaaggccggcaggaccagcccctggctcagctccggcgcccaggaccctcaaccagaccctctgcagcaacgggactccctcccctccccctagccagggcgccctccgcccgcgcctctccgccccgaccccagatttgctcc

SEQ ID NO: 34615 - DNA, 204 bp, Homo sapiens
  chr5:150911164-150911368
  hypo
cggaacctgccttgctcgttcccgctgaccacgcggtagccggtcttctctgcgcccgggcgagtgagggtggccagctgcagcacctccgtgccaggtggggcgtcctcgggcacctgcacgctgtgctcggtgttcaggaacacgggcaggtagtcttctaggcccaccaccgagactgtgacggtgcccagcgtggacagc

SEQ ID NO: 34616 - DNA, 254 bp, Homo sapiens; identical to SEQ ID NO: 31421
  chr5:1551543-1551797
  hypo

SEQ ID NO: 34617 - DNA, 327 bp, Homo sapiens; identical to SEQ ID NO: 31422
  chr5:1553050-1553377
  hypo

SEQ ID NO: 34618 - DNA, 135 bp, Homo sapiens; identical to SEQ ID NO: 31423
  chr5:158139227-158139362
  hypo

SEQ ID NO: 34619 - DNA, 398 bp, Homo sapiens; identical to SEQ ID NO: 31424
  chr5:159707402-159707800
  hypo

SEQ ID NO: 34620 - DNA, 304 bp, Homo sapiens; identical to SEQ ID NO: 33513
  chr5:168195091-168195395
  hypo

SEQ ID NO: 34621 - DNA, 50 bp, Homo sapiens; identical to SEQ ID NO: 31426
  chr5:171724013-171724063
  hypo

SEQ ID NO: 34622 - DNA, 123 bp, Homo sapiens; identical to SEQ ID NO: 31427
  chr5:171859485-171859608
  hypo

SEQ ID NO: 34623 - DNA, 306 bp, Homo sapiens; identical to SEQ ID NO: 31428
  chr5:171916875-171917181
  hypo

SEQ ID NO: 34624 - DNA, 628 bp, Homo sapiens
  chr5:17275369-17275997
  hypo
cgacgagaaagccaaggagaaagacaagaaggccgagggcgcggcgacggaagaggaggggaccccgaaggagagtgagccccaggcggccgcagagcccgccgaggccaaggagggcaaggagaagcccgaccaggacgccgagggcaaggccgaggagaaggagggcgagaaggacgcggcggctgccaaggaggaggccccgaaggcggagcccgagaagacggagggcgcggcagaggccaaggctgagcccccgaaggcgcccgagcaggagcaggcggcccccggccccgctgcgggcggcgaggcccccaaagctgctgaggccgccgcggccccggccgagagcgcggcccctgccgccggggaggagcccagcaaggaggaaggggaacccaaaaagactgaggcgcccgcagctcctgccgcccaggagaccaaaagtgacggggccccagcttcagactcaaaacccggcagctcggaggctgccccctcttccaaggagacccccgcagccacggaagcgcctagttccacacccaaggcccagggccccgcagcctctgcagaagagcccaagccggtggaggccccggcagctaattccgaccaaaccgtaacc

SEQ ID NO: 34625 - DNA, 337 bp, Homo sapiens; identical to SEQ ID NO: 31431
  chr5:17354400-17354737
  hypo

SEQ ID NO: 34626 - DNA, 889 bp, Homo sapiens
  chr5:1746004-1746893
  hypo
cgacaaaggcacccggtgtccctgagccgagcacgccccgtccacttggtgggggcattagcctgtcggaaagctgcctggtccaggggggctttcagcccgcaggacgccgagagctgtctgtaaacctctccatggttgtgtgggcctcgggccgaggcagcctgcagtgaaggaagatgttttggagaagttgttggggggctgaatccctaaacgcaggggacacttcacgcccgtggaatttggaaaaccgaggcagggagcagggaagggtgtgggactcgggaaggggagcagctggtgctcctttaactcgcccggtggcagttcagggtgtttccatctgagatcctacactcagccgggggcccacggtgtagcgggtcgtcagccgggccccgggccttctgggcagcaagggccctggcaggaccctgagggctgggccaaggagggcagttcgctccggggcacctgtcaggggccccacacggctgcttttaggccaggggtggcaaagacgctgctgccgcctgctctgggctcggctcccatggctgtgaaggaccctcgtcactccccgtcgcctgcctgggctgcccggggaccctcctgctgcgtcagcacagagcctggaaccgcggccaaggcaggaagctcccctgtgaaggcaccaagcacggcagacgccctcacatcgccggggcccgtttccctgtggacgggaagtgggaacgtgacgtggacgtgacgtgggaacgtaacgtgacgtgacgtgacgtgacgtggcatggcgcgaggacagcgcggcgggagcggcgcctcagatccagcagggagggagacgaaaggcggatggaagaggggcccccggaccccgcccctc

SEQ ID NO: 34627 - DNA, 715 bp, Homo sapiens
  chr5:176559893-176560608
  binary
cggctgcccgcggcacccgggacgatccagcctctgcctcgcgggcgtcgagcctgagacaggagggagccctggggctgcacaggcttggctcagggaggcagacccgagctgctgcctccattttgtttcctgctcagcttggtctgtggtggtggtggtggtggtggtgtgggtttggggtgcggccgggtagggggttcgcctgcggccgcgtctgctcggggcctgaggcctcgaagaccccagcccaagcccccaggtgagccctgcggcaggaggggggttgccttggcctcgggccgaacccagcgggctgagggcaggtgcccagtggatggggagcctgggctgtaacctaagatggaggccgggactgacgcgggcccgagcagggctggcgggacgatcggacaggcctcagccgcgccaggtgccgcctgggttggggttcgagacgcgtagggtgcgggagccgtgtgcggcccgaggccagcgccgtgccccgaggtaggtgaggggatcggaatgccacccacgacgcccgcaggccccgacactccaaggaggcgcgcgaggcccctggggagcccgcctcaggccccgcccgggcagccgggccggcccgtaggccccggccgcgagcgggcgcgcagggggaggggagggggcggcagcggcagctccgctgattgggcggcgctctcacaagccc

SEQ ID NO: 34628 - DNA, 143 bp, Homo sapiens; identical to SEQ ID NO: 31434
  chr5:178259527-178259670
  hypo

SEQ ID NO: 34629 - DNA, 260 bp, Homo sapiens
  chr5:178580401-178580661
  hypo
cggtcctcacactgtcccgggagctgcccctacaccagcacgcctccccccagacctgggagggtcccggctgcagggctgcacactcaccgccgtgcacatcatgtagcccaggccgaagtcaaagcggcattgctcgttcatggagtagtgcagtcccgggagctggggcagcgccggccagtcgtgggcgaaggggtcatccagcaggcagtcataggagctgtgggggacacacggtgccgcgagcagccttcagc

SEQ ID NO: 34630 - DNA, 500 bp, Homo sapiens
  chr5:179401697-179402197
  hypo
cgatggctttgaaagagagttttaaaaactggactgggaaatgcgagtgtcacgagatgccggcgagtggagacagaacactggaaggagcagccagccaagagaacgaggccccgaggaagggagagagcaggcacgcagcggcgcggggaggagcggcatggaccgcagcagacggcctctccggcctgcgcacccgggtcagcacgctgagggaattaaacccattgcttcctctgggcagtcaatggtgaagcggtcctctgagagtgaagaacaagcgtgtgagttaaggtgttgaagtagagtgaacacacctgcaggtgctgctgtgccgaatgcggagcgccagccaggcggggaggctctgtcttgccaagtctgttcagagtcccgtgggaagacggtgagggaacagaaccgcttagcaacatgaggtacagaaagccacagcaggtaacaccgactctgggcttcaaagacaataggggcggggaggc

SEQ ID NO: 34631 - DNA, 137 bp, Homo sapiens; identical to SEQ ID NO: 31438
  chr5:179546922-179547059
  hypo

SEQ ID NO: 34632 - DNA, 149 bp, Homo sapiens; identical to SEQ ID NO: 31439
  chr5:179564196-179564345
  hypo

SEQ ID NO: 34633 - DNA, 185 bp, Homo sapiens; identical to SEQ ID NO: 31440
  chr5:1808331-1808516
  hypo

SEQ ID NO: 34634 - DNA, 625 bp, Homo sapiens; identical to SEQ ID NO: 31441
  chr5:1809065-1809690
  hypo

SEQ ID NO: 34635 - DNA, 323 bp, Homo sapiens
  chr5:3454181-3454504
  hypo
cgctgacaggcccctgtctgctgtcctcacccagtgaggcctctgcaacgccgcccctaacactcacactagcacagtggacatcacccactaacacacgctcccgctagcacggcaggcgtcacccactaacacacgctcccgctagcacggcgggcgtcacccactaacacacgctcccgctagcacggcgggcgtcacccactaacacacgctcccgctagcacggtgggcgtcacccactaacacacgctcccgctagcacggtgggcgtcacccactaacacacacggcagccctggactcttctttcctggatgtcc

SEQ ID NO: 34636 - DNA, 449 bp, Homo sapiens
  chr5:3740590-3741039
  hypo
cggtgtgaggtgaccgcgtgctgtgctctgcagggccaggcctagaccccgacgtcccagtcccagtctctgtctgcccaagtgggcgggagaatctgggggagggagggagaggctgcttcccaggccgtcatcccagcacggcttcctcactgggaggacgcggcttgttcccatttctggagtcaggctgtatgggcccctccacaatcttcagcgccgcgtccctgcaggtccacatgtcccccgcgggccctcccctggtttccgatgcccatcacccaacctcttctgtgtcctcagcccggggtgggggtgcagcccctgcaggtgcctcagggtgtctgtgctcccagccctacccactgctcggtcaaaccttcacatcgccttctctcctgcgcgcagctggcggcttctatcttctgacccaccccagcgtgcctacc

SEQ ID NO: 34637 - DNA, 790 bp, Homo sapiens
  chr5:3761134-3761924
  hypo
cgctgaatgcggctctagcagctgtcgtgggccttcagagaggaagaatcttaaggcgcgtccaagacaagcggagtcgaggactccgtttcggggaggtttacctgaaaagctgtgtggaaaaacccgactgcgactttcaagcttgtgcttcacaacccaggagccgtgcattatgtccatgtgttcagatgcaagatgctcagaccccaggaaaaagggaattcggtgtaaagaaaaaaggactcttagcatggtccagtattaggacagtaacaccctgtgtgtgtgcacgtgccctccctccatctccctggcctttgcgtctctgtgtgggtgcacatgccctccctcctccctccatctccctggcctttgcgtctctgagtgggtgcacatgcgctccctccatctccgtggcctttgcgcctctgtgtgggtgcacatgcgctccctccatctccgtgggctttgcgtctctgtgtgggtgcacatgccctccctcctccctccatctccgtggcctttgcgtctctgtgtgggtgcacatgcgctccctccatctccgtggcctttgcgtctctgtgtgggtgcacatgcgctccctccatctccgtggcctttgcgtctctgtgtgggtgcacatgcgctccctccatctctgtggcctttgcgtctctgagcgggtgcacatgccctccctccatctctgtggcctttgcgtctctgagtgggtgcacatgcgctccctccatctctgtggcctttgcgtctctgagtgggtgcacac

SEQ ID NO: 34638 - DNA, 208 bp, Homo sapiens; identical to SEQ ID NO: 31446
  chr5:3932149-3932357
  hypo

SEQ ID NO: 34639 - DNA, 498 bp, Homo sapiens
  chr5:41510373-41510871
  hyper
cggcacgcgctcgcctggcctgagacccaccctggaagacgagtttccctcccgcgggcatcgtggcaagttaccacttagtggcagataaagcagggcggggcaggtggagcgggcgccgagcgcctagcccgcagcccctgcgcgcctacctggaatggctaaattggtgagggggatgctgtgcatgctctccggcagagttgccatccagtcggctaatttcagctcgtttttcccctgagacgaggccatcgtgccagtcggcgtgcagcgcgctggtcccagcactcctcgggcaggctggcaggctgctgccgctaatccaatgtttgctctagccccgctagagtttacactcctctctgcgccacacccacaggatggcgcagacacatgctaattttaataattattcaaaacaccccgtgctcccttagtgcctccgccagactccgctggagcttttgttcctgacgtccgtgctcagctctctcc

SEQ ID NO: 34640 - DNA, 822 bp, Homo sapiens
  chr5:42951612-42952434
  hyper
cgcctactccgcgccacaggcaaaacagccaatggaaaccccaggtgctgcgaccgtgacaccggcactagagggtctcggatggagaaagcggcgcacggagaccaggaaactatgtgtagcacaactagcagaaaaccgtctggtcggccatccgggagaaagcgcggatcagaaacaagcgacttcgatgcagggaaccgcgcagccactgaagaaagtgacccacgtggcagtggtgccagcgaaacactgcagtttggacggcagctgtggggatgccacagagaaacatgcactgccactgaagtacatccagctccgcggagctagtgttcatatgatcaagaaaccgccagttgggctctgctagaaacttttagtcctcccttaacggctatcctacccacaacagacaatgcctttacccagcacctagcggtgctgagacccgcctgggccagcacagagcgcagagcagtacgggtacggagaaacgccggactcagtgaaaccagccttgcctccagcggattccccggcttcgccggacgccacaggcagagtgccgcggggaaacctctggctccctaaaccgattagattgtgggagtgggggggacactcacaagttgtgtggaagggaaccagcggcaatgggacccggcgagcacttgcccgcagcaaatgcctgcgctgctgcaaaaaaaacaacttttggcgcaaagaatgttgcggccagagagcatccgctgtcgctgacaaaggagtagcaatggcaatgagaaaccgccggcgccacggccgaccgcggcggctcac

SEQ ID NO: 34641 - DNA, 119 bp, Homo sapiens
  chr5:429668-429787
  hypo
cgagacccacccgacttgtcctcggcccctcggcgctgcaggcccaggccctggtaaccaagtgcagctcagccttgccgcgcgatcctgcagccgccactgggcagcccgctttgttc

SEQ ID NO: 34642 - DNA, 173 bp, Homo sapiens; identical to SEQ ID NO: 31448
  chr5:462216-462389
  hypo

SEQ ID NO: 34643 - DNA, 740 bp, Homo sapiens; identical to SEQ ID NO: 31449
  chr5:465064-465804
  hypo

SEQ ID NO: 34644 - DNA, 216 bp, Homo sapiens
  chr5:520003-520219
  hypo
cgtcctcctgaccctcctacggctgcgcgaggcactgcagactccagatacccgtctcgctcctgcctgcccttccagccagggttcaccaagatgtggggcggcctgggcctccgccatcacatccctcagcaacacaagctccacttcgagagcctgcccccaccgcccccacccagccccactgtcctggtttccccgtgggcagtcactgcc

SEQ ID NO: 34645 - DNA, 490 bp, Homo sapiens
  chr5:67583960-67584450
  hyper
cgcttcactgtcggctacttgagccccgcgagccagccagcgcgctcagcagccagtgagactattttaggtcccctcacaatggccttctcatttcccaggcgaaaatgagcaagttggtcttgcattggccacttgtcagccgatgacaactttgacttgggctcccctccccctcccgaaatccctagctcagcaaatatttgaacctgcccaagttaatcatgaagctgcgatctttatctaagggagacgtgcgagcgcctgggctcctttcctccccgatacagtagcgaaatccagttggcttctcaatgaggagccggcagtgagcggcggtggcccggacgcactgccgggcggggcgtggggcggagggacgagccgagccgagccaagcggagctgggccactgtgcacgcccggagggtcctggcggcgcccccgctcctgcgcgcactctcggcgccggacacgagcactgcctgcc

SEQ ID NO: 34646 - DNA, 772 bp, Homo sapiens
  chr5:676510-677282
  binary
cgctggcgccgcagaggtgggccccacagccttccacacaggggcatctgacccacggcccggccccttgcaaagccaaggccgcagagggggaaggtgcaggagctctgagatgaaagaggtgatgagtttgcggcaatgtaggaatgaaatacatcggccacaggaggacgcaggtgcaaaccaccgaaataaagccattgccacacaggcggacaggacggggctcagggagaaccgctgcttttctcgggtgcgatcatggtggggtgtcgggacatgaggtgaaatgtgctggggcgtgtgagggtgcctcagtgtgcttcccagcattcatccaggagaaaacagacaatgcgtgacacggcaacagacgtgtgcacacatgacacagaaacgcacgtgcacatgcagaaacacatgcacacatgcgcacacgtgcacacacgacacagaaacgcgcacacacgacgcagaaacatgcacacacgacgcagaaacgcgcacgcgcgcatacacgacgcagaaacgcacgcgcgcacacgacgcagaaacgcgcacacgtgcacacagaaacgcacacacgacgcagaaacgcgcacacgtgcacacgcagaaacgcgcacacgtgcacacacgacgcggaaacgcacacacgtgcacacagaaacgcgcacacgtgcacacgacgcagaaaaagcaaacggcacgatgcggtttcaaggtggtggccggagccgcctccttggtgccctttgccattttgccgccc

SEQ ID NO: 34647 - DNA, 64 bp, Homo sapiens; identical to SEQ ID NO: 31453
  chr5:73205673-73205737
  hypo

SEQ ID NO: 34648 - DNA, 164 bp, Homo sapiens; identical to SEQ ID NO: 31454
  chr5:73843900-73844064
  binary

SEQ ID NO: 34649 - DNA, 181 bp, Homo sapiens; identical to SEQ ID NO: 31455
  chr5:73932104-73932285
  hypo

SEQ ID NO: 34650 - DNA, 858 bp, Homo sapiens
  chr5:76932297-76933155
  hyper
cgagcaggagttgaggtgtgcgctcggctgggccgcccgggggggcgctgaggttgccttctcaggcggaggaggcgaaccctgtagcccgacaacgccgggcttcgattttgaggagcttcttccgggatgtcgctatactggccggagacgggccttgcgtgtccattgggggatggcgatggggaccagtttccgggtagagaaggagataactcgatacaggaacgcacaggcagcctgaaagcagcccaggatctcgacaggggaagggaagaccctgctccctttgcccaaatcctcccgccctgtccttgccttctgtcccagatcccaagcccctcgtacctgcactcgggactcggtcagcccgatacgcagtgccagctcctcacgcataaagatgtcggggtagtgagtcttggcgaagctcctctccaactcgttgagctgtgcgggggtgaagcgcgtccggtggcgcttctgcttctgttggccctgctgctggccggcttggctggggttcgggccgccctggggcccgggctgcttgtccgggtctttggcgctcaccgccagcgaggccggagtagagcccactgtggtgatgtcctccccgggcagcagagtggctccctccactgggtcagagttgggcgccaggtcccccggatggcccccggggtcggagccccccacgcccagcctacacttcaccgcctcccggtggcccagaagctcggcggcatctttcatacctgaggaggcaaggggatcgcggtcactactttcttggcgatgccaggaggggctgtcttccccgcgcagccttccttcaacccgtcctcggccccctcc

SEQ ID NO: 34651 - DNA, 180 bp, Homo sapiens; identical to SEQ ID NO: 31456
  chr5:78531507-78531687
  hyper

SEQ ID NO: 34652 - DNA, 1538 bp, Homo sapiens; identical to SEQ ID NO: 31457
  chr5:78531956-78533494
  hyper

SEQ ID NO: 34653 - DNA, 383 bp, Homo sapiens; identical to SEQ ID NO: 30271
  chr5:9122712-9123095
  hypo

SEQ ID NO: 34654 - DNA, 208 bp, Homo sapiens
  chr6:1004093-1004301
  hypo
cgacagaccccccggcgatcaggaccctggccacttctcagactttagcgcatccactcccagcaccccgcaagaccctcgctcgcccgcctgctcacccactaagtcctgcgggctcccagcaccccgcaagaccctcgctcgcccgcctgctcccggcaccccgcaagaccctcactcgcccgcctgctcacccactaagtcctgc

SEQ ID NO: 34655 - DNA, 959 bp, Homo sapiens
  chr6:10419403-10420362
  hyper
cgccggacttccccggcgccgggccccgcgggctgcgcgctttgcgcccagcaccgcagtcgctgcctgcgcccgtttttcctgtcttcgctgtctcctgggagctctcctgggcgctgccaggcgcgcctcacctacgactcccctgccctgggccacggcgcttcctctcctcctccccgctccggccccctcccctactccacccctgcccacctcaaccccagccaaggcaaaccccccgtacctgccagtcccccattttggcaagtatggacatcgcggctctgcgctcctggcgactggtccccgccgggcatgggctggagggctcggtcgggccagctccctggaatcgcttaggcaaatcctccttttttacctgctcaccaacatctcacctggtcataaagagctgggttgctacctgccgacgcatgcgcgctggcccaggaattcactccgccagctgcagtcccagcgccgcacagagctgacctgggaagtgatggatttatagccgcggcaatcttgccatcagctccagcttttcccaacagccccaacccgctttcccggtcagtccctggcccgggaaccgaagctgactgactgctggatgtgctgggtgcgatgcgagtgtgagtgtgttttcgcactccagtggtggggcatcgacaagctcgacccatggctagcctcccctcggaactttcgaactgggggagtctccactcccgggtgggggtcgggggttggggaagggctagactgctagaagcgtccagaccccatgatccccgcgcacctggacacagtggggacaggtcgccgtccccgcctccccacccgcccacgaggtgcagggcacggctggccttagcggatctgactctgccaaccccggggccacttcagcgttagattccacatgaaactgttgctcaataggtgaagac

SEQ ID NO: 34656 - DNA, 375 bp, Homo sapiens
  chr6:105750354-105750729
  hypo
cgggtacggccgctccttccgcggctgctgcttggtcttcaggttctcctcgtgcttgctgggccagtggcgcaggcgcatgttttctcaggccgcaggtccaggggcttgtacctcttgcccttgtagaatttcctgaggttttctttgtgtgagtctggttaattacggtgagaacacgggcaatggaattgtggatgacacggatcttagagagcttggagaccgcgccgcctgtcagtggcgatgcgcagctgggacagctccaccttcaggtcgtccagctgtttgagcagcaactctttctccttcccgtgaaggtcccgagacttgatcttagccattgctgcacaggccgcccccgccgcctgctcc

SEQ ID NO: 34657 - DNA, 592 bp, Homo sapiens
  chr6:106429018-106429610
  hyper
cggtgactgtgcaatgaaattgtcaattatcctctctgccttcctgcgttgaaagagtttcaagaagttgtggtgagtggatgtattcccagacggatgcgggcggtccccgggcagggaccccgaatccggggtcgcagggtggtagagccggaagattggattccatctccgcaaggattgagaaaaacggactcaccgactgaactattccatctccaagttgtttttattttccactttaagcataagaacgatgagaaccaggagccaggcggccccgcgtagcggtgggagcgcaggtacccgagagtaccctctgggggccggcccggcgcgctcgctcctcctcgcctttccgggaaccgtgcgcaggagctcacacggcacgcctgcggccaggggcaatcgggttctcggttcccggagtcccagttcccggtttccagtttccttatcgacgcgattgttccgtcggggtcttccaaggggatccgaatggtggccaagtcccgctggggaaatccgcaggggtgcggcctgcggggcctttgggggcgcacctacgccacgggctctgccattcctatcc

SEQ ID NO: 34658 - DNA, 116 bp, Homo sapiens
  chr6:108882931-108883047
  hyper
cggacaaacggctcactctgtcccagatctacgagtggatggtgcgttgcgtgccctacttcaaggataagggcgacagcaacagctctgccggctggaaggtgcgtacccacccc

SEQ ID NO: 34659 - DNA, 66 bp, Homo sapiens; identical to SEQ ID NO: 31463
  chr6:112021634-112021700
  hypo

SEQ ID NO: 34660 - DNA, 206 bp, Homo sapiens
  chr6:119030541-119030747
  hyper
cgccagattgggaagtgacacatgctggcatttctcagcgcatgcggctccccactcggctttctggagctctgccttttggcgacagagcagctagagctcctctcccctcccccatttcctctcataaagataaccagtaacaacaattggcgtgtgtgtgtgtgtgtgtgtgtgtgagagagagagagagagagagagagagc

SEQ ID NO: 34661 - DNA, 179 bp, Homo sapiens
  chr6:119510833-119511012
  hypo
cgattatatgattcatgacaagtacgggcaatttcagccccgagttcaaggtagtgttgggccatgccttcgggagctgcatcagccccgagtgcgaacatgccccccgcgaagcaggtcaggtggcccatcttgtgctccaggaggccccctttccactctgcgatataagttagtcc

SEQ ID NO: 34662 - DNA, 1492 bp, Homo sapiens
  chr6:128840521-128842013
  hyper
cgagacgctccacttgtctccttttgggttctccggcagaaggcagacatttacagtccgcttccagccccaggccggatccggggagcgcggggccagagccccaggccggatccggggagcgcggggccagcctggcggtggttttgcccgaggagcgggctcccacgcgcgagtcaggcttcctccaccaggcgcccagacctcgatgcccatgaacgctcagagtgggtccttagaaccgcatttcaacacatcttacagggctccgccaacacacacacagaacatgctccaagcagtgcccgagcgcacagggcaagcccgggagcaacccagagctgggggaggagaaaaggggactccgggagggacggggaagtagttagacaatagtcaggggaggttattcccgggacaaaaagcacctggcaaagcgcgccgaggtcagtcccttcgaatctccacatttctgacaatggcttcccagggaatttgtttaaacacccaagtggcagacagcaacaaacccgcaccacaagcaacagagtgccgtcacgggagtcgtaactactttttctttctctcttccccactagcccggcgcaggccacgcgagacgccgaagccagcaggtccccacactctccggctagaccgtgccagcctgagccccgagcaagcttcggagaggaacaatgggtgccccgcgtcccacctggcacgaactctggggacagccctccctctaccctgtgttccccacccccggacagagagagctccccacgatccttgtccccagccctagcggggacctggctcacccctcgtgagcccaggactccaggcgttcgtcggggacgccccccggccactcacctgcggagaactggccttgggccgatcccaggagaggccaaggagagaggagcaagagcgccacaaaagcaggcagcgccgccgccgcagtcgtatccatgccgagtttgggagaagtttcaagcagctttgcaaagagctgccggggggatcgccgcgaaatccacgacggaggagcgggccgggcctcgcggggtgaggacggtgagaggacagccgcccgcccgccctttttccttcttcgcggtcgccaaactacctcaggggcgaaagcgtcgccagcgtcgccggccggccgcggcggcagctctccatgctcggcggaggctgctcctgttagtcaagagttactttgctcggggagggacgggggcggagccgggggtgacgtcgccccgcgggctccgggcgcttctgaggaatgcgggctcgggcgcggcgccgccaccgcctcctgccggagagacgcgcgccagccccggccgcgcgccccgcgccgcctttgttcgcagcctgggccccgccgccagccgctgctcggagggagcgagcgagaaaggggagccggcgcagctcgctgccctgttccagaactcagaatttgagaggc

SEQ ID NO: 34663 - DNA, 821 bp, Homo sapiens
  chr6:128901277-128902098
  hypo
cgatgtcgacactctgcacatgctcctcaaacttggtgatctcctcctccagcaagtctgtccccactttgtcgtcctccaccacacactgaatctgcatcttccggataccatagcccacggacgccagcttggaggccccgctcactagcccatccagctggatagagcgcacacatgcctccagctgggtcatgtccgtcttattgtcccaaggcttgatgtccagcaggatggaggacttggccaccagcgagggattcttggccttcttggcgtacagccgcagccgctcctcccgcagccgccttgcctccttgtcttcctccttattgtcgctgccaacagatcaatgtcatcgtcctcgttatcctctgcttcttggccggggtcgtagtaaggggggcgaggggaggggcgctccacttggcgcatgggagacacgtgctgtgtctgcgggactgtggaccatggccaggcgagctcttctctcttctccggcatgttcagccaggcctccaggttggagaccgcctgctgcagctcctgcaccacgccgcgcaggctctggttctccacttccaggctggcgatctggaggacgagctcgctgtggtcttccctggggccgagctctggcgggaggcgctggccacaggcccattcatctgcttgtagaatttcctttctgtatcttcatatttgaatttgtcgagccagatcttctcatgtgctaggaattttgtagccatttttctgacgcctgccaagaatgcggctaccagaaatgaggaatcggtagacgcaggacgcctaagggc

SEQ ID NO: 34664 - DNA, 812 bp, Homo sapiens
  chr6:1313407-1314219
  hyper
cgcggcagctacacgggctggcgcaactccgtgcgccacaacctttcgctcaacgactgcttcgtcaaggtgctgcgcgacccctcgcggccctggggcaaggacaactactggatgctcaaccccaacagcgagtacaccttcgccgacggggtcttccgccgccgccgcaagcgcctcagccaccgcgcgccggtccccgcgcccgggctgcggcccgaggaggccccgggcctccccgccgccccgccgcccgcgcccgccgccccggcctcgccccgcatgcgctcgcccgcccgccaggaggagcgcgccagccccgcgggcaagttctccagctccttcgccatcgacagcatcctgcgcaagcccttccgcagccgccgcctcagggacacggcccccgggacgacgcttcagtggggcgccgcgccctgcccgccgctgcccgcgttccccgcgctcctccccgcggcgccctgcagggccctgctgccgctctgcgcgtacggcgcgggcgagccggcgcggctgggcgcgcgcgaggccgaggtgccaccgaccgcgccgcccctcctgcttgcacctctcccggcggcggcccccgccaagccactccgaggcccggcggccggcggcgcgcacctgtactgccccctgcggctgcccgcagccctgcaggcggcctcagtccgccgccctggcccgcacctgccgtacccggtggagacgctcctagcctgagtagcgccgcggggcccgggaacgccgagtgcgcgccgtcggggaggcgggaacgcgggcccgcgcgc

SEQ ID NO: 34665 - DNA, 144 bp, Homo sapiens; identical to SEQ ID NO: 31472
  chr6:13386531-13386675
  hypo

SEQ ID NO: 34666 - DNA, 97 bp, Homo sapiens; identical to SEQ ID NO: 31473
  chr6:136980882-136980979
  hypo

SEQ ID NO: 34667 - DNA, 964 bp, Homo sapiens
  chr6:137814511-137815475
  hyper
cggccgacagccgggccatgttggctgtggagagagcggacaggtgcggcggcggcggcatctggcagatggtgcaggggcagggcagaccagcccagtgctggaagccgctgcccagctgcagcgcgggcggcgtggagggcgccttgagtagcgagtggggaggccggatggtgccgatggcgggaagtgaggcggcggacagcggtgacgaggcgttgccagatgagagcgcgccgcccaagatggggtgcaccgggtgcacggagttggccgcgtgcgcggggtggccggccgagtggcccacggtcccgcagtgaaaggccgagtggtggcccccatagatctcgccaaccagcctcttcatctcctccagggagctggtgagcatgaggatgtagtttctggcgagcaggagtgtggcgatcttggagagcttgcgcaccgacggcccatgcgcgtagggcatgacttcgcgcagcccgtccatggctaggttcaggtcgtgcatccgcttgcgttcgcgtccgttgatcttcagcctcaactgctgtaggtcctgctccgacagctgcttcttgattttgtacttgctgctctctcccgcggccttggcgccagcccgcgagaggctttccccgggcatcttctgcatcatatcgccctgcgtggacgagaccgagttgagacggctctcctggtggtggtggtggcggtggtggtggtccctcaggtacatctcatccatgtccggagatgaagctctgctggagacagagctcgaatcagaattcattttattacaggggatgcggccctaccgtggggaggctttaggcgggaaattaaagaaaatcttgaattaaaaaaaaaaaatctgcactgcccaggaacccacttctccgcggcaagacgtgagaagaaaagcggagacgctgcttttccccgcctctctccctcccac

SEQ ID NO: 34668 - DNA, 751 bp, Homo sapiens
  chr6:143247656-143248407
  hyper
cgtatattctatccgggcaatgacaaacggactcaggcctcctgaggtcagcgctcctgggcaccatcaggccccacttcgggagcccccggtgctccgggcccacctgactgggcgtcctctgagtcagggaggtgccagtgctgtggtccccgcgagcccaactgtcccctgacccccgggcttttccgcaccgtggagtcccccgacacgctggggccagtgaacccgggccggggcgcgcgttctccctcccggaccagctcccggcgctgggcccgcggccgagaaactaggtctgggccggccctgcggcggccgccgggcgcggcgagccccactttctcccggcaggaaggggggaggccgagagcatttcctgttgtgcagctgagccctgcggagacgtcattgcattcatgctccctcgggtgtcagcggacggggggccaaagttcaagccgcgtccagggcaggcagcgcgcggcggcgcggcggcgcggggcgggcggccagggctcccctctcccgctggcgctcccggcgcctccgtccccggccggcccagcgctgctaccggaggccagccctggggctccgcggggaagagctgctcttcctcccggaggaaaccgagctcgcaagcccagcgctcccagccgcagactgcaggctgccctcctccaccgcctggatttcccacggggaggaaaaggcgtgcgtttccaggtgtttggaggacgcactggcc

SEQ ID NO: 34669 - DNA, 462 bp, Homo sapiens; identical to SEQ ID NO: 31475
  chr6:150654152-150654614
  hypo

SEQ ID NO: 34670 - DNA, 752 bp, Homo sapiens; identical to SEQ ID NO: 31476
  chr6:150921277-150922029
  binary

SEQ ID NO: 34671 - DNA, 310 bp, Homo sapiens
  chr6:1515515-1515825
  hypo
cgttgccacgttcatcccggggctggagctgctgcttcacactgacttacacggtgagcagcggcggcaggggaggaggtggaacccgcggcgagctgctgcttcacactgacttacaccgtgagcagcggcggcaggggaggaggtggaacccgcggccggagacacacgccgtggggtcggtcaacacacactcacgcacttgcacacgctccaaggcccggaaggaagctgaggccggcccgcctcccgccaaagggccgaggaatcccgccacctaacggcaggggcaggggccacagctggcaac

SEQ ID NO: 34672 - DNA, 256 bp, Homo sapiens; identical to SEQ ID NO: 31479
  chr6:151687263-151687519
  hypo

SEQ ID NO: 34673 - DNA, 96 bp, Homo sapiens; identical to SEQ ID NO: 31480
  chr6:152527379-152527475
  hypo

SEQ ID NO: 34674 - DNA, 376 bp, Homo sapiens
  chr6:157502185-157502561
  hypo
cgaccgatacctcaccttcatggaagagagaggctctcctgtctcaagtctgcctgccgtgggcaagaagcccctggacctgttccgactctacgtctgcgtcaaagagatcgggggtttggcccaggtaagaatgagtgagggagggggtgaaaaaggaagcattgtggataagttcttacagtggctttctttgaatgtgtggactcattttttttctcacaaaggaaaagctaagcctgtgtgaaagtcgccttcttgcaacccacgtctgtgtgctgtcagggagcactgggggaccctggctctgccaccaactcgcagcgtgacctcagcaggtcatgttcttggacctcagtttcgtcatgtatacagc

SEQ ID NO: 34675 - DNA, 195 bp, Homo sapiens; identical to SEQ ID NO: 31482
  chr6:160452681-160452876
  hypo

SEQ ID NO: 34676 - DNA, 156 bp, Homo sapiens
  chr6:164241299-164241455
  hypo
cgtgctccacgatacctcccacggatgcgtttctggcctgatgcttggcgctctggcagtctgtgtcattcaccgctctgcctctgccgcctggagacgtgccgggcacgtaccgggtccttggtaactgcggaattcgctaatgaatgggtggac

SEQ ID NO: 34677 - DNA, 131 bp, Homo sapiens
  chr6:164441358-164441489
  hypo
cgaatatgagggctcatattcaagggtacggatgtgtctcagctgggcagggcactcgctaacccccagctggggcgggagcaggggtacctgcggcaccagaggtacgtggggcctggccccggctgcgc

SEQ ID NO: 34678 - DNA, 1300 bp, Homo sapiens; identical to SEQ ID NO: 31484
  chr6:167314769-167316069
  hypo

SEQ ID NO: 34679 - DNA, 233 bp, Homo sapiens; identical to SEQ ID NO: 30280
  chr6:168137821-168138054
  hypo

SEQ ID NO: 34680 - DNA, 314 bp, Homo sapiens; identical to SEQ ID NO: 31486
  chr6:169641077-169641391
  hypo

SEQ ID NO: 34681 - DNA, 730 bp, Homo sapiens
  chr6:170454148-170454878
  hypo
cggcggtgcccttgagcacctggagaacggcagtgcccgtgagcacctggagaacagcggtgcccttgagcacgtggagaacggcagtgccctttagtacatggagaacagcagtgcccgtgagcacctggagaacagcggtgccctttagtatatggagaacggcggtgcccttgagcatgcagcgaactgcagtgccctttagtacatggagaacggcagtgccctttagtacatggagaatggcagtgcccgtgagcacctggagaacggcggtgcccttgagcacgtggagaacggcagtgccctttagtacgtggagaacggcggtgccctttagtatatggagaacggcggtgcccttgagcatgcagcgaactgcagtgccctttagtacatggagaacggcagtgcccgtgagcacctggagaacggcagtgccctttagtacgtggagaacggcggtgccctttagtacatggagaacagcagtgcccgtgagcacctggagaacggcagtgcccttgagcatgtggagaacggcggtgccctttagtacgtggagaacgacggtgcccttgagcacgtggagaacggcggtgcccgtgagcacctggagaatggcggtgcccttgagcacgtggagaacggcggtgccctttagtacatggagaacggtggtgcccgtgagcacgtggagaacggcagtgcccttgagcactcggagaac

SEQ ID NO: 34682 - DNA, 113 bp, Homo sapiens
  chr6:170493074-170493187
  hypo
cggcggctgctgccatctgctcctccctggcgctgtggggccagctcctttcttcgagttctctcactggacgcattgccacctcacacgggacccctgaccctgagctggcc

SEQ ID NO: 34683 - DNA, 235 bp, Homo sapiens; identical to SEQ ID NO: 31488
  chr6:18368676-18368911
  hypo

SEQ ID NO: 34684 - DNA, 177 bp, Homo sapiens; identical to SEQ ID NO: 31489
  chr6:21602337-21602514
  hypo

SEQ ID NO: 34685 - DNA, 873 bp, Homo sapiens; identical to SEQ ID NO: 31490
  chr6:24910930-24911803
  hyper

SEQ ID NO: 34686 - DNA, 205 bp, Homo sapiens
  chr6:36214638-36214843
  hypo
cgtaaaattacatagtactcttaaatatgtcttcttgaacgccatcgccccatcccagactcaggaccagcctccccgcgctcactgctgtcactgctttccgcactccctgcggattttaggattttagctcccatctcgcgtcctctctccagctcctcctgccccctgcctggtggtttcaccatccacttaccagcccgcc

SEQ ID NO: 34687 - DNA, 87 bp, Homo sapiens; identical to SEQ ID NO: 31492
  chr6:3734377-3734464
  hypo

SEQ ID NO: 34688 - DNA, 219 bp, Homo sapiens; identical to SEQ ID NO: 31493
  chr6:38118812-38119031
  hypo

SEQ ID NO: 34689 - DNA, 210 bp, Homo sapiens; identical to SEQ ID NO: 31494
  chr6:3880057-3880267
  hypo

SEQ ID NO: 34690 - DNA, 329 bp, Homo sapiens
  chr6:40360214-40360543
  hypo
cggtgaagtccaggagctcgttgcgcaccaccaccttcggcgggccctgcggcggggccccggctggtgcgctgcttggaggcggtggctgggcgccgttggtctgcgagtacacattgctcacggccgctgccatcttgctgggggcctcgtggttgcagaccttgtagcgcaccatgaggatgacgatgaagaccagcagcgtggccacgatgatgcccccgatgaccaggatcatggtgccgcccagaatctggctgtgcatggactggcactgcgggtagtcagccttggtgaagaactgggcgcagcccacgatgttggtggcc

SEQ ID NO: 34691 - DNA, 149 bp, Homo sapiens
  chr6:42145871-42146020
  hyper
cgctgcatctccgagggtccgggtctcccctcagcgtctcttggggcttgccgagatgggcggagccttgggttatgatgggcggggcctgaggctggagtgagcggggcccggatgggctcacggcggccgcgcccctcgcccaggac

SEQ ID NO: 34692 - DNA, 271 bp, Homo sapiens
  chr6:42928259-42928530
  hyper
cgagggtcctctcccgccgtgggattgcacagagggctgggtccgcaggctggctaaaaggacctagcccaggattgcgaggcagcgccctccctgcagctggacagactcgggcgcccggcccaaagcccggcaggggcgtgtccgcgcgctcacctgctattggccaggtggggctgtcggctgccagcagtgcttatgctttaagtgcggagcgggtggctgcggagccaggcgcggcgcaggatggtggacagcgtgtaccggaccc

SEQ ID NO: 34693 - DNA, 236 bp, Homo sapiens; identical to SEQ ID NO: 31500
  chr6:43096747-43096983
  hypo

SEQ ID NO: 34694 - DNA, 346 bp, Homo sapiens
  chr6:44044201-44044547
  binary
cggggcctgaaggctaacttctggccttcctgcttcgggaaatcattccaataaccgggaaaaaagggggcccgaggacagagcccctgccgggccccagggggagtgtcgtcggctcctttgcgtcgccggccggcggcgtggcggggactctggccggcagcctcccgcgccgtccggagcagctgacccgctggcggtgggccaggtcgcggcggggcctggaggcagcaacgtgcggcgcggcatgtcgcgggcgccgcggcagggaaatgtgggggcgggccggcgcgccccctcccccccgcctacgctggcccattcataaaacctgcaggcgctgccc

SEQ ID NO: 34695 - DNA, 37 bp, Homo sapiens; identical to SEQ ID NO: 31503
  chr6:44094355-44094392
  hyper

SEQ ID NO: 34696 - DNA, 526 bp, Homo sapiens
  chr6:45631098-45631624
  binary
cgccccgcgtctggtcgactggctccccggttgcccttcgaccatctctcccagcacacgcggggatgacaaggagcggccgccgcccgtcctggcaccggccgagggcccggaaaggagccgcgccccgcgccccagcactgcgggcagggaggagggcaccgtggacgcgggtacatccccgccgccccgagcccggcccgccgctgcggcgagcttggaggcccacgtcggggacatcctggtggagctgcggaccatgaacggccacctggacagcatagcgcgggccctcaccaaactggcttcgtccctggggccccagcctgagcccctgccagatgtttcggatgccaactaatggagctcggcgaggctgggccgccccggggccgagggatcgcttgcaccaggcatccctgcctgtccctccccagcagcgaagcgcgcccagcggaggagcggttgctctgcgcagctgcctagcggaaagcacggccctagcgtttcagcgtgaaacagaccc

SEQ ID NO: 34697 - DNA, 866 bp, Homo sapiens
  chr6:50681619-50682485
  hyper
cgggcaaaaccattacaatttagatatctacctatagaacattttttttttcctttaaaaattggaaaatacaagaagtttggatttttttttcccgattctttttttggagggggaaattgcatcgtaagctttcggagaaacccaacatgtcaactacctttccgggactagtccacgatgccgaggtattattacttttttttttttttttttttgagcgcgcgtgtgtgtggcggcggcggcggtggcggcggtggcggcggcggtggcagcctcccctgtctctaatctatattggaccgttacgtttaattataatctgtctttcgggggaagttaaggaaggaaaggggagaaagttcgttatgacatctgtcgccagggagggcaactctctgccacgttaagaaacatttgccataatgagcgggaaaacataatcttaataataaaaggggggagtgaagagaaagagatagagacggaaagaaagattctcagaaaagcaaagaaaagggactggtggggaagcagtagatgcacaagggggatggggaaaacgcaccccttttggaatgggcttattcaaggaaagggaagcagaaaagagggagtcggattccctccctcgaatgactaaggaagggagcaagttgaacgatttgcacagactggattttttaaaatatatggacaatgattttgagcagcccgggccgaacatctcggcatagacaggcgcagaatttcgatgctggggtctagttagagtggcaaggcgccccgggccagcgctcttttcgggtggactcgttcctctgctacccgcggccccggagtcagttgcaaacctggatcccaac

SEQ ID NO: 34698 - DNA, 120 bp, Homo sapiens; identical to SEQ ID NO: 31505
  chr6:550612-550732
  hypo

SEQ ID NO: 34699 - DNA, 198 bp, Homo sapiens
  chr6:64150651-64150849
  hypo
cgttcagccgaccgtcaccatgaccaacgcagatagcgagggcggaaacctccgccaccagctggacagcaacaaacaggacctgagcctcagcaacctggatgaagacccggtcaaggagctggctgcccttccaaagactaccacactggatctgtcttgtaataaatgactattgtgccgggcacggtggctcac

SEQ ID NO: 34700 - DNA, 194 bp, Homo sapiens; identical to SEQ ID NO: 31507
  chr6:7247353-7247547
  hypo

SEQ ID NO: 34701 - DNA, 192 bp, Homo sapiens; identical to SEQ ID NO: 31508
  chr6:74079530-74079722
  hypo

SEQ ID NO: 34702 - DNA, 1063 bp, Homo sapiens
  chr7:100167136-100168199
  hyper
cgagcggggcgtggcaggagccagcagggtgcatggaggccccgttccaaagccctctaatcgccagcgccaccaccgctgccacaagtccgatcactggcctcacaccgaggctttctcggttgccccgacgacgtgtccggaccgcagtcagctgatcggtagagacgcccccacgctctctgcccctataaaggctcagtcttggggtcgaggccgcctctcttggacttccctactcaaactccagttcctgggcgacgtgaggattagtctcgtggggtgggggttccggagcggtcggcggagggagggaggtagtggggagcccaggccaggggcaacagtcaccgggacactcgctgtgcgcagagtccttgccccaaacttccagtcgggagcccgggagagacgctgggcatcaagacgggtggcagcctgcccggccgctgctcccggcccgccgagttcgccacctcacccccacccctgctggcctctccccgtgctcaagacacgagacccagccgtctctgcctcttctgcagccactttattgccttcgcccctgaatgaagcccgcaggcggcggccccggggagagccgggaatggccgccgtgcccctcagccagccgctgccctgggcctgccctgccgacgtgcggttctgcggccacctgcgcgcagacccgccgcgtcccgagtgttccgagagcgagcagaagtttcgcgcgtgccgagcgcggctccagcgcagcctgagcctggcgggtgcgtgcaccaccagcaagtgcgcagatgcgcgccagcaccacctgatcgtcctctacacccgcgacagcagcctgcgcgtggcggcggcaggcgaggcggagcagcaggcgtgatacaacaccctgctcgaggagcgcggtgatgccggtgaggcccgagccccgggcttccgggggcctcgggggcttctggctgtggtttctccgtggctcgcccctcccccaggtcgccgaaagttcaaacattaaaggggcaggtttagagttctccgggcacaggcccggccc

SEQ ID NO: 34703 - DNA, 333 bp, Homo sapiens; identical to SEQ ID NO: 31512
  chr7:1001822-1002155
  binary

SEQ ID NO: 34704 - DNA, 217 bp, Homo sapiens; identical to SEQ ID NO: 30302
  chr7:100405032-100405249
  hypo

SEQ ID NO: 34705 - DNA, 477 bp, Homo sapiens
  chr7:101603073-101603550
  hypo
cggaggatttcaccgcgtacatattctctgtttggacatggtacaacctgtggacccttttaaacatagttacatgtttgactctttatagggtaataactcgattaattttgcaaggctttttagaataccattgttctcttgaaaagaacaggtttgctgttttaacaagactttaatgccatcgagatgcctcacattggcacggttgcgtaagaatcgcacggtcccatgaaatgaaattgagagagctttttccggcgcctggttggttggggcggcctccgttcggtgcttttttcatcctcgacccagtgaccaactgtgtttgccctgatgtttctttcaattccaccattccgaaatgtctccggaatctgtcgttttagcttttgcagcaaggttcgttgtgtttgtcttgcccgcttcaggtttctctaatgagattcacgtgtaaaggaggattggcaattaatc

SEQ ID NO: 34706 - DNA, 429 bp, Homo sapiens; identical to SEQ ID NO: 31516
  chr7:101649223-101649652
  hypo

SEQ ID NO: 34707 - DNA, 177 bp, Homo sapiens; identical to SEQ ID NO: 31517
  chr7:1075890-1076067
  hypo

SEQ ID NO: 34708 - DNA, 812 bp, Homo sapiens
  chr7:123672867-123673679
  hyper
cgtgcatcccgtagaagtagaggcgcatccaggcgggcagcgtggcgctctcagccggcgcttcagcagtggacagcggctccgggcagccggctgccgcctcgcttcctggcccgccaggggcccccggacgccgcgccgcgccgcccctccgtgcggggccctcgctgtccacgtcgctccccgccatgggctcggaggctgtccgaacgcccgaggctgcaccgccgccgctgccgggtgcgcggagctgcagggccgagcggccgagccccgcgccgcctcctggccgctgccggcccccggggggcgcgcagggagctccgtcccggccgcggtcccgcggcagcgggggctgatgcactcaggggactcgcgggccgcccggctagcggaatccccccgccgtggccccgctgcgccctcccttccagtcccgggcgaggtgccgcccgcccgcgcccgctctagctctcaccctgcgcggcctaacgggcaccgcggcccagccaggggaggcggcgccggggctgtgaggggaaatgcagaagcttgtggaagccccatcccctccgctgcttagccccgcgcctccgctgcaggctctgggaacgtaacgcgagcagcggcggccctgcccccgccctgccaatgcccctctccgcctgcctcgacctctcccgccttctcaggccgcccccacgcgcccgcccgccgcaccgagtcccacagggtctgctcgggaaggcccggccctgcttcttcctcccggtgcgcccactcaacacaggggctccggtcgtgcggggggc

SEQ ID NO: 34709 - DNA, 174 bp, Homo sapiens; identical to SEQ ID NO: 31520
  chr7:127670460-127670634
  hypo

SEQ ID NO: 34710 - DNA, 220 bp, Homo sapiens
  chr7:132418888-132419108
  hypo
cgcccccacctgagcctataaaaaccggataccctagcaaggcagagacagaagctgttggacggtgagaggaacacgttggcggaagaagacaagcagctggatatcgaggggacatcgaggggagcatgctggcagaagaacacaccaacagagggacacccgcactctggctggtctcacaacccgcaggacaaggcagagtttggctggggcaatc

SEQ ID NO: 34711 - DNA, 474 bp, Homo sapiens
  chr7:134918319-134918793
  hypo
cgagctgattactgacgcgagggtcccctccctgacccctcgcgaccctgcgaggtgagtcagccccgcccctccctcttctctctcctcccttttctgtcgccttcggacaacttgtaacactgtttcttccactgcccacacgcccattggcccgtcaccacgcatccccattggctgtggcggccagggacagggccgcgattggtccccacccctgtaacgaggtgccaggtctgttttctgacccagacaggaaccgcgatccccactccggcgcacgaagccgggtgactgctgtcccgggagtggggacgtcgcgtgcaccgttggcgagtaagtatcctttgaacgctcctctccagaaaggtgcccttgggcatatgagtgtttgtgtagacttgaaagaattcagtgcagcggagcctaacaggtgaacttttagcgcggggttcacaggagccttttgtatcc

SEQ ID NO: 34712 - DNA, 242 bp, Homo sapiens
  chr7:135412144-135412386
  hypo
cgctgctggggtggaggacgggcagaggcagcagcaggagcgggacgcagacgaccagcagcagcttccggactcggagcaggccctgcagcaggcccatcgcgcctctgtcctctccagctcgtccttggaccccgctctgccggcgaaaggcttcctgcctgggcactgctctctatccagaaagacttcttaaacctttcttggcttccgagagtcctccttcgtcttgggggcagaac

SEQ ID NO: 34713 - DNA, 256 bp, Homo sapiens; identical to SEQ ID NO: 31526
  chr7:139257804-139258060
  hypo

SEQ ID NO: 34714 - DNA, 176 bp, Homo sapiens; identical to SEQ ID NO: 31527
  chr7:139717431-139717607
  hypo

SEQ ID NO: 34715 - DNA, 752 bp, Homo sapiens
  chr7:14028689-14029441
  hyper
cgcaaatctcagctcagtattttatattttgagcatttagctggagatttcctcaggatctggacttctatcaacctagaggggaacaagatggcttttaggcttaaaaaaaaatcatgaatgaagctcttgaatttgcatagctaattaccctccgacagtcccattcacaaaaataaccctccctacaccgcctccttcacctggatccaaagagagccaacagagttcacaatttacatattttcggtagtagcaaaaatccgaacaagaggcgatgtatttatttacactctcgatgtttccctgcgcggtcggtgtaccccgggcagctctgattcgcaaacgtgtgcaaaactagcaatggcgatcaacgagacttgctttgcacctaacgggactaaagagacggagacacctctttcatcaggatagtttttgcgacccacaaccatgcaattatctggagagacataaaaagttgttggaaagacccacctgaaggccacgctaggcgaaaggctgcaaaaacttccctccaaatttaataaaaacattaattatagcccagcacttcccccttggaagccgaaagcgcctctgacagagctcaattcggtggtttttcctctacttctcctccaggggcctccaatccaaactgatggatcgctgcctcccattggctccgcgtctctttcacaagatcagatttcgggctgtcaatcaggcggcttgctgccccttcccgc

SEQ ID NO: 34716 - DNA, 158 bp, Homo sapiens; identical to SEQ ID NO: 31530
  chr7:148979109-148979267
  hypo

SEQ ID NO: 34717 - DNA, 1438 bp, Homo sapiens
  chr7:150069005-150070443
  hypo
cggcccggtggagatgccgtcgaccgccccttccagtgtgcctgttgtggcaagcgcttccggcacaagcccaacttgatcgctcaccgccgcgtgcacacgggcgagcggccccaccagtgccccgagtgcgggaagcgctttaccaataagccctatctgacttcgcaccggcgcatccacaccggcgagaagccctacccgtgcaaagagtgcggccgccgcttccggcacaaacccaacctgctgtctcacagcaagattcacaagcgatccgaggggtcggcccaggccgcccccggcccggggagcccccagctgccagccggcccccaggagtccgcggccgagcccaccccggcggtacctctgaaaccggcccaggagccgccgccaggggccccgccagagcacccgcaggacccgatcgaagcccccccctccctctacagctgcgacgactgcggcaggagcttccggctggagcgcttcctgcgggcccaccagcggcagcacaccggggagcggcccttcacctgcgccgagtgcgggaagaacttcggcaagaagacgcacctggtggcgcactcgcgcgtgcactccggcgagcggcccttcgcctgcgaggagtgcggccgccgcttctcccagggcagccatctggcggcgcatcggcgcgaccacgcccccgatcggcccttcgtgtgtcccgactgcggcaaggccttccgccacaaaccctacctggcggcgcaccggcgcatccacaccggcgagaagccctacgtctgccccgactgcggcaaagccttcagccagaagtccaacctggtgtcgcaccggcgcatccacacgggcgagcggccctacgcctgtcccgactgcgaccgcagcttcagccagaagtccaacctcatcacccaccgcaagagccacatccgggacggcgccttctgctgtgccatctgtggccagaccttcgacgacgaggagagactcctggcccaccagaagaagcacgatgtctgagacggtgggcggggccgtgttggctgagagagggctggggtccttcgtggtgggagtcgcagtgggctgggggtgcctgcctagtgctggagtaggggacaatgggaatcctagaggggatggaagacgcggggagtgagctgggtgggccctgctagcgagagaggtcaaccccggtggccagggaacccacttccaagcgcagggacgccggcctccagctggtgtgtgctaaggctccgtcctgactgccctgtgccctggaaaagcagcaatagcatccgccccttagagccctctggctagaggagccaccagtggaaaggaagaccctccatcctctggtattaacgccttaatgcccctgtcttttactgtaagttacttaagatcatttttggaagcaggc

SEQ ID NO: 34718 - DNA, 35 bp, Homo sapiens; identical to SEQ ID NO: 31533
  chr7:150102887-150102922
  hyper

SEQ ID NO: 34719 - DNA, 526 bp, Homo sapiens
  chr7:150748058-150748584
  hyper
cgtcccatggcgggcagggcccagggagctgaggctgcttctaaagccatctccccggtacccgcaggcgacgtgccagtgtgcagcccccagcagtacaagaactgtgcccacccggccataggtaagggcgagcctcccccacctcccgtccgccccgctccgcccgcgggcgtctgacgcggcccggtggcccgcagatgccatgcttcgcaaggactcgtgcgcctgccccaacccgtgcgccagcacgcgctacgccaaggagctctccatggtgcggatcccgagccgcgccgccgcgcgcttcctggcccggaagctcaaccgcagcgaggcctacatcgcgtgagctgcgcggggcgggcgggctcctccgagccgggggctcccgacggggcggaacggggcaggccaggccgtagccctagtgcgcacagcccgggcggaggcagcctccgcagcctcactggctctggggctccgtgctggttgcttaatctttctggccccgggggatgctgac

SEQ ID NO: 34720 - DNA, 960 bp, Homo sapiens; identical to SEQ ID NO: 31534
  chr7:150784079-150785039
  binary

SEQ ID NO: 34721 - DNA, 456 bp, Homo sapiens
  chr7:150812868-150813324
  hypo
cgtctggggtcttcggcagtggccgaggaggacaggccggagggggagctctcgggtgcggcccaggaaaggaagaggagactcaccagagtcagagggctctgggctaggccagacacctttcctagttccctgtcggggcagcgcgctcgcctccggttgcccctgtgcatgaggttagggactgctgtggacctggtcgtcataactgctctttgacacaaacttgggacagtgcctctgggagccagggagggaagcagtgctgcccagctagagaggggttcccagagctagcccgagcacccatgtggaacctggaggtgacggagatgggggcctggctgtcggagggctctgggtaaagggacttgccagtcaggttctgaggacagactgaagggaagggagcccaggaggcggcctccctgctaaggaggagcttagagaggaggc

SEQ ID NO: 34722 - DNA, 557 bp, Homo sapiens; identical to SEQ ID NO: 31537
  chr7:150816833-150817390
  hypo

SEQ ID NO: 34723 - DNA, 370 bp, Homo sapiens; identical to SEQ ID NO: 31538
  chr7:151038589-151038959
  binary

SEQ ID NO: 34724 - DNA, 154 bp, Homo sapiens; identical to SEQ ID NO: 31539
  chr7:151802406-151802560
  hypo

SEQ ID NO: 34725 - DNA, 193 bp, Homo sapiens; identical to SEQ ID NO: 31540
  chr7:152562704-152562897
  hypo

SEQ ID NO: 34726 - DNA, 134 bp, Homo sapiens
  chr7:154922505-154922639
  hypo
cgtggatgttgtgtcaccgtccacactccccgctggtcccaccaataggactaaagccctcatccttctggctggccgctgccagtgccgtcagctgaaggctcccggctaagtctcttccggtctcatgggtc

SEQ ID NO: 34727 - DNA, 172 bp, Homo sapiens; identical to SEQ ID NO: 31541
  chr7:155079954-155080126
  hypo

SEQ ID NO: 34728 - DNA, 217 bp, Homo sapiens
  chr7:155898168-155898385
  hypo
cgtcagagaagcacgaatgcgaaggccgaaagggaagcaagcctggggagctggaaacctgaataagacctgcggggccacatggaggcgaggggaagtcagaagcagtgagggtggagccccgcggagcctgtaagtccctgtgagggctccggactttgtgccgttctccgcacccctcaggcccggtggagtgcgtgacccctacgccgggccc

SEQ ID NO: 34729 - DNA, 288 bp, Homo sapiens; identical to SEQ ID NO: 30317
  chr7:155916075-155916363
  hypo

SEQ ID NO: 34730 - DNA, 32 bp, Homo sapiens; identical to SEQ ID NO: 31544
  chr7:156734691-156734723
  hypo

SEQ ID NO: 34731 - DNA, 169 bp, Homo sapiens; identical to SEQ ID NO: 31545
  chr7:156782599-156782768
  hypo

SEQ ID NO: 34732 - DNA, 356 bp, Homo sapiens
  chr7:157085941-157086297
  hypo
cggccgagcctctgctcccacggtctcaggccctccccgccctgatgagtctccgctcccaacacaagggccacgtggtctggagggaccttttgcccagctgcaggggccatctcagggagaccccgccttggaggacttgttctccggatctccagacgtttaggctgaaagtgcagagatttagaagtcggacagggagttggggagcagcgctgtgcacgttccactcacctgaacggcatcgtctgagtcgcgtttgataaaattcgtaggaggccactggtctggcctgagctcctgcaggaggcctggcagaacagaccaaaacgcagccactcgtgctagagctccac

SEQ ID NO: 34733 - DNA, 144 bp, Homo sapiens; identical to SEQ ID NO: 31547
  chr7:157100035-157100179
  hypo

SEQ ID NO: 34734 - DNA, 650 bp, Homo sapiens; identical to SEQ ID NO: 31548
  chr7:157202474-157203124
  hypo

SEQ ID NO: 34735 - DNA, 309 bp, Homo sapiens; identical to SEQ ID NO: 31549
  chr7:157336700-157337009
  hypo

SEQ ID NO: 34736 - DNA, 402 bp, Homo sapiens
  chr7:157404210-157404612
  hypo
cgtaccctcccccaaaaagacacactggagtcccagccctgggaacatgaccttatttggaaatagggtctttacagaggtaagcgagcggagggcatttgggcggccctaatgcaatatgactggcgtgctgttaggaagaaggactctgcacacccacacgggagggagagcgcccgtgtgaagacgaagacagccgcggtcatgctggggacacgcggagggagcgcgcccgtgtgaagacgaagacagccgcagtcatgctggggacacgcggagggagagcgcccgtgtgaagacgaagacagccgcagtcatgctggggacacgcggagggagagcgcccgtgtgaagacgaagacagccgcagtcatgctggggacacgcggagggagagcgccc

SEQ ID NO: 34737 - DNA, 437 bp, Homo sapiens
  chr7:157445780-157446217
  hypo
cgctcttggtgctgagcctgccccccagacggtgcagccggcctctcccacctgctggggctcctcacatctagcttggcctccagacatcaccaacctctgctgtttatttcatcggatcgtggggttcagatgccacgttttgtccaacgtgccccaggagtggctgcatgtcaggaacatgtcgctgggaatctctgtggcttatctgaccatcctgccatcctcaggtgaggggcactgaggtggccggttgggtgtctggcggaaacgaggctttgcgcacagagggctgggctgctggatcaccacggaattggctgccttgtagctgtgatgagtcggaaggtcggcgactctgatgcgttcctgcggcaccaacctgcatgtgctttctacagcctgtgtgtgccagggagggtggcggtcagtgcccc

SEQ ID NO: 34738 - DNA, 203 bp, Homo sapiens; identical to SEQ ID NO: 30325
  chr7:157642963-157643166
  hypo

SEQ ID NO: 34739 - DNA, 230 bp, Homo sapiens; identical to SEQ ID NO: 31555
  chr7:157653875-157654105
  hypo

SEQ ID NO: 34740 - DNA, 537 bp, Homo sapiens
  chr7:157702953-157703490
  hypo
cgggtgcaggaccacgcacgtacgccggatcacgcacgtacgccgtggggacgggtccaggatcacgcacgtacgccgtgggaacgggtccaggatcaggcacgtacgccggatcacgcacgtacgccgtggggacgggtccaggatcacgcacgtacgccgtgggaacgggtccaggatcaggcacgtacgccggatcacgcacgtacgccgtggggacgggtccaggatcacgcatgtacgccgtgggaacgggtccaggatcacgcacgtacgccgtaggaacgggcgcagaatcacacacgtacaccgttctgcacagctggcggacgcttcctctttcccacatggtgtggtgtaacctgatcgtttgtatgcaaagcaaacccatgcacagctgactgtgtcaaaacacagccagaaagatgccatgcggcagggcacgtgtgtgtgtgtgtgtgtgcgagcgcgcgtgcgcccctgcgatcagcccagcagacagagcacgttcctgtaacgtgttgtgatccactgcgc

SEQ ID NO: 34741 - DNA, 196 bp, Homo sapiens; identical to SEQ ID NO: 33587
  chr7:157934555-157934751
  hypo

SEQ ID NO: 34742 - DNA, 195 bp, Homo sapiens; identical to SEQ ID NO: 31559
  chr7:158103405-158103600
  hypo

SEQ ID NO: 34743 - DNA, 364 bp, Homo sapiens
  chr7:1734701-1735065
  hypo
cgctgcagacggctccggatgcacgtggctgtgccaggcagcagacgtggccgacaggcacatggtgggacctgctctgtggctccagagctcatgcgcagcccgctggggctgtgagggttctgtccatccaccaggaaggccaccaggaccctgctcctgcctgagaaccccaggaagtagtagcgtgccaggtgcgtggccggcctcccagcccttcccagcaccagctgcgtcctcctcctccagggctgcagctcagggctcaggtgtccgcgtcgagggcactccctaaagggcaggagcaggaccattggcacaagcctgggcgagtctcgctgggaggcaggagcagactcagccc

SEQ ID NO: 34744 - DNA, 913 bp, Homo sapiens
  chr7:1784384-1785297
  hypo
cgaggccatcccacagcagatcaacagcaccatcgtggacctgcggctcaacgagaaccgtatccgcagcgtgcagtacgcctcgctcagccgctttggcaacctcacgtacctcaacctcaccaagaacgagatcggctacatcgaggacggcgccttctcgggccagttcaacctgcaggtgctgcagctgggctacaaccggctgcgcaacctcacggagggcatgctgcgcggcctgggcaagctggagtacctgtacctgcaggccaacctcatcgaggtggtcatggccagcagcttctgggagtgtcccaacatcgtcaacatcgacctgtccatgaaccgcatccagcagctcaacagcggcaccttcgccggcctggccaagctgtcggtgtgcgagctctacagcaaccccttctactgctcctgcgagctgctgggcttcctgcgctggctggccgccttcaccaacgccacacagacgtacgaccgcatgcagtgcgagtcgccgcccgtctactccggctactacctcctgggccagggccgccgcggccaccgcagcatcctcagcaaactgcagtcagtctgcaccgaggactcgtacgcggctgaggtggtcgggcccccacgtccagcatccgggcgctcacagccgggccgctccccgccgcccccgcctccgccggagcccagtgacatgccctgtgccgatgatgagtgcttctccggggacggcaccacgccactggtggccctgcccacgctggccacgcaggccgaggcccgccccctcatcaaggtcaagcagctcactcagaactcggccaccatcaccgtccagctgcccagcccgttccaccggatgtacaccctggagcatttcaacaacagcaaggcctccacc

SEQ ID NO: 34745 - DNA, 392 bp, Homo sapiens; identical to SEQ ID NO: 29396
  chr7:2298049-2298441
  hypo

SEQ ID NO: 34746 - DNA, 620 bp, Homo sapiens
  chr7:23749573-23750193
  hypo
cgtgaacagattaggaaagaccacgaaatcctacgtcacctctaaagtcacagcttgaagccttgcgaaaggaactggccctagaccccaccccggcctataaatcaccagggcgcagcctcagtgcctgggggtcggcagcagccagcgtcaggcggctcccgcacgcttcttcctaggcggcaggccgtggctgccacgtgactcccgctaacaccggatgatggcgcagcgctgtgcacgcaggcgcagtgtggggcccttgcggtcgaagctcacgcggtaagccgctgcacgtgtgctacggcgggcggagggccgaaagtccagtatgtgggtccagggtcactcttctagagcttccgcaacggaaagtgtgaggtcagtagtagtttttgtggtacgtgcagtggtggccgcttcaaggactattttcgtcgctgcttgcgttttaagtctccaatcctgggacgaggcccatttcagggttttctgtcaccttctagccgcccgccaccccagaggggtgccagatgccccagtttttgagtgcatgcaggcaggcgaaagtggctcgaaaagacctccggcctgaatgatctccatgaagacgcggtcac

SEQ ID NO: 34747 - DNA, 1296 bp, Homo sapiens
  chr7:2472811-2474107
  hypo
cgcgtgatgatcgtgctgagcggaagcctgctgcaccgcggtgcgccctaccgcgacccgctgcgcatcccgcgcgagcacgtgcacaacgccagcgcgcacctgaccttcaacaagttctggcgccgctacgggaagctctcccgccacctcatgaaggtcaagctcaagaagtacaccaagttcctcttcgtgcgcgaccccttcgtgcgcctgatctccgccttccgcagcaagttcgagctggagaacgaggagttctaccgcaagttcgccgtgcccatgctgcggctgtacgccaaccacaccagcctgcccgcctcggcgcgcgaggccttccgcgctggcctcaaggtgtccttcgccaacttcatccagtacctgctggacccgcacacggagaagctggcgcccttcaacgagcactggcggcaggtgtaccgcctctgccacccgtgccagatcgactacgacttcgtggggaagctggagactctggacgaggacgccgcgcagctgctgcagctactccaggtggaccggcagctccgcttccccccgagctaccggaacaggaccgccagcagctgggaggaggactggttcgccaagatccccctggcctggaggcagcagctgtataaactctacgaggccgactttgttctcttcggctaccccaagcccgaaaacctcctccgagactgaaagctttcgcgttgctttttctcgcgtgcctggaacctgacgcacgcgcactccagtttttttatgacctacgattttgcaatctgggcttcttgttcactccactgcctctatccattgagtactgtatcgatattgttttttaagattaatatatttcaggtatttaatacgaaatgtggaagggaatgctggagtaaaatatcccctctcccctccgcccgcccacccgcccgcccgctcgcccgctcgcccgctcctgtggtttttctgagcgtgcgggcgccgggaggggatgctgaggctgatggagctgcctccagggctagggccactcaccggaggagggcggggcctgcacttgaagtcaggccgcacctgtctgtttttggaagggtagccgacaaatccttccagagggaaagttctttgtttaagtgttgtacttgaaaaggtcaatcttcagggcttcctgtttgaagtcaagtcagaggtaaaccggtcagttacagaagcaggatttctaggatttctaactccagctgttcccatactgtctagtttaaattatggctgttaaggccgggc

SEQ ID NO: 34748 - DNA, 74 bp, Homo sapiens; identical to SEQ ID NO: 31567
  chr7:3211469-3211543
  hypo

SEQ ID NO: 34749 - DNA, 119 bp, Homo sapiens
  chr7:328241-328360
  hypo
cgctggatgtgtctgagagccgctggatttgtgagattcactgctggtctttgagaacgtccccaaaacaggctgcagctcccgactggctgatcgccggctctctgtttcccttgcgc

SEQ ID NO: 34750 - DNA, 123 bp, Homo sapiens; identical to SEQ ID NO: 31568
  chr7:4254687-4254810
  hypo

SEQ ID NO: 34751 - DNA, 468 bp, Homo sapiens
  chr7:44153157-44153625
  hypo
cgctctggggcagccggatcgttctccctccgcagccagtggtggtgattactggcgaatcttgaacccgggtgagtaccgcgtgacagcccacgcggagggctacaccccgagcgccaagacctgcaatgttgactatgacatcggggccactcagtgcaacttcatcctggctcgctccaactggaagcgcatccgggagatcatggccatgaacgggaaccggcctatcccacacatagacccatcgcgccctatgaccccccaacagcgacgcctgcagcagcgacgcctacaacaccgcctgcggcttcgggcacagatgcggctgcggcgcctcaacgccaccaccaccctaggcccccacactgtgcctcccacgctgccccctgcccctgccaccaccctgagcactaccatagagccctggggcctcataccgccaaccaccgctggctgggaggagtc

SEQ ID NO: 34752 - DNA, 475 bp, Homo sapiens
  chr7:44746549-44747024
  hypo
cgaagtctgagccaagctgttttgaaggctagcctggtgttacttgatacccagagctggccatgtctgctgtgtatttgttacacgtaacgtgcttttcaaagtgtgcctggtctgagcaaatacagggcatcagaggctggtgaaggggaagcatctctaacccttgaaagctgcgtctcctggcagcagtccctggcacagccctgggcccaggagagctctcagccacatacctgagagaaccagcctagccatgggaactctcttgtaggaacccacttccagcgggtgatcccagaagatggccctgcagctcagaacccagaaaatgtcaaaaggcttctcttctgcaccggcaaagtgtattatgacctcacccgggagcgcaaagcacgcgacatggtggggcaggtggccatcacaaggattgagcaggtgagggcaggtggtgccatcagggtgtccccccagc

SEQ ID NO: 34753 - DNA, 173 bp, Homo sapiens
  chr7:45222845-45223018
  hypo
cggcatccacaggcagttcttctccaactgcaccgtggacagggtccacttggaggaccccccagacgaggttctcatcccgctgatcgttatacccgtcgttctgactgtcgccatggctggcctggtggtgtggcgcagcaaacgcaccgacacgctgctgtgagggtccc

SEQ ID NO: 34754 - DNA, 302 bp, Homo sapiens; identical to SEQ ID NO: 31573
  chr7:455133-455435
  hypo

SEQ ID NO: 34755 - DNA, 164 bp, Homo sapiens
  chr7:4784755-4784919
  hyper
cgggaggtgggagcggggccaggccagaagagctggctgcctgcaaggctgtcccctcccagtgccgccccgcccccgcggtgcctgccttcctaatttggtgtgcattcgcctcgccagtcctcattggccgtggagtggctggctcggtgtaggccgggctc

SEQ ID NO: 34756 - DNA, 291 bp, Homo sapiens; identical to SEQ ID NO: 31575
  chr7:479019-479310
  hypo

SEQ ID NO: 34757 - DNA, 94 bp, Homo sapiens; identical to SEQ ID NO: 31576
  chr7:48147036-48147130
  hypo

SEQ ID NO: 34758 - DNA, 527 bp, Homo sapiens; identical to SEQ ID NO: 30351
  chr7:4917102-4917629
  hypo

SEQ ID NO: 34759 - DNA, 1299 bp, Homo sapiens
  chr7:502717-504016
  hypo
cggggtcgtgggtgctctggcgggacggcccccaggcagccccgggccaggccagcccagaagggcctaggaggcagccgcgtggttaaagtgggggtgctgtttttgttgcgggatgtctgtgggtttgaacccccttgccctcatcacactggtggtgtgagccttgctcggaaagctggatttgaacgtcgtctgggtttggcgttggccctcagggcccggcgtccttccccggcgctgggacccagcctccggggagccgtgaagccctgccgtcttgtggctccaaagccggtccaccaatgacctcgtgccagcggcatcacgacgctgcctcacaccgcacaagactcgccgggaagatgcgagacccatgacagagcccagaaaggcgacggggtggcccaaggtcacacccacgccaggcccagcactctgctcttcccgctcacccactcggccgggcctgtgccctcccgcccggccaagtgggggctccaggaagggcagcgagtgccccgcggccccggccccactgcgggcggccggaacacagagggcggtgaggaaggaggcgttccctgccgggtgccctccagcaggattcgcgaacccaggggagcgagcgggaggattttccatgtgaggccggcttcctggggcgaggcccacccggcgccagcgtggagagaggagaggagcaaagcgcctcgacacattctccctcggtgatttaatggccggagcattcgtgcgatatttatgcagtaaatccttccactggggggtttcactgtgtcacgggaggctcctcccagcccgtccccatcccgtcccccccaaaaaaagaatcctgagaaaatctcatttcacagtttcccatcgagccaggtgcacagcagctgcggtgggcatggcgggcgcgggtcctggggaacaccctctgctggcgtccgcagcccgggagggagcgtgaagtggaggatctcggcaggcgtggctgtgtccaggcaggcgggtgctgccgcgtccccggctgcagggtcttggttccccggagccacaggacggcagggcttcacggctccccggaggctgggtcccagcgctggggaaggacaccgggccctgagggccaacgccaaacccagacgacgttcaaatccagctttccgagcaaggctcacaccaccaggaaagccgatacactttctaaactccacttctgagttgaatattcgaaataggctcttaaagcaaatgttggcccccacgtcagagtcaaccatgttcatc

SEQ ID NO: 34760 - DNA, 800 bp, Homo sapiens
  chr7:50343211-50344011
  binary
cgggtgggcactcgcatcctggggccggagcctgaacccgggagccaaggggccccagttccagggacgtgaagctgagcgtacagcgggcgctcccagacactggggaaagtgctttacgatgtcccgagtccctccagtctcgccagcggggcgagcgtgagggtgccccgaccgaccagcggccccgggtgcagggtggcgggcccggcggcgcgcgtccccctccccctcctggcggcccgcacgtgtcgcccgcgccgcgcccccacgggttacgcgcgggtcccgcagcgccgcggccgagccgggctgcccggcccgcggacacagcgccggccgccgcatcccgtgcggggccgcggcgcgatgctgcgctggaatgaggaagcgcggcggcgaggggagggcccgggcgcggtgcgcgcgggggtggcggcggcgcgccgagcgggcccggcgcgggcgagcgggctgcagccggcggcggcgccagcaggtacggcccgcacccgccgccgccccggcggcctttgggggctgagccggagcccggcgcgattgcaaagttttcgtgcgcggcccctctggcccggagttgcggctgagacgcgcgccgcgcgagccgggggactcggcgacggggcggggacgggacgacgcaccctctccgtgtcccgctctgcgcccttctgcgcgccccgctccctgtaccggagcagcgatccgggaggcggccgagaggtgcgcgcggggccgagccggctgcggggcaggtcgagcagggaccgccagcgtgc

SEQ ID NO: 34761 - DNA, 200 bp, Homo sapiens
  chr7:52736865-52737065
  hypo
cgggcaggcggcccgcccaggccacgctttccgtgtcctctggcccgcgaggctttgcatggacagaaccaacggcgagccgcgccctggggactccaggctgccgggatccagtcccgcctccagcgcaggctccaccctggggagctcccgagaggcctgcgcgctcctgccactctccaagcctgcaaggaagaacc

SEQ ID NO: 34762 - DNA, 120 bp, Homo sapiens
  chr7:55223544-55223664
  hypo
cggctcgtgcgtccgagcctgtggggccgacagctatgagatggaggaagacggcgtccgcaagtgtaagaagtgcgaagggccttgccgcaaaggtaggaagcccgccggtgtgcggac

SEQ ID NO: 34763 - DNA, 573 bp, Homo sapiens; identical to SEQ ID NO: 31581
  chr7:55553240-55553813
  hypo

SEQ ID NO: 34764 - DNA, 367 bp, Homo sapiens
  chr7:557636-558003
  binary
cgcacgcgcgcgcagacacacacacgcgcacacacatctcactcacacactcgccccaccccgggctccggcccagccgcggccctagcgccgactaagacgcccaaatccagccggcggccgggagaagaagcctccagggaaagcgagggttaaacttccacctcgcgcagctctccgtgccctgcggagaccaccctcacctctggcctcccccactcccctccccgatttttaaggagagtcgggggtcgctggggagcctgaagcactaagttcccacgacgggggctgtggaaagtcattcatcacagcaaagctcccggggatggggatggggatggggatgggggggcggggacgccgc

SEQ ID NO: 34765 - DNA, 427 bp, Homo sapiens
  chr7:57247618-57248045
  hypo
cgtcggttgtccaaatcggcagggaagctccagaggccacccagctccttgggctcccgcgacggactctccttggggtacagcatcccgccttgcagtgccagcacacagcaacagcggcccaaacgccgtgcaggccacacctgtccactaggtcacgctttccactccactgcttggccaccgtctgcagggctaagagcagtgcaggaggaggctgcggacaggtcgcatcaggtacctgagacgatccgcgccatctttgctgagggcgagtgccaggcctagaggggcgggatgggcctggcgctgcccagtggggcctgtggctggaaccccgggctaggcctttggggaagcgggaccctcactctcagccccagccaagaagggcaaggtcggttccccaccccagcacagtctggac

SEQ ID NO: 34766 - DNA, 331 bp, Homo sapiens
  chr7:63652630-63652961
  hypo
cgccttgggcacctcggcctgcgtcattgcgctctgcctggctgcggccgctgtggccaacacctccccggagctcctggagagcgaggcgaagaaagactcagccggcacaaggcaaaggttcagcgggttgagggttcaaggacacggaacgggtgcctgggtggaaagcggtcaccaggtgtgagtgtcaccgtggggccagtgcccagttttgctgcccccgcttcctgaagatcgcagctggagccacctgggcgcagcgtttgatgtggcacctgcagtggccaaagtgacacccaaccgtgaggacgctgcagggagtcggcac

SEQ ID NO: 34767 - DNA, 793 bp, Homo sapiens
  chr7:64712213-64713006
  hyper
cgctgtccctgtcacccgtgttcccgtggctctgggcccctgccacgccaggcgtgctcttctgtttctggctgtcccaccggcgatgctgcgcttccacaccacccggcgcacaggcgttggtagatgtggaaggtaccaagagcggcaggaggaaggggcgcgcggacacccagccccttcccgcgcacccagagcaggaagagcagcgcgcacccggtcagcgacgcggcgggctccactgtggcgcgcgcactccgagcacggagggctgcaggctcacgccacctggctccgcgcccatcccaatccgcacccgccgcccaggaaccggggctcaccctccgcctgacaattgtctcggggtgccgagggtccgtggcccgttgcccgggaggtgaccactgaggagtcgcgctgggtatcggaccaggaactcactgctttcattggctgcggaggtcagaccgtcccaccctcttctccccgccgccgcggcaaggccagggcgaaagggacaagtgcgctgctggggtcctctgcgctgtgcgggtccgggactcagggttcccggctgctaacaaggctgcgtagcttccccctcccctcctccttaggtggcaacttgtggacacacccattaagcggtcaggcgtcaggtttcctcccgagaggtgggaggcgccctggccttgattcatcgtgaagctaggcaggagatttcccagccacggagggtggaaagcttgccttgacctcagcaggtcatgtcactccgtgtgcacaaggcctc

SEQ ID NO: 34768 - DNA, 221 bp, Homo sapiens
  chr7:6560188-6560409
  hypo
cgcggctttggcccggccacctgtgctggaagaagctctcgagggcccggcagaccccatagcgctcaggaggtgtgagtaggtgctccagctgctggctgaaggtcctcccttggacccggatgctggacggcaggatctccgccacccactgcagggaggtgagcgccgacgacgggttgggtgagtccagagaatcggagtctgctgggaccacaggc

SEQ ID NO: 34769 - DNA, 162 bp, Homo sapiens; identical to SEQ ID NO: 31587
  chr7:6694972-6695134
  hypo

SEQ ID NO: 34770 - DNA, 553 bp, Homo sapiens
  chr7:70060834-70061387
  hyper
cggcaccgacaccgtccctttcacacggtactgagccgcgggctgcttcggggcggccctccccgccccgtgccttgccgggatggcagagcggatcagaagctgcgcgcgctctgcctgcgcgctttgcctgcgcgctttgccgccgcaacccgcgcagcagccaatccgctggtgcactgcaggtgacctcccccgggcccgggaataaattgtcaagtttccccaccgtgggtgtctttgctagccggcgagttgcagtcttctgagctaattaggagacggtcatgaggagcgaggcgggccggggcgctccgcgggccggggcggggctggggcgggcggcgcgcagctcctgggccgaggcatccgcgagccgcgggtagatcgctcgcgtctgatcgccgcccgggagctcccgcggagccggctgccaggactcgttccagctccagtgcggggctgcccgggcgtccagaggcggcggacggcgtgccggcaagtttccccggcacctgccagtgcccgcgaacccacctcggaagccagaccc

SEQ ID NO: 34771 - DNA, 252 bp, Homo sapiens; identical to SEQ ID NO: 31590
  chr7:716729-716981
  hypo

SEQ ID NO: 34772 - DNA, 272 bp, Homo sapiens
  chr7:76106210-76106482
  hypo
cgtgccttcgtggaaagttttagctgatgtcctcgcctgtatttcccaggctgtttttgcagagttgtgagagttggttcatccgggccatgaggacatgttgggacataccccgtgtgccgatgatggaggcggccgtggctgcccgagagatgcgtgacacccaggagtaattggcttggaaggcagtcctctgatttgtacctcattgtggttacagaaacttccaattgaagacactgagctgaaccattccgcccgcccgcccgccc

SEQ ID NO: 34773 - DNA, 171 bp, Homo sapiens
  chr7:76631508-76631679
  hypo
cgcagcgtctggatacagcgatgtgactgacagcaaggcaatcgggcccctggctgtgggctgcctcaccaagtgcagccacgccttccacctgctgtgcctcctggccatgtactgcaacggcaataaggtgcccccactggcccggggcggaggcgggtggcctgcccc

SEQ ID NO: 34774 - DNA, 90 bp, Homo sapiens; identical to SEQ ID NO: 31594
  chr7:778947-779037
  hypo

SEQ ID NO: 34775 - DNA, 626 bp, Homo sapiens
  chr7:803211-803837
  hypo
cgctgcagagacggcgttggtgtgaacgggatcagggtctcgccctgcacccgcggctctcgctctcctgcaccctgggcggggctccctgtggcagcctccctcccgattatcctggcaggcccggcctgtgtggttcttacgcgtgagggggatagtgagtcccagcaggcaggcaggcttgagccctgagtgttggaattgtctcagtctctgacttgtaacctccaggcacaggagacgatggactcactggccatggtggagggtgtcagcagctgccaggacctctaccgcaagcacattggtcccctcctggagcgggtgaccgcgtcgcaccttgactggaccgcacactcgccggagctcctgcagttcagtgtcatcgtcgcacagtcaggtgagccgtcccgacagctggcgtgccgtgcctggccccactcaggctacacacctgctcccccaggtgctcagcaggtaccagcgccgaccagctgagctgtggttcactgaagcgtgttgttaaaagtacccaatagtcactcttgcctggggagaagcagcattttaaggagcatcgcattgaagactgtgggacgcagctcttccacttggcccgggcacac

SEQ ID NO: 34776 - DNA, 238 bp, Homo sapiens; identical to SEQ ID NO: 31597
  chr7:822395-822633
  binary

SEQ ID NO: 34777 - DNA, 571 bp, Homo sapiens
  chr7:86415591-86416162
  hypo
cggctcttccagatccctcagatcagctacgcatccaccagcgccaaactcagtgataagtcgcgctatgattactttgccaggaccgtgccccccgacttctaccaggccaaagccatggctgagatcttgcgcttcttcaactggacctacgtgtccacagtagcctccgagggtgattacggggagacagggatcgaggccttcgagcaggaagcccgcctgcgcaacatctgcatcgctacggcggagaaggtgggccgctccaacatccgcaagtcctacgacagcgtgatccgagaactgttgcagaagcccaacgcgcgcgtcgtggtcctcttcatgcgcagcgacgactcgcgggagctcattgcagccgccagccgcgccaatgcctccttcacctgggtggccagcgacggctggggcgcgcaggagagcatcatcaagggcagcgagcatgtggcctacggcgccatcaccctggagctggcctcccagcctgtccgccagttcgaccgctacttccagagcctcaacccctacaacaaccaccgcaacccctggttcc

SEQ ID NO: 34778 - DNA, 974 bp, Homo sapiens
  chr7:96645965-96646939
  hyper
cgtctgccctctgggtgtgcctccgggagggctagagagctctaggttggcaagatcccagtgaccattgggaggcgcgcgatccaaggggttgcagggatggggcggagaggaggggcggttgggtagcctaaaggtccctctcccagaatacaaggaagcgctaagaaggaggatgtgggggcagtgttccagcaggcatcccaggctcttccggctggagagctcaggagactgagcggtgtcaaggctggagtgagctatagggtgcgctgggaggaggtgagcgcagcctggctttggcgcgctgtgggtgactcccaggacggcgcggccaggacgccgcgagccgtggggcgtccggtgggatcaaaggaaccagaggaggccagccgacgcgtctgggattgtgggataaggggcgggagagaggagattgacatgggcggggagatcctggcctggcctgtgtcaccggagggggttgtgtgcgtttgtgtctttgtgcggatcaacgctctcgggcctgaggccgtgccctgggtggatccgagtgtgagtggacaggctcccgggtgggtgcccagacgggagggagagcgagcgagcgagatcaagggcagcgaggtctgcgggttcctctgtgtgtgtgtctcaggccctgtggctcagcactggagccgcctggcacccacaggaatgcggcttctctcggatccccaggccgccccttgtcccacaaggaggtggccgccaggaaaaaggggggaaaaggggcagaaatccgcctagctcaacccgagcctcaaacaaaggccaatttatctgatctcttacaggatggcccaggaggtggtctgggcaccgaagaatcgcgctggccctgaccgcatgccccagccttcctggggtttgtgaggagctctgaaggtgggggtgaggtgttgtaagtaaggggtggggagtatgaagac

SEQ ID NO: 34779 - DNA, 195 bp, Homo sapiens
  chr7:966852-967047
  hypo
cggcgccgtgaaggaggggaggtgctgcaggaggctgtcgttccaggaggctcgtgctccaggaggctgtcacgcacactgtgctcctggcaggcgcaaaggccctgagggtggacgctggcaatgaccctgccgccagccaggtatggtgagccttgagcagcaggaggggccgccacaccccacgccagcccc

SEQ ID NO: 34780 - DNA, 260 bp, Homo sapiens; identical to SEQ ID NO: 31600
  chr7:99819908-99820168
  hypo

SEQ ID NO: 34781 - DNA, 626 bp, Homo sapiens
  chr8:101118020-101118646
  hyper
cggggataccgctaggagggcaggaggtaaagtccagaggctggcgcgtggtgcggccccgacgccgcgggctgatcctctgtccctgtggggccgccacctacccgcggtgagcctcttctcgggcatgccgtccccgctgcccgcgcctggagcccgcgcgggccgtcagggccctagcgcgcgggtccagcgcgggtcagggcctgagcgacgcggcgacggcgcgcgggctccggagctacgctggctagcgtggccggcgccgcgccggggttgctatggagcttagacaatacggccgcccagggaggccgaggccggccactcaggtgcctttcggggttcccaagctgcgacgggaacacccccgccgccccctaccctcccttcctcctcctctgggcagggaccagcgcggcgaacgaaggctgggggcggacgcgcgtgtggacccccagcgcggtcacccggaaggggcgccctggagacgcctgtgtccctcgagactccactggcagcgaattcgttactgtggtgaccgctgctcaggtccgttattcctccactacagcccgccagcaacggccagggaaacgcggtgctccacgggagggagaggccgc

SEQ ID NO: 34782 - DNA, 567 bp, Homo sapiens
  chr8:1150825-1151392
  hypo
cgctttgttttccgttcccacatatcggtttggcatcgaacgatgcgtccgctgctggctcccgtgctcggtttctccacgccgcctccgggcggtgcgcgattcagctccaggagcgtgttgtgcacggcggggcgctgcgctcggccttagggaaagaaggcgcggctgtctccccggaccccaccgttagggacccacacctagaggtgagtgtggcgtgagcggccaggcgggtgccgagatgcccagagaccagcactggggaggctgctccccgtccccgaggcctggagccgtgggaggaagaggaggatgccacggagccctgtggaggctgaagccgctgcgtagggagccccttgtccatcagggttctcgagagacgcagaaccaggggtgcatgcacgcgtgtgattgtggaggctggcaggtcccaaccacagagccgaagtccccagcatccccgcgcaggtgtgaggccctcagcgaccctggaaccagcaggagctctgctcccgctcaggggccgtggggcagggggctcccccttcctcgggaagggac

SEQ ID NO: 34783 - DNA, 875 bp, Homo sapiens
  chr8:11561282-11562157
  hyper
cgggcaccccgggtgacccagtgccccacacaagatcgagagttgagcccaagaggtcaccttcttctctactggccccgcccctcgcccgccgctgcgggatgaggaccacaggaagggggggcggggagggagaaagggaactcattaataaagctgaccctgggcaccacagcgaacccaatcgacctccggctgggttgcgggtgattccccgctccctggcggtagcacttgggcattttccgcggagaccccagagcctggactttgcctgctgggggagctttccgcacagtcccgcagcctgcgcccagcggaggtgtagccggggccgcgcacccccgccccgcccttgcacgtgactcccacaggccagtcagcgccctagggccgagttgctgggccggggacccgagccgcgagctggggacttggaggcggccggcgcaggggccgcgagaggcttcgtcgccgctgcagctccgggggctcccaggggagcgtgcgcggaacctccaggcccagcaggtagggcttttttcttccctttctttgctccttcccgcggtcccccaaactcggagcttctccgcctttgcttgtctggaggtagagaggtagctagtgggaggaaaagagacgtgcgctactcacttcaccgaaattgcccaacccctgctctgcttttgactttgccttagcaacttctttaagtcaaagtaagacttgggggcaaaacagagaaatattggaagcgcctttggattctttccgtgtgaacttgaacgctttcaatccctgtccccgtgtgcacattctccaacccttgtttgcatatcgcaggccggggcctgggtggtgatggtggccgc

SEQ ID NO: 34784 - DNA, 140 bp, Homo sapiens; identical to SEQ ID NO: 31604
  chr8:11726011-11726151
  binary

SEQ ID NO: 34785 - DNA, 194 bp, Homo sapiens; identical to SEQ ID NO: 31605
  chr8:119123513-119123707
  binary

SEQ ID NO: 34786 - DNA, 431 bp, Homo sapiens
  chr8:1246428-1246859
  hypo
cggagaaatgtggcgtgcatgaacggacaccacgcgagatagggaggattcaggatgtgatcttatttcagcatctttataagtgatcaagtaaaagtcatataattgaagttatctaaaccccccatacaccaaatgcgtccgcttcctggtctgtcgtcctgcagcctacagaggccgcgtccttccacatgatggccccgcacctggcactgtcgccgtccctcagtggagacaccaggaagccctggatcacagtgtgacacgttctgtactggggtataaatacggtttcatggggacacacaggagggagctgagtgtgctcctctggccccggagagtgctgagaggcagcgtaccctgcagaagagtggcagtcgctgagcgtgggggacggctcagtaggtacctcggccacagtcctgccc

SEQ ID NO: 34787 - DNA, 308 bp, Homo sapiens; identical to SEQ ID NO: 31606
  chr8:124730010-124730318
  hypo

SEQ ID NO: 34788 - DNA, 117 bp, Homo sapiens; identical to SEQ ID NO: 31607
  chr8:1326617-1326734
  hypo

SEQ ID NO: 34789 - DNA, 171 bp, Homo sapiens; identical to SEQ ID NO: 31608
  chr8:134335659-134335830
  hypo

SEQ ID NO: 34790 - DNA, 260 bp, Homo sapiens
  chr8:1379963-1380223
  hypo
cgtgcatgacagggactcttctgatgcctccgtgtcgatggccaccaagccctgagaaccctgccggcacccagcaccccatgccagccagcaccgctacggctgccatccatcagggctgaaccctgccggcacccagcaccccatgccagccagcaccgctacggctgccatccatcggggctgaatcctgccggcacccagcaccccatgccagccagcaccgctacggctgccatccatcggggctgaaccctgcc

SEQ ID NO: 34791 - DNA, 482 bp, Homo sapiens; identical to SEQ ID NO: 31611
  chr8:140815079-140815561
  hypo

SEQ ID NO: 34792 - DNA, 498 bp, Homo sapiens
  chr8:140971025-140971523
  hypo
cgccccgaggcaggacagggtgtgcagtcagcttccttagacatgtaaggagtgccttttcctttccacaaggaaaaggggagttgtgtagacaccatgagatgtgaccactgccctcgggaacacatgccagagatgacagcctgacacagagcactgcattccgagtcacacagaggagcactgcattccgagtcacacaggggagccctgcattccgagtcacacaggggagcactgcattccgagtcacacgggggagcactgcattccgagtcacacgggggagcactgcattccgagtcacacgggggaggcctgcattccgagtcacacgggggagccctgcattccgagtcacacgggggagccctgcattccgagtcacacgggggagccctgcattccgagtcacacgggggagccctgcattccgagtcacacgggggagccctgcattccgagtcacacgggggagccctgcattccgagtcacac

SEQ ID NO: 34793 - DNA, 90 bp, Homo sapiens; identical to SEQ ID NO: 31614
  chr8:140992426-140992516
  hypo

SEQ ID NO: 34794 - DNA, 611 bp, Homo sapiens
  chr8:141107408-141108019
  hypo
cggctcacccgagtccgccatgcgcagccctgccactgtctgcagggtaaggacgcccacctgggttcttgtgccagccacagttgtgccacagtccgtagggtaaggactcccccagagtaaggactcccgcctgagtcctggctgcgcagcctgtgttgccagtcgcagggtaatacactcgcctgcatcgtgggtgccccgccaccgccctgccacagtctacaaggcaagaacgcccgtctgggtccgtagtgtgcagccgcagctgtgctgctgtccacaccataaaaactcctggccacagacgtgccacagtcggcaggataagaatgcccagctggatcttggggtgcacagccccagctgtgccgctgtccacagggtaagaacgcctgtctgggtgggtccttggtgcacaaccacaggcgcgctgcagtcggcagagtgaggagcctgcctgggtcctccatacgcagtcgcagctgtgccgctgctcccagggtcatgacgcctacccaggtccttagtgcgtggctacagacgtgccgcagtcctaccgggaaagatgccagctcatgtcctcaatgagcagctgcagaattgccgcc

SEQ ID NO: 34795 - DNA, 366 bp, Homo sapiens
  chr8:142242748-142243114
  hypo
cgggaacacagacattcagtggctcccaggtgagcgctcaccagctgcaacgggaacacagacattcagtggctcaacacagacattcagtggctcccaggtgagcactcacaagctgcaacgggaacacacacactcagtggctcccaggtgagcgctcgcgagctgcaacgggaacacacgcactcaatggctcccgggtgaacgctcacgaccagcttgggctggactggcgtctcctttcagtggttgccactttccatggtgtagatgctaccaccccgcccaatctcaagctgctgaggtgacgtcgctgaacaggagtggagaggagcagcagccagcgctgagcggcacctctgcccc

SEQ ID NO: 34796 - DNA, 241 bp, Homo sapiens; identical to SEQ ID NO: 30369
  chr8:143234575-143234816
  hypo

SEQ ID NO: 34797 - DNA, 181 bp, Homo sapiens
  chr8:143334502-143334683
  hypo
cgggtgagagtgcggaggtggacaggctggcgacagcccaggctggcactacgggtacgggaggagggccggtagccgtggagtcacagcagtggtgacggcggtgcctgcagaagcagggccgctgggccacctcccgagcacaagcaacaagcgaggcacaggccagcgtgcgtgccgc

SEQ ID NO: 34798 - DNA, 831 bp, Homo sapiens
  chr8:143386497-143387328
  hypo
cgggcgagtgagatggccaggtggagaaggcaccacaggacgttctgtgcgatgttccctggacttgggggtttcagtgacagctccccaggagctgtgggcagagggtgccaggcacccatggagacctgcctcggatctgtgccttgggattgatgccacctcctgcatgtggagaaggggaagctcaggaggataggggagggcgcaggggtgggaggggggtgcaaacggggttccgtgtggacgcccaggaaagcggccaggctggggtgcgggctgtgtggacacccaggaaggcagtcacactgggatgcgagccgtgtggacacccaggaaggcggcagggctggggtgcgggccagaggagaccccgcaggtgctcggtctccctcacctccacagcgggaggatcgggggcctggtgccgctctccccagcagtgcaggacaaaagccaggggaggaagagatggcttagacgcccgggtccctccgcggcctcctcctgaaaggctcacaaagcgctcctttattctccccacaaaggcccaatttgggtcttgagctccgaggctgggattagggatttgctggcaaggtgctggggcaagcgcagaggggacggccctgtgatagttttccagctcaagaggcagacagacaaaggcggctttctcctccccacagggctcagggcctgggtccctgttccgacacgtagggaagagacatgctctaacgtgagtgctggagacagggcacacacggtttcccgtgggaagagactccgctctgccaggcattcagaaagcagggacccgaggccggc

SEQ ID NO: 34799 - DNA, 162 bp, Homo sapiens; identical to SEQ ID NO: 31622
  chr8:143397305-143397467
  hypo

SEQ ID NO: 34800 - DNA, 440 bp, Homo sapiens
  chr8:143436836-143437276
  hypo
cggccgtccctggaatggggagctgggcatcccgcccaaacctctcctcccgtgggctgcagctccagggactcagagcaaatgaccagaggataacgggagctctcctgcccagacactgccagagcgtcctccctgtgtgcaggggtccctgtgcgggcagcttctgactggcctacaccctaatgctatcactacggaacctgctggccaggccacaccttaagttctaaacacctcagggcaagggctccacccgcccacacaaacacctgaagtgcgaaggcaggtttcagagcaaagtgagcctcacgccagctgagtacagacccaagtccctagggccggggaaggcggtgtgaccccacgttccctctgagcaagacacccgcctgtgccatccagccctgcccagagcagggcagcaccaggacaccatc

SEQ ID NO: 34801 - DNA, 328 bp, Homo sapiens
  chr8:143557738-143558066
  hypo
cgcggggtatgggagacaggacccacaggaagggtcccctggtgaccagatgagggctggtgccaggctgggcactctggtccctggctcccagctgcccagtggagccaggtggcccagtgctgccgaactcagagcactgtggccacagagagagaggacgggggcaaagaaccgctcctgtgctgacctaagcccgtcctgcagccgctgggcgcaccagctcccggagccagtccctgcggtccacagatgcccggcggcgcgaggagctgggggacgagctgcagcagtttgggttcccagccccccagaccggtgagctggc

SEQ ID NO: 34802 - DNA, 220 bp, Homo sapiens; identical to SEQ ID NO: 31624
  chr8:143582357-143582577
  hypo

SEQ ID NO: 34803 - DNA, 283 bp, Homo sapiens; identical to SEQ ID NO: 33624
  chr8:143660391-143660674
  hypo

SEQ ID NO: 34804 - DNA, 423 bp, Homo sapiens; identical to SEQ ID NO: 31626
  chr8:144205313-144205736
  hypo

SEQ ID NO: 34805 - DNA, 144 bp, Homo sapiens
  chr8:144222930-144223074
  hypo
cgtgaggcactgcgccccgcctccattttgcatccgacaacgttcacgcgaccaaagaaatgaactcgagccccaccttctgcagccacagggacctcgaatgctgcggagcttcccacggacacttcgcttctcccagtggcc

SEQ ID NO: 34806 - DNA, 510 bp, Homo sapiens
  chr8:144413516-144414026
  hypo
cggagacaggacgtgtcactctcctgggccaggccctgcatgagcctcttccccgctcccacagtggctcctccctgtggctcctagcaggtgagcagtgtggcctccacctcacgggggaggaaaacaaggcctgcagagggaggcaaccctacctgacctcagaccccatgcccgtgtacccgcccatgccccccacctgcagaggcccgtgtgctgctgagtcacggatcccaccaagcccagctaagcgggaaagggcaagcccagctaagtgggaaaggcaacgtgcctctcccaggctctagggcctctccccagatgggtcccttcagagccggtctagaatcttcgggaacctctccatgggaccatttcatttgctaaataaaggacctggctgcttatgagagagccctgcctccgaggagctgggtggaagggggtccagcagtgcagccagtggagaggcaccacagcagggcgcaggaccgccgcccacagaggatc

SEQ ID NO: 34807 - DNA, 372 bp, Homo sapiens
  chr8:144589930-144590302
  hypo
cgccgggcccgccaggagggcagagacagggggaagggcggggcgctgagaggcgaggccggcgtcttcttgacaatgcggtagcgggtcttgatcaccttgctggtgggtgcagtccgcacggcatgcaggctggacgctgtagagaaaacccagggcacagacatgggtcagggaaggccggcaagggtagggtcagagaggccacccacagtgccagctctgcccaccgcctccgccggagcttgaagaccctccatcgccccgtggataaaaccctcaacccatgtggcacacacatccccagggcgcctggcagccgacgcttcaggagctagccagtgcagcctctgagaggcgggcaccagcccc

SEQ ID NO: 34808 - DNA, 161 bp, Homo sapiens; identical to SEQ ID NO: 31632
  chr8:144621169-144621330
  hypo

SEQ ID NO: 34809 - DNA, 154 bp, Homo sapiens; identical to SEQ ID NO: 31633
  chr8:145661380-145661534
  hypo

SEQ ID NO: 34810 - DNA, 541 bp, Homo sapiens; identical to SEQ ID NO: 31634
  chr8:145813621-145814162
  hypo

SEQ ID NO: 34811 - DNA, 632 bp, Homo sapiens; identical to SEQ ID NO: 31635
  chr8:145845229-145845861
  hypo

SEQ ID NO: 34812 - DNA, 96 bp, Homo sapiens; identical to SEQ ID NO: 31636
  chr8:145854692-145854788
  hypo

SEQ ID NO: 34813 - DNA, 526 bp, Homo sapiens; identical to SEQ ID NO: 31637
  chr8:145910996-145911522
  binary

SEQ ID NO: 34814 - DNA, 45 bp, Homo sapiens; identical to SEQ ID NO: 31638
  chr8:21624023-21624068
  hypo

SEQ ID NO: 34815 - DNA, 215 bp, Homo sapiens
  chr8:22089414-22089629
  hyper
cgggcagtggcgtgcgcttgctcctctcccggctgccaaggaggctgcttccatgccccgcagccagctcctgtctggctgtgcagcgcgtcgctgctgcccctggtgagacgatgttcccagctgagcagcgcaagaagagaggcaagagcgaaatcaaagcagcgtggaggagagagaggcagagaagggagaaagaacgagagagccagacc

SEQ ID NO: 34816 - DNA, 429 bp, Homo sapiens; identical to SEQ ID NO: 31639
  chr8:22874780-22875209
  hypo

SEQ ID NO: 34817 - DNA, 988 bp, Homo sapiens
  chr8:24771316-24772304
  hyper
cgttggactcgctgggcaacccgtccgcctaccggcgggtaaccgagacccgctcgagcttcagccgcgtcagcggctccccgtccagtggcttccgctcgcagtcgtggtcccgcggctcgcccagcaccgtgtcctcctcctataagcgcagcatgctcgccccgcgcctcgcttacagctcggccatgctcagctccgccgagagcagccttgacttcagccagtcctcgtccctgctcaacggcggctccggacccggcggcgactacaagctgtcccgctccaacgagaaggagcagctgcaggggctgaacgaccgctttgccggctacatagagaaggtgcactacctggagcagcagaataaggagattgaggcggagatccaggcgctgcggcagaagcaggcctcgcacgcccagctgggcgacgcgtacgaccaggagatccgcgagctgcgcgccaccctggagatggtgaaccacgagaaggctcaggtgcagctggactcggaccacctggaggaagacatccaccggctcaaggagcgctttgaggaggaggcgcggttgcgcgacgacactgaggcggccatccgcgcgctgcgcaaagacatcgaggaggcgtcgctggtcaaggtggagctggacaagaaggtgcagtcgctgcaggatgaggtggccttcctgcggagcaaccacgaggaggaggtggccgaccttctggcccagatccaggcatcgcacatcacggtggagcgcaaagactacctgaagacagacatctcgacggcgctgaaggaaatccgctcccagctcgaaagccactcagaccagaatatgcaccaggccgaagagtggttcaaatgccgctacgccaagctcaccgaggcggccgagcagaacaaggaggccatccgctccgccaaggaagagatcgccgagtaccggcgccagctgcagtccaagagcatcgagctagagtc

SEQ ID NO: 34818 - DNA, 311 bp, Homo sapiens; identical to SEQ ID NO: 31641
  chr8:26148757-26149068
  binary

SEQ ID NO: 34819 - DNA, 367 bp, Homo sapiens
  chr8:27779460-27779827
  hypo
cgccgtgtcgctctgctggcccgtgcggtcccgcagcagggccaccgcctgctcggtctgcaccgcctgcgcctgcagcccccacagcgcgccctccagccgctgcactgcgcccgccagcgccagcaacgagtctgactggttctgcagcgcgtcctgcaccttccacacctgctccgtcaggtccgcttgcagcggagcctgcagcagccgcagctgcaagtcccggaagctctcattcagccggttcacattgcgagtcagggccttcaggtcgtcaggggagctgcgcggcctggacactgcggaggaggaagaggggagacttgagcaccgctggggaggaaggccccgggtgacaagaggc

SEQ ID NO: 34820 - DNA, 84 bp, Homo sapiens; identical to SEQ ID NO: 31643
  chr8:29053260-29053344
  hypo

SEQ ID NO: 34821 - DNA, 169 bp, Homo sapiens; identical to SEQ ID NO: 31644
  chr8:3509598-3509767
  hypo

SEQ ID NO: 34822 - DNA, 95 bp, Homo sapiens; identical to SEQ ID NO: 31645
  chr8:41478653-41478748
  hypo

SEQ ID NO: 34823 - DNA, 157 bp, Homo sapiens; identical to SEQ ID NO: 31646
  chr8:42146058-42146215
  hypo

SEQ ID NO: 34824 - DNA, 360 bp, Homo sapiens; identical to SEQ ID NO: 33632
  chr8:49334914-49335274
  hypo

SEQ ID NO: 34825 - DNA, 262 bp, Homo sapiens; identical to SEQ ID NO: 31648
  chr8:49747358-49747620
  hypo

SEQ ID NO: 34826 - DNA, 145 bp, Homo sapiens; identical to SEQ ID NO: 31649
  chr8:73979624-73979769
  hypo

SEQ ID NO: 34827 - DNA, 130 bp, Homo sapiens
  chr8:74674345-74674475
  hypo
cggcggcaaaggtaaaaggccgacgacaacggacttggtccaggtgaacccacctgacaggcgcacgaaaacttcccttgccctccccggctactcgttgtccaccgaaattcattctcctgacttccac

SEQ ID NO: 34828 - DNA, 159 bp, Homo sapiens; identical to SEQ ID NO: 31651
  chr8:798791-798950
  binary

SEQ ID NO: 34829 - DNA, 507 bp, Homo sapiens; identical to SEQ ID NO: 33642
  chr8:972329-972836
  hypo

SEQ ID NO: 34830 - DNA, 934 bp, Homo sapiens
  chr9:116059825-116060759
  hypo
cgtagtcaccatacccagcagcaaccgaaaaaggtttggtttcttgtctgggaacagcactcaccccacaccccaaaggaactgcttggtccaaaagatggagaatatgagcaacagagtgacactgaggatgacggccatcaggtaggcaaagatgcggaactgagggttgcggaaacactccctcaaagagtggtggctggggatgaggatgggcgtagacacggtggcagaggccgtgtctgggggcggcccagtctggcccccaggctgggggccaaggtccagcgtgtagacttgaggctggcgcaggaagtagcggctcttgggctggtccttgaggcacagctgatggccttccaggatgacatggtggggctccaggcggagcagggcgagcatggcagtgtccgtgggcaagtcagtgacaggctgccctgaggccagcactgtgggctggcgacagagtgggcacagcaggcggcgccgggctggagtcacaaggctgaggtgggccagacattccacgcagaaggagtggcagcaatccagcattttgggggtatggaacgtgttgttgaaggggttccagcagacggggcactcagcctcaagctcccggccctgctgctcagccatcctcagccacacacggggaggcttcgcgggagacgtcctggcagaagggggaaaggagcaaaggaacagccatgaagtcccatccttgtgcttggcctggggcaaagtgttctgtgggtgttgaaaggtgtaatcaccacgttttacttaggttcaaaagcgttttgttcttgatcaccagttcctaacccatcgagttgagtcaaatgctcctacagcctcccctctgtcaaggtgaaggcctgggccacccctaccaagagcccccaagagagccggcattggagcagatgtc

SEQ ID NO: 34831 - DNA, 239 bp, Homo sapiens
  chr9:117880317-117880556
  hyper
cggcggttcccacgtgcgcgttcccccgagttccccagcagcgctgcctttgtgcccacggaggcgggggcgtgtatctgcgcgcgggagaggcgggtgacagtaggcaggctgtggccggtgcagccaactttggctggcttatatagcgagctccttcctctgtaatgggacgcctcgcctccagacatcctttcccactttttcagttggcgaattaaaggaacagccctcccagc

SEQ ID NO: 34832 - DNA, 55 bp, Homo sapiens; identical to SEQ ID NO: 31656
  chr9:124639413-124639468
  hypo

SEQ ID NO: 34833 - DNA, 716 bp, Homo sapiens
  chr9:124990438-124991154
  binary
cggattcaggcgcctttcgagggccagtcggagggaaacccggagcaaaaagagagcgagatcggggcgaaacgggaccaaaaagagaaaagagaggcgctcaaggggaggaaaaagcaccctccagcccctcggcgcgccgggtaccggccccgcgtcgggattctcagcgctgcgccggcacaacccccggcgcatcggcgctatcagcgcctattcagacggacaataccggcctcgcctcctcttgattcgcctgtgtctttactaaatcgctttttgagaaattcctccaacatttgcataatgtgttcccgctttccgcgaccccccccccccgctcgcgcgcgcgctcccacactcacaagcacacactcacaggcgcaccctcgtacccctccttcctgcaaccgcccgccaccctgctcggcccggctgggtcccggaccctgcccgaccccggcccgggccgctcacccagtcgttcgccggctcacctggtcggtggcggggccgccctcggccggcagccggcagccctcgggcaacgccggggcggcgttctcatgcttccagtacatgggccggggaacctcgggctcagcgggcgcgcagcgcggagagctgcgccgagggggaccacagccgcagtgggagcagaggctgctgcaggagcaggaggagagccgaggcgccggccccgccgccccgggccc

SEQ ID NO: 34834 - DNA, 120 bp, Homo sapiens; identical to SEQ ID NO: 31659
  chr9:130661066-130661186
  hyper

SEQ ID NO: 34835 - DNA, 257 bp, Homo sapiens
  chr9:131127222-131127479
  hyper
cgtagccggcccctccccccgaggagggggccctgcttcctcccggcctaatgatattctgggctcagccctcgtctttggcggcagtttaacccgagccggggcggatttctttctcactgatctcagcttgacacccaattagcacaagaatgggaggaggaagcctgcgagaggcgcctcccagcctcccggggcgcgcgaggggagcaggcgggaagacaaaggacagcaggcaggggggcacccgcgccctc

SEQ ID NO: 34836 - DNA, 166 bp, Homo sapiens; identical to SEQ ID NO: 31661
  chr9:132176641-132176807
  hyper

SEQ ID NO: 34837 - DNA, 610 bp, Homo sapiens; identical to SEQ ID NO: 31662
  chr9:132230776-132231386
  hypo

SEQ ID NO: 34838 - DNA, 1279 bp, Homo sapiens
  chr9:132244794-132246073
  binary
cgtgccggggcgcacggttttgctccgcgggcctctctcgctccctcgcgccggctttttccctttttctctttcctttttttctttcctggagcggagcccggcgccaggagtctggaaccagcttgacaggcttttgagttatggaggggggagggggagaggcgggcggcggggagggggaagggagggcgccgccgcggcgtgggggcggggccggctccccggtttggagactcgccccgactttggggtccgccagcggcggccgggcggagggcgggggaccgcaatcgtggggggagtcaccccgcggggcccggcgggcgaaacgggccgggcttcagagccgcagtaaatgaggcccggggcgggcgggggtggacacggcctcggggccacggcctcccccgccgagcaaggcattcctttccgctgaactgggcgcccgggcccgcgccgcgccctgcacgcctcgcgcccggcgatcgggcccagggcgggggagcagggaggcggccccagccggtcgccggcgcccccaggcgctgcttcccaggagctcggctccccgggatggaagggactgatacccagttaatgggcgtggagcctgagcccctgagggtcgtcgctaacgggggtcgctcagcagggccggcctccgctgcctgcccggggtgtctaatcacctctccgatcctttgcccggatctgagcttcgtcattcacgcccctcctccctggcgactttgggcctggtgacagtcccccgaccctcgcagagccaggggcacagtaggcgccttagccactggcagaatttcaccggcgctctgcccgacgcccccagccccagggccgggcgtgggtggaagtgtctggaagggtgggttcaccagggctgggcacgtcagcggccccgtacagagaatccggtgcctggggtctctggagggggtactcagagtatccgaggaggagactcctggatgctaacagagcccccagttaggagcagtccgcgagacagttggtaacagtgctggccttgcccgggcgccggaaggttccgtgaggcccagcaagtcctgacttggcacagggcccagcacacggtaagcgctcggtacttggtcactgttgcttgattttaccatttcggaggggctcatctacgcctagcaaagcccccctcccggtgacccaaggggagctccagaatgttgagcggctgagcggcctggctcctcctctcgaccccatcgagccaagtgtc

SEQ ID NO: 34839 - DNA, 441 bp, Homo sapiens
  chr9:132359683-132360124
  hypo
cgggaaggctggaccggcccgcggcttgccctttcaagtcggcctcccggagtctccggagccgtccgagcgctggggccgctggcgcggacttcaaagcccgccgcccccagccagatccggttgcgggtggggcgggcgagctgggagggaggcgggtttcggtggattcccctttcatcccgcggctgcagccgggcgcagacctcggggaggcccggcgcgtccccgctgggcaagtccctgcagggcagcgaccgggaacggagggctggggacgccacgaggccgcgccgcagggcgggggaggcctgaacccagactgggggcttcggacccgcctgcgctgtgggacctcaggccagcgcctacctgtcgctgggcctcagctttcctgaatgccctactccctgcccaggactcctctggggaggggcattc

SEQ ID NO: 34840 - DNA, 148 bp, Homo sapiens
  chr9:13323299-13323447
  hypo
cggcgagaccgcccatctgtccggtcctgctctccaccagctccttcgtcggactcagtctggatcttctcaacgcccagctcctggctccgagtcagggctctctggatgcacggtaacaccctcctcttctgggtaccctccctcc

SEQ ID NO: 34841 - DNA, 370 bp, Homo sapiens
  chr9:133366624-133366994
  hypo
cggcgggattgcgaccccgaaaggaggattttagttacaaagtgagagagtcattaagacgtggcggaggagagagcacctggccgggctgctccggggcctccacggaggctgatcccaccgtggccgcggccacggctgccacttatcctgccatcttgctgctaggctctgagctgggcacctgatggggtattatctaatattagctgcgcagaggtgaggaaacggaggcccccaggtgaagacactcacccaggctctcctggctggtgatgggcagctttgagccggggacaggccagctgtagcggccaagttcccagttactccaacagattccaggatgctcgtgatcaaggggcacggc

SEQ ID NO: 34842 - DNA, 1351 bp, Homo sapiens; identical to SEQ ID NO: 31667
  chr9:133710055-133711406
  binary

SEQ ID NO: 34843 - DNA, 81 bp, Homo sapiens; identical to SEQ ID NO: 31668
  chr9:133738154-133738235
  hypo

SEQ ID NO: 34844 - DNA, 85 bp, Homo sapiens; identical to SEQ ID NO: 31669
  chr9:133945101-133945186
  hypo

SEQ ID NO: 34845 - DNA, 389 bp, Homo sapiens
  chr9:134818664-134819053
  hypo
cgaaacacaaatcaaccactagtgacttgacagaaataaggaaagcttggaagctcaaattaaaaatctagagacaaaaatgacactctttcttgttgagggagggggtgttggtatgggaggtggtctctggcagtactctctgagtgctgcctcccgagacggtgagcacggctagcgtctgcagcgggctctgcagtgcggcgccccactttgagagcagggctaaggacaggtaggaacagtgtgctcccctcctacacttccaccatatgttacactctgttctgtggcagaatcaaattactttaatttttacctttggaatataggcaaacaagcagtaacacagcagtggtgactagtttacacttgagcagacgcggcgc

SEQ ID NO: 34846 - DNA, 222 bp, Homo sapiens; identical to SEQ ID NO: 31670
  chr9:135945862-135946084
  hypo

SEQ ID NO: 34847 - DNA, 196 bp, Homo sapiens
  chr9:136603465-136603661
  hyper
cggaactccaggcctcccccgccccccaccctcgctgccagccccatgtctccgcccaggatctgggcggagcgtaccgcccaccactgcggcttctaggccagcttagttggggcttctaggccagccctgtgggcagctccctctgagggcggcagagcagggttgtgaaccccatgccccattacccgtaggc

SEQ ID NO: 34848 - DNA, 106 bp, Homo sapiens; identical to SEQ ID NO: 31672
  chr9:136698796-136698902
  hypo

SEQ ID NO: 34849 - DNA, 335 bp, Homo sapiens; identical to SEQ ID NO: 30435
  chr9:138143914-138144249
  hypo

SEQ ID NO: 34850 - DNA, 172 bp, Homo sapiens; identical to SEQ ID NO: 30436
  chr9:138247974-138248146
  hypo

SEQ ID NO: 34851 - DNA, 1254 bp, Homo sapiens
  chr9:138660497-138661751
  hypo
cgaggtggaccgcacggctgcagtgagtgaggctgaggccctgcccaggcgggaggggcaccgtggggccggggagcgggggtccctgagggaagagacctgccccaggctgccggtgccgcccagcagcccacagaggccagcccgtctgcactgaccaaccacccaccccgccaggaccaccagaccatcctgcgcgcctgggccgtgaaggacttcgcccccaactgccccctctacgtccagatcctcaaacctgaaaacaagtttcacgtcaagtttgctggtgcgtctggggcacacgtgggtgatggtgtatctggggcagggcacgtgtgcacacgtgggtgatggtgcatctggggcagggcgcatgtgcacatgtgtgacggtgcgtctggggcaggacgcgtgtgcacacgtgggtgacggtgcgtctggggcaggatgcgtgtgcacacgtgggtgtcggtgcgtctggggcagggcgcatgtgcacacgtgggtgacggtgcgtctggggcagggcgcgtgtgcacacgtgggtgacagtgcatctggggcagggcacgtgtgcacgtgtgtgtcggtgtgtctggggcagggcgcgtgtgcatgctgttgggtgatggtgcgtctggggcagggcgcgtgtgcacacgtgggtgacggtgtgtctggggcagggcgcatgtgcacgcagttaggcgagctgtgtggggcagcgggaggggctggccctggagctcctcacacaagcacaccaggaggtgctggaggggacggcagacccccatcctcaccgcatccgagaagggacctagggggtccaaactcttcagatgaagtcttatgctgggatcctggggtcagtgaaggcagggtcagaggtcaggtgggggcaggagcaccgtctgatgagcacctctatgggcagggaccatgccgggtgcccggggaacggggggcaggccccatgccaggtgcccaggggacaggggtcagggcccacatggagtgcccaaggcacaggggccagggcctgccccgccctggaactcctcgctgagctgggagagaagcacaggagcgatggaaggtccaccgaggctcagaccaagtagggggttgaggtccacagactctcggggcagagatgctgaagccggacagcagacacgggggtgccaggcaagggtgcatctgcatagcaccttcaggaagtgagcaggtactgtgggggaggagagagcc

SEQ ID NO: 34852 - DNA, 90 bp, Homo sapiens; identical to SEQ ID NO: 31676
  chr9:138774525-138774615
  hypo

SEQ ID NO: 34853 - DNA, 908 bp, Homo sapiens
  chr9:139090420-139091328
  binary
cgcgggctccctgggacccctgcgaccccgccgacgcgcgctcgtccccccccgagctccgcgatccctccgcctaccggggaaggagacctcagcgtcgctgtcctgcccctcctgaacgctgtccttgtccgacttggagccgccgcgggagcgcttcatgttgcggaaatactgcccccagcgctgccggccggcgtccttcttcagcctcttctccttggcccggcggttctggaaccaaacctgggggcggggcggggtgagcggccgcccggctctgcgggggcccccaaggccgcgggcgggagggaagcaggggcgagcgctgacctgcaccacgcgcatgtccaggcccgtctcggacgagagctgctcgcgcacgtggcgcgccggcttgggcgaggtgttgtaagcgctcttcagcgtctccagctgcttggcggtgatggtcgtgcgcggccgcttggccgtggcctcggcctctgcgcggcgggcgagcggtgaggcgcggcagcccctccggccccggccggacccccagccctcccaccccggccggcgcggggacgtcggggcctcaggtgcccacccccatcccgccccacaggcttctcggaaggcgcgggcgctgggagcgattggcaaaaacgggcagcacccgggctggggtggagggggcgccggcggagggcgggttctgccgcgggggcgggggcggcgccttccctaaaatcgcacctccacggcgcccccgccttcagccttggctcccttctccaagcaccctgatttccccgcgggctcccctttattctaagggtgtgggtatggcccagccttcgcggccaagaatttagggcgataattccgaccaggggcgaaaagccgcacacttcggaccgaac

SEQ ID NO: 34854 - DNA, 357 bp, Homo sapiens; identical to SEQ ID NO: 31677
  chr9:139401232-139401589
  binary

SEQ ID NO: 34855 - DNA, 222 bp, Homo sapiens
  chr9:139793021-139793243
  hypo
cgattctgcttctctgagtcttgaccgcaggtcagtggggacccggcccctcaccatcgcctgctactgatcaccattggtttggttttgtctcgaggactgttctggaattgaggtgtaacgtgctgtgtgttcttccttagggctttgttcgcgggggtcacagctctcatggctgcagctagcgtgaccccccctggctccctggagttgctacagccc

SEQ ID NO: 34856 - DNA, 126 bp, Homo sapiens; identical to SEQ ID NO: 31680
  chr9:139909050-139909176
  hypo

SEQ ID NO: 34857 - DNA, 375 bp, Homo sapiens
  chr9:140379693-140380068
  hypo
cggagcgactgaaaggaatgtgaggctcagagtaaaccagacaaacgctgcaggtgaggcctcatcggagtaaaccagacaaacgctgcaggtaaggcctcactggagtaaaccagacaaacgctgcaggtgaggcctcatcggagtaaaccagacaaacgctgcaggtgaggcctcatcggagtaaaccagacaaacgctgcaggtgaggcctcattggagtaaaccagacacactctccaggtgaggcctcatcggagtaaacaagacatactctccaggtgaggccttatcctctgaaccaatcgtcgcagggctttccaccactcactccaggaacagtaaacaacacacgggctagacatcaataggccc

SEQ ID NO: 34858 - DNA, 465 bp, Homo sapiens
  chr9:140382238-140382703
  hypo
cgagaggccgtcccatccagcctccacctgcctgtcaggggcatctcaggagcctgggccaccaccacaacctggcacgccctgcgaggtgtccccagcatcaccttcaccgcacgcacttcagcccctcactgcagctgagccttggccacacgggaggagcgggggactcaggcccagatgatgtgtctccgcctctaggcgctgagtggaaggcaggtggcttctataatcaggaggaaataactcccagatagcaaacaaacaatgcacacacacaccaaagtgctgctgagcacagaaagacggagaaccgcctcctcatcctgagcttcggcctgaacgctgctctcgtggtctgatgtctcgtcccgagcttcacttgcagtctgatgtctcgtcccgagcttcggcccgaacgcggctctcgcggtctgatgtctcgtcccgagcttcggcccgaac

SEQ ID NO: 34859 - DNA, 616 bp, Homo sapiens
  chr9:140392392-140393008
  hypo
cgaagtgtgtttccgagctaagctggggtggggctggggaaatccagccttccatgtgtggtttccacagtaacttccgtgtgtggtttccacggtaaccgtgctttgcccatccccagctcctgcatgccagggcagcatggatgcggagtgtgtggcacccacggcctcacctgtatattgctcgcccggcctccacctccacccagtccagggcaaagtcgatttgccgcacgaaggacgacatcctcttcaccacagtgtgcgccacacccaggacgacggtcggctgcttccgcatgattctgccgggcagcccagagtcaatcctgccccatccctccaaccctacccttcgcccagggccgcagtgctcgggaatggatgggacccacaacccccaccccacccggaaagtagagagaccactggcaggggctgggacggggcacgcaccagtcagctgcctgccccacggcacagcactgcccaccacgtgcccagtggccagcagctgttggggagcccagagagccccctcctggcaggcccgcgagtgccccttggacacgggccctgtgtcaggctgcggtcctggcaggggactgcacatgcc

SEQ ID NO: 34860 - DNA, 600 bp, Homo sapiens
  chr9:140703858-140704458
  binary
cggcggccctgcgccctcggagggaggcggggcagagctcaaatggaagcagagcctgcggggtggagaccgcacccctgcaggggtctgccttgggccccgagcctcctcagccgccgcagcaaagcggtcagtcaggcggggcttggtttatggcatctgggaagatcgctgaccattcccgaggggaaggaggctgcagccggcgctcccagacaccagcagagcagaacacacttcaggaacgtgaaacgctcacgtgcttttaatccagcaatcctgcctctgaggatgcatccttgagaaataatgtagaaaatgaaaagcactaaaatatttgctggcattgtattccagaaatataccaacagacataaaccaagtgttcagtaaaggaaaggtccggaagctgagtgactgtgggggaagggtccggaggcggttccgatgccgccctgtgtggaccgtcggtgatgggtccggaggcggttccgatgccgccctgtgtggaccgtcggtgatgggtccggaggtggttccgatgccgccctgtgtggaccgtcggtgatgggtccggaggcggttccgatgctgcccctc

SEQ ID NO: 34861 - DNA, 90 bp, Homo sapiens; identical to SEQ ID NO: 31688
  chr9:140704673-140704763
  hypo

SEQ ID NO: 34862 - DNA, 947 bp, Homo sapiens
  chr9:140708213-140709160
  hypo
cgacccaaagcagtggcaggcatctttgtgccttttttgtaacctcacactcaggggccccggtgtggcttcgtgctgggggcacaggcgagaggagcccttgcgaggcctgcaggacgacctggatccctgcacctcccagcccccggagagatgggtccagcacatgccagctttcccagcctccgagtgcatgcagcctggtgccctcactgcttgcgccttctcgagcactttccttgtggctctgcttgtgggcagctccctcctcttcccaggccgggcactgcccaggcccccccccccccccgccccccgccccacaaggtgtgtcaggctctgtgttcttgcctttcccatcgagcatctggccacaaatgcagccgccgcccagcccttcacccaccccacgtcacccactgccgcgtcgctgccctgcctgccccctgtccctctgtcagggtcctcagccagagctccctcccacaggcactcgacatgtttctgcctgcacagccttctccctaagaggccacacactcacgtggtgcctttgagaagcacttaccagaatcagggttaacagaactggaagacgtagttgtgactgggaggggaaatggaaggcctgtgcctgcacgtctgaccccccggcgcctctcttctcagtactgcgtgtgcatcgacgactgctcctccagcaactgcatgtgcggccagctcagcatgcgctgctggtacgacaaggtgagggcggcctcgtgtgcgtgggctcaggtggtaagtgccgctggtccgggtctgcaaaaacagtgcaggcgtctgtgaccccagcgctgtcgtggcagcgtcgggaaggagttggaggtgagctgggtgtgacaggcaggggaggcacagcgggcaccagcacccgagtcagggtcgtgagccgaggacatggctgc

SEQ ID NO: 34863 - DNA, 194 bp, Homo sapiens; identical to SEQ ID NO: 31691
  chr9:14232126-14232320
  hypo

SEQ ID NO: 34864 - DNA, 1382 bp, Homo sapiens; identical to SEQ ID NO: 31692
  chr9:14314414-14315796
  binary

SEQ ID NO: 34865 - DNA, 440 bp, Homo sapiens; identical to SEQ ID NO: 31693
  chr9:2047360-2047800
  hypo

SEQ ID NO: 34866 - DNA, 360 bp, Homo sapiens; identical to SEQ ID NO: 30453
  chr9:37950454-37950814
  hypo

SEQ ID NO: 34867 - DNA, 205 bp, Homo sapiens; identical to SEQ ID NO: 31695
  chr9:6997072-6997277
  hypo

SEQ ID NO: 34868 - DNA, 112 bp, Homo sapiens; identical to SEQ ID NO: 31696
  chr9:75271069-75271181
  hypo

SEQ ID NO: 34869 - DNA, 125 bp, Homo sapiens
  chr9:78557022-78557147
  hypo
cgggcatgcgccaaagcgtagcgcactcgttgcctgcccggagcagctgctaccaactgaggccggctgtcctcaggctgcggagctggctcggtgttgccaatttaaaaggacatgcaagtctc

SEQ ID NO: 34870 - DNA, 720 bp, Homo sapiens
  chr9:95820744-95821464
  hyper
cgcgtgcaacgccccggagtagcaacactttccgctcagccggctgccttggcccgctgggtatttggtctccccaagggcccccgcccacagcccccggccggacctcggccccagtccaacgtgtgggcgtggtctgtaagttgcatggaaccgcccctgggcgggcgtggagggcggggcctccccgcccctcacccaggcccaggcccaggccccgcccccacaagccgggctcactcccctggcagaccccgccaagcgcctcggagcgcgcaggatgcgctgggcggccgccaccctccgtggcaaggcgaggccccgggggcgggccggggtcaccacgcctgccccagggaaccgcacaggtgagggctggggccgagtggccgcgtgcggggctctgcgcccatttcacagacgggaaagccgaggggagggggtcgcggggccgcacagccgtgggtgggggccacagcaacgatctgccccgaggacgaacctcctcgaccctccgccggcccagcaggcgccctagcggagccgaagcctggcagcgagcagttcgaaaccaggcggctgcacgcagcagcccgcgcgcccgttcccgagtggccgcagcgccttggtcccgggcgtctgcggacagcgcggccggccaagcctctccacgccgcaggctccgggcccctccgcgcccctcccggggaagtcgaaacc

SEQ ID NO: 34871 - DNA, 429 bp, Homo sapiens; identical to SEQ ID NO: 31700
  chr9:97767434-97767863
  binary

SEQ ID NO: 34872 - DNA, 124 bp, Homo sapiens; identical to SEQ ID NO: 31701
  chr9:97808146-97808270
  hypo

SEQ ID NO: 34873 - DNA, 1264 bp, Homo sapiens; identical to SEQ ID NO: 31702
  chr9:98272643-98273907
  binary

SEQ ID NO: 34874 - DNA, 678 bp, Homo sapiens
  chrX:15755988-15756666
  hyper
cgagggaaagtcactttttagataaggctctgaagccccaggtctagtttcaatccactaatgcggccagcggcgagcaggaggagggaggattggtccggcgggggcggggccagagcagggctcagaggcgtggcccaggctagagggaagagcccagggggagcgcagaggcggggctaggagggagcaggggtgaatgggggcgtggcccgggcgagaggggcgtggctgtagctaaaggggtgtggccagggtggagggcagagactggcacagtttggttgggcgtgaccggggcaataagtacggacgtagtggggcgtggatctgccaggtgggggcgtggcctccattgaggggcgtggccctggtatgtggggcgtaacagggcacgagggggcgtagcttcgatggccggacgtgcaggctgcggatccccgtaggcgagcgagcggctaggttcgtgatctggagagacgctcaggtaaggacgggtggccgagaggagtggggggcgaccagggacaggccgatccagacagggccgtgattcttcccacgactctccgctctggcgcaccgggttccggagctaggagagctgttgatcctgcgagtattgtctgggtcccggcagggcgcccgggagtactgagtggggcctaatggggtgtc

SEQ ID NO: 34875 - DNA, 218 bp, Homo sapiens; identical to SEQ ID NO: 31705
  chrY:15863192-15863410
  hyper

SEQ ID NO: 34876 - DNA, 461 bp, Homo sapiens; identical to SEQ ID NO: 31706
  chrY:15863654-15864115
  hyper

SEQ ID NO: 34877 - DNA, 1398 bp, Homo sapiens
  chrY:16635744-16637142
  binary
cgcgctggaaaccccgcgtgaagatgaaatgactgtagctccgtgctgctcctccaaactcgggagcggtatccatgcacccctttcccgtgtgtgtgggttacgacgtgggtgggagtggtgaggcaagccgcaaaagtggggtagagctggtggttttgcttcttcggaagcctttgagtgtggcctggaccttagatgggggtgcagggcggtttgccgctgccaccctcggcaccatctctgaactgcccgcttttccggaggagcggaaaagttggaagccgaaaagacaggcgcccggagccctggtctaggtatcaggtgatccggagccctagtcggtgcccactaagaacaccccttctcccatcgggggttcggaggagtgttaagcctgcgggtctgccagtccctaaggtagggatgggggaggggtctgaggaatccgttccaataggcacaccatccccacagccctagaaaaggcaaccaccacccgctccttcctcccgcaccatcccatctcaaggctctctgctgacccgggccgatttcatctggtctcttctcccccgcttcccacctcccaattcccgcgcagctcggctccgttccctcccactcccctaggcggaactgaaagcgaagatcagccaagagcacagtcggaggcggcagagacggtggcgggtgagctaggggctgtgagacgaagcagggagagagtgaacttcagccccgtcccctccccactgccacggctggggcaacccaacccgcgcctgaagcggcttggcttgacctgcggaagcgcgggccgggatggcgtggggagagggaggtaggtgccactgggctgcagatgacgagtgggttgggggcttgctgtgggacaagaggttcaggttccggcctgcgccttccactccgcggtggcgctctctgcctgcggttttccaggaggccgatctaccccagggacactctcatccttcaggcggtctcctggacgccctttcctccccttgcctcccagcctgacctggctctttcgcccctcggagaaccggtaggttggggtccctcggcgggggtctagtgagccgagtcgcgagctttgcgcccccggtatctaggccccgtgccgcgcgcaaatccgggcccaggcgtacagttctggagcctagtcgccgccagacacagggccctttgtacccggaggagcgggagcgggagcgggggcgtcagggcaacccttgcaccccagaggcctgcctaggaccaccctgggaacaaatgtctcgctcggaaaacgaggtgaacccggaggatgtcctacgcatcatacccctccccttcttgagaaggctttttctttttttctttttttttccc

SEQ ID NO: 34878 - DNA, 451 bp, Homo sapiens
  chrY:21204870-21205321
  hypo
cgtgtttgcgtctccgggtgcacagagctatcacttctcactccctcctcactgggaagtccctcccattgtctagcctcagtacctcttgatactctcacagcgccccgctgccatccacagcgcctcccagcccgcggctctgggacgctaccctcgggaccccagctgcactcacctaggtcgggccggcacttgcccttgtccttttgcagctacagctcggcgcgtaaatcaccgacatcctcgcagcctccactggaacaatagtttcccttgttgaggctgctaccctggaagcgaggagaggcggggacgaaggaggagccgagtgtccatcttgcgcatctggcctcccgcatctaggcacatgtttaagatgcttacacagcaggtgccatgctaactgctggcagaaggaatcccgccttcttgcatgcaggcactcgcc

SEQ ID NO: 34879 - DNA, 281 bp, Homo sapiens
  chrY:22918423-22918704
  hypo
cgctgtcttgacagacgccagagagactcgtgaggttgtcaaaggtctgggagttttgcggggtttgttctggagtctggcaggaagtaatatttgctcaaaactgggcgtgaaatagcctggactgtcctttctcctccgatccggtattacccgttagcagttgttacagctgaagataaagacattttactgttaactgagacgagtttctctgaaaaagtttggtgtctttttcaggcccggggccccaagaagcacttgaagcgtgttgcagcgcc

SEQ ID NO: 34880 - DNA, 273 bp, Homo sapiens
  NW_001838014.1_249000-295694:3973-4246
  hypo
cgtgtggatcccacagacagacacccttgggtggccccgaggacgcgggagaaagtcccccttcccagaccggtctcgatctcatgggatcaagttacctggccctaaatccgactgctggagccagagccagagccgtgcggagacacggagccggccgaagccactcagggttggagccgcctcgccacacccaggaccctgggcgctacattgagggtggctgggtgcaggggtgatggcggcggttcctagttggcagccaggagacac

SEQ ID NO: 34881 - DNA, 65 bp, Homo sapiens; identical to SEQ ID NO: 1
  chr1:859735-859800
  hyper

SEQ ID NO: 34882 - DNA, 96 bp, Homo sapiens; identical to SEQ ID NO: 2
  chr1:935361-935457
  hyper

SEQ ID NO: 34883 - DNA, 31 bp, Homo sapiens; identical to SEQ ID NO: 3
  chr1:935826-935857
  hyper

SEQ ID NO: 34884 - DNA, 67 bp, Homo sapiens; identical to SEQ ID NO: 4
  chr1:936193-936260
  hyper

SEQ ID NO: 34885 - DNA, 353 bp, Homo sapiens; identical to SEQ ID NO: 5
  chr1:955507-955860
  hyper

SEQ ID NO: 34886 - DNA, 31 bp, Homo sapiens; identical to SEQ ID NO: 6
  chr1:955869-955900
  hyper

SEQ ID NO: 34887 - DNA, 31 bp, Homo sapiens; identical to SEQ ID NO: 7
  chr1:995029-995060
  hyper

SEQ ID NO: 34888 - DNA, 113 bp, Homo sapiens; identical to SEQ ID NO: 8
  chr1:1004071-1004184
  hyper

SEQ ID NO: 34889 - DNA, 80 bp, Homo sapiens; identical to SEQ ID NO: 9
  chr1:1014972-1015052
  hyper

SEQ ID NO: 34890 - DNA, 57 bp, Homo sapiens; identical to SEQ ID NO: 10
  chr1:1052181-1052238
  hyper

SEQ ID NO: 34891 - DNA, 128 bp, Homo sapiens; identical to SEQ ID NO: 11
  chr1:1737717-1737845
  hyper

SEQ ID NO: 34892 - DNA, 83 bp, Homo sapiens; identical to SEQ ID NO: 12
  chr1:1976104-1976187
  hyper

SEQ ID NO: 34893 - DNA, 176 bp, Homo sapiens; identical to SEQ ID NO: 13
  chr1:1981252-1981428
  hyper

SEQ ID NO: 34894 - DNA, 97 bp, Homo sapiens; identical to SEQ ID NO: 14
  chr1:1981457-1981554
  hyper

SEQ ID NO: 34895 - DNA, 173 bp, Homo sapiens; identical to SEQ ID NO: 15
  chr1:1981576-1981749
  hyper

SEQ ID NO: 34896 - DNA, 193 bp, Homo sapiens; identical to SEQ ID NO: 16
  chr1:1981788-1981981
  hyper

SEQ ID NO: 34897 - DNA, 31 bp, Homo sapiens; identical to SEQ ID NO: 17
  chr1:1982244-1982275
  hyper

SEQ ID NO: 34898 - DNA, 49 bp, Homo sapiens; identical to SEQ ID NO: 18
  chr1:1982476-1982525
  hyper

SEQ ID NO: 34899 - DNA, 31 bp, Homo sapiens; identical to SEQ ID NO: 19
  chr1:2078422-2078453
  hyper

SEQ ID NO: 34900 - DNA, 31 bp, Homo sapiens; identical to SEQ ID NO: 20
  chr1:2078482-2078513
  hyper

SEQ ID NO: 34901 - DNA, 31 bp, Homo sapiens; identical to SEQ ID NO: 22
  chr1:2517090-2517121
  hyper

SEQ ID NO: 34902 - DNA, 31 bp, Homo sapiens; identical to SEQ ID NO: 23
  chr1:3370920-3370951
  hyper

SEQ ID NO: 34903 - DNA, 50 bp, Homo sapiens; identical to SEQ ID NO: 24
  chr1:3371087-3371137
  hyper

SEQ ID NO: 34904 - DNA, 73 bp, Homo sapiens; identical to SEQ ID NO: 25
  chr1:3371189-3371262
  hyper

SEQ ID NO: 34905 - DNA, 39 bp, Homo sapiens; identical to SEQ ID NO: 26
  chr1:3371630-3371669
  hyper

SEQ ID NO: 34906 - DNA, 31 bp, Homo sapiens; identical to SEQ ID NO: 27
  chr1:3447460-3447491
  hyper

SEQ ID NO: 34907 - DNA, 39 bp, Homo sapiens; identical to SEQ ID NO: 28
  chr1:3447532-3447571
  hyper

SEQ ID NO: 34908 - DNA, 119 bp, Homo sapiens; identical to SEQ ID NO: 29
  chr1:3447572-3447691
  hyper

SEQ ID NO: 34909 - DNA, 52 bp, Homo sapiens; identical to SEQ ID NO: 30
  chr1:3447704-3447756
  hyper

SEQ ID NO: 34910 - DNA, 49 bp, Homo sapiens; identical to SEQ ID NO: 31
  chr1:3447761-3447810
  hyper

SEQ ID NO: 34911 - DNA, 162 bp, Homo sapiens; identical to SEQ ID NO: 32
  chr1:3447822-3447984
  hyper

SEQ ID NO: 34912 - DNA, 36 bp, Homo sapiens; identical to SEQ ID NO: 33
  chr1:3448358-3448394
  hyper

SEQ ID NO: 34913 - DNA, 49 bp, Homo sapiens; identical to SEQ ID NO: 34
  chr1:3540866-3540915
  hyper

SEQ ID NO: 34914 - DNA, 88 bp, Homo sapiens; identical to SEQ ID NO: 35
  chr1:3817993-3818081
  hyper

SEQ ID NO: 34915 - DNA, 44 bp, Homo sapiens; identical to SEQ ID NO: 36
  chr1:4004557-4004601
  hyper

SEQ ID NO: 34916 - DNA, 31 bp, Homo sapiens; identical to SEQ ID NO: 37
  chr1:5805925-5805956
  hyper

SEQ ID NO: 34917 - DNA, 37 bp, Homo sapiens
  chr1:6053655-6053692
  hyper
ccttcccaccccgccaaccagccgcatcctggtgtcc

SEQ ID NO: 34918 - DNA, 41 bp, Homo sapiens; identical to SEQ ID NO: 39
  chr1:6053725-6053766
  hyper

SEQ ID NO: 34919 - DNA, 31 bp, Homo sapiens; identical to SEQ ID NO: 40
  chr1:6474590-6474621
  hyper

SEQ ID NO: 34920 - DNA, 43 bp, Homo sapiens; identical to SEQ ID NO: 41
  chr1:6479749-6479792
  hyper

SEQ ID NO: 34921 - DNA, 44 bp, Homo sapiens; identical to SEQ ID NO: 42
  chr1:6480128-6480172
  hyper

SEQ ID NO: 34922 - DNA, 124 bp, Homo sapiens; identical to SEQ ID NO: 47
  chr1:7843508-7843632
  hyper

SEQ ID NO: 34923 - DNA, 41 bp, Homo sapiens; identical to SEQ ID NO: 48
  chr1:7843652-7843693
  hyper

SEQ ID NO: 34924 - DNA, 189 bp, Homo sapiens; identical to SEQ ID NO: 49
  chr1:7844212-7844401
  hyper

SEQ ID NO: 34925 - DNA, 62 bp, Homo sapiens; identical to SEQ ID NO: 50
  chr1:8085828-8085890
  hyper

SEQ ID NO: 34926 - DNA, 38 bp, Homo sapiens
  chr1:8086055-8086093
  hyper
ccatcccagagactccgcgtcgcggcgaccctccccgc

SEQ ID NO: 34927 - DNA, 47 bp, Homo sapiens; identical to SEQ ID NO: 54
  chr1:8086513-8086560
  hyper

SEQ ID NO: 34928 - DNA, 64 bp, Homo sapiens; identical to SEQ ID NO: 55
  chr1:8086646-8086710
  hyper

SEQ ID NO: 34929 - DNA, 31 bp, Homo sapiens; identical to SEQ ID NO: 56
  chr1:9188650-9188681
  hyper

SEQ ID NO: 34930 - DNA, 31 bp, Homo sapiens; identical to SEQ ID NO: 57
  chr1:9188691-9188722
  hyper

SEQ ID NO: 34931 - DNA, 138 bp, Homo sapiens; identical to SEQ ID NO: 58
  chr1:9188767-9188905
  hyper

SEQ ID NO: 34932 - DNA, 201 bp, Homo sapiens; identical to SEQ ID NO: 59
  chr1:9189021-9189222
  hyper

SEQ ID NO: 34933 - DNA, 31 bp, Homo sapiens; identical to SEQ ID NO: 60
  chr1:9352659-9352690
  hyper

SEQ ID NO: 34934 - DNA, 190 bp, Homo sapiens; identical to SEQ ID NO: 61
  chr1:9352964-9353154
  hyper

SEQ ID NO: 34935 - DNA, 48 bp, Homo sapiens; identical to SEQ ID NO: 62
  chr1:9353808-9353856
  hyper

SEQ ID NO: 34936 - DNA, 106 bp, Homo sapiens; identical to SEQ ID NO: 63
  chr1:9489049-9489155
  hyper

SEQ ID NO: 34937 - DNA, 54 bp, Homo sapiens; identical to SEQ ID NO: 64
  chr1:9489161-9489215
  hyper

SEQ ID NO: 34938 - DNA, 162 bp, Homo sapiens
  chr1:9711913-9712075
  hyper
ggggctttgggagctgcggctgcgctcgggggcgcggggctggctggcgggcgtctctccggcacacacagcccgtgcgccctggccctgggcgcctccccgagtctagcgagccgggtcctgggagccccgggggccgggctgctgggacctgggcggggg

SEQ ID NO: 34939 - DNA, 155 bp, Homo sapiens; identical to SEQ ID NO: 69
  chr1:9747556-9747711
  hyper

SEQ ID NO: 34940 - DNA, 47 bp, Homo sapiens; identical to SEQ ID NO: 70
  chr1:9749326-9749373
  hyper

SEQ ID NO: 34941 - DNA, 100 bp, Homo sapiens; identical to SEQ ID NO: 71
  chr1:9749378-9749478
  hyper

SEQ ID NO: 34942 - DNA, 31 bp, Homo sapiens; identical to SEQ ID NO: 72
  chr1:10271340-10271371
  hyper

SEQ ID NO: 34943 - DNA, 31 bp, Homo sapiens; identical to SEQ ID NO: 73
  chr1:10853672-10853703
  hyper

SEQ ID NO: 34944 - DNA, 31 bp, Homo sapiens; identical to SEQ ID NO: 74
  chr1:10853727-10853758
  hyper

SEQ ID NO: 34945 - DNA, 47 bp, Homo sapiens; identical to SEQ ID NO: 75
  chr1:10853763-10853810
  hyper

SEQ ID NO: 34946 - DNA, 172 bp, Homo sapiens; identical to SEQ ID NO: 76
  chr1:10853955-10854127
  hyper

SEQ ID NO: 34947 - DNA, 31 bp, Homo sapiens; identical to SEQ ID NO: 77
  chr1:10854266-10854297
  hyper

SEQ ID NO: 34948 - DNA, 1 bp, Homo sapiens
  chr1:10854374-10854375
  hyper
t

SEQ ID NO: 34949 - DNA, 92 bp, Homo sapiens; identical to SEQ ID NO: 81
  chr1:10854700-10854792
  hyper

SEQ ID NO: 34950 - DNA, 167 bp, Homo sapiens; identical to SEQ ID NO: 82
  chr1:10854805-10854972
  hyper

SEQ ID NO: 34951 - DNA, 59 bp, Homo sapiens; identical to SEQ ID NO: 83
  chr1:10854994-10855053
  hyper

SEQ ID NO: 34952 - DNA, 34 bp, Homo sapiens; identical to SEQ ID NO: 84
  chr1:10855103-10855137
  hyper

SEQ ID NO: 34953 - DNA, 261 bp, Homo sapiens; identical to SEQ ID NO: 85
  chr1:10855138-10855399
  hyper

SEQ ID NO: 34954 - DNA, 206 bp, Homo sapiens; identical to SEQ ID NO: 86
  chr1:10855536-10855742
  hyper

SEQ ID NO: 34955 - DNA, 44 bp, Homo sapiens; identical to SEQ ID NO: 87
  chr1:10855788-10855832
  hyper

SEQ ID NO: 34956 - DNA, 34 bp, Homo sapiens; identical to SEQ ID NO: 88
  chr1:10855843-10855877
  hyper

SEQ ID NO: 34957 - DNA, 69 bp, Homo sapiens; identical to SEQ ID NO: 89
  chr1:10856314-10856383
  hyper

SEQ ID NO: 34958 - DNA, 56 bp, Homo sapiens; identical to SEQ ID NO: 90
  chr1:10856465-10856521
  hyper

SEQ ID NO: 34959 - DNA, 97 bp, Homo sapiens; identical to SEQ ID NO: 91
  chr1:10856550-10856647
  hyper

SEQ ID NO: 34960 - DNA, 145 bp, Homo sapiens; identical to SEQ ID NO: 92
  chr1:10856713-10856858
  hyper

SEQ ID NO: 34961 - DNA, 31 bp, Homo sapiens; identical to SEQ ID NO: 93
  chr1:10856861-10856892
  hyper

SEQ ID NO: 34962 - DNA, 37 bp, Homo sapiens; identical to SEQ ID NO: 94
  chr1:11751777-11751814
  hyper

SEQ ID NO: 34963 - DNA, 31 bp, Homo sapiens; identical to SEQ ID NO: 100
  chr1:12227483-12227514
  hyper

SEQ ID NO: 34964 - DNA, 39 bp, Homo sapiens; identical to SEQ ID NO: 106
  chr1:15250612-15250651
  hyper

SEQ ID NO: 34965 - DNA, 125 bp, Homo sapiens; identical to SEQ ID NO: 107
  chr1:15250889-15251014
  hyper

SEQ ID NO: 34966 - DNA, 169 bp, Homo sapiens
  chr1:15251274-15251443
  hyper
tcgggggctgcaccggggggccaggaccgcgcttgccggagccaggcgatcccgcggcgcctggagacccagctccgggctggaccccgcgtctgctgggggaagcgtgggaaaggggccagccctgcgcgaagttggttcggccccctgggaccgcacctgtgagcca

SEQ ID NO: 34967 - DNA, 59 bp, Homo sapiens; identical to SEQ ID NO: 110
  chr1:15478881-15478940
  hyper

SEQ ID NO: 34968 - DNA, 31 bp, Homo sapiens; identical to SEQ ID NO: 111
  chr1:15479056-15479087
  hyper

SEQ ID NO: 34969 - DNA, 31 bp, Homo sapiens; identical to SEQ ID NO: 112
  chr1:15479093-15479124
  hyper

SEQ ID NO: 34970 - DNA, 230 bp, Homo sapiens; identical to SEQ ID NO: 113
  chr1:15479163-15479393
  hyper

SEQ ID NO: 34971 - DNA, 95 bp, Homo sapiens; identical to SEQ ID NO: 114
  chr1:15479466-15479561
  hyper

SEQ ID NO: 34972 - DNA, 118 bp, Homo sapiens; identical to SEQ ID NO: 115
  chr1:15479565-15479683
  hyper

SEQ ID NO: 34973 - DNA, 47 bp, Homo sapiens; identical to SEQ ID NO: 116
  chr1:15480029-15480076
  hyper

SEQ ID NO: 34974 - DNA, 14 bp, Homo sapiens
  chr1:15480226-15480240
  hyper
gcacgccggcgctc

SEQ ID NO: 34975 - DNA, 62 bp, Homo sapiens; identical to SEQ ID NO: 118
  chr1:15480241-15480303
  hyper

SEQ ID NO: 34976 - DNA, 56 bp, Homo sapiens
  chr1:15480538-15480594
  hyper
gtttgggtctcctgtccgtccgtctgtccgccgagcgcttcccgcctggggtcgac

SEQ ID NO: 34977 - DNA, 2 bp, Homo sapiens
  chr1:15928988-15928990
  hyper
at

SEQ ID NO: 34978 - DNA, 73 bp, Homo sapiens; identical to SEQ ID NO: 123
  chr1:16481895-16481968
  hyper

SEQ ID NO: 34979 - DNA, 31 bp, Homo sapiens; identical to SEQ ID NO: 124
  chr1:16481974-16482005
  hyper

SEQ ID NO: 34980 - DNA, 229 bp, Homo sapiens; identical to SEQ ID NO: 125
  chr1:16482017-16482246
  hyper

SEQ ID NO: 34981 - DNA, 94 bp, Homo sapiens; identical to SEQ ID NO: 126
  chr1:16482252-16482346
  hyper

SEQ ID NO: 34982 - DNA, 86 bp, Homo sapiens; identical to SEQ ID NO: 127
  chr1:16482709-16482795
  hyper

SEQ ID NO: 34983 - DNA, 69 bp, Homo sapiens; identical to SEQ ID NO: 128
  chr1:16514365-16514434
  hyper

SEQ ID NO: 34984 - DNA, 30 bp, Homo sapiens
  chr1:17865970-17866000
  hyper
gccgggccccatccccgcgggcctcagttt

SEQ ID NO: 34985 - DNA, 118 bp, Homo sapiens; identical to SEQ ID NO: 130
  chr1:17866005-17866123
  hyper

SEQ ID NO: 34986 - DNA, 263 bp, Homo sapiens; identical to SEQ ID NO: 131
  chr1:17866227-17866490
  hyper

SEQ ID NO: 34987 - DNA, 31 bp, Homo sapiens; identical to SEQ ID NO: 132
  chr1:18960803-18960834
  hyper

SEQ ID NO: 34988 - DNA, 31 bp, Homo sapiens; identical to SEQ ID NO: 133
  chr1:18978534-18978565
  hyper

SEQ ID NO: 34989 - DNA, 2 bp, Homo sapiens
  chr1:18978566-18978568
  hyper
gg

SEQ ID NO: 34990 - DNA, 24 bp, Homo sapiens
  chr1:18978597-18978621
  hyper
aggctgggccggctgggcccacag

SEQ ID NO: 34991 - DNA, 51 bp, Homo sapiens; identical to SEQ ID NO: 135
  chr1:19229564-19229615
  hyper

SEQ ID NO: 34992 - DNA, 115 bp, Homo sapiens; identical to SEQ ID NO: 136
  chr1:19639207-19639322
  hyper

SEQ ID NO: 34993 - DNA, 35 bp, Homo sapiens; identical to SEQ ID NO: 137
  chr1:19639477-19639512
  hyper

SEQ ID NO: 34994 - DNA, 38 bp, Homo sapiens
  chr1:20512799-20512837
  hyper
gagcctggagaaaagtctgctcccgaggcaaagcaagc

SEQ ID NO: 34995 - DNA, 40 bp, Homo sapiens; identical to SEQ ID NO: 141
  chr1:20811903-20811943
  hyper

SEQ ID NO: 34996 - DNA, 52 bp, Homo sapiens; identical to SEQ ID NO: 142
  chr1:20811986-20812038
  hyper

SEQ ID NO: 34997 - DNA, 63 bp, Homo sapiens; identical to SEQ ID NO: 143
  chr1:20812133-20812196
  hyper

SEQ ID NO: 34998 - DNA, 87 bp, Homo sapiens; identical to SEQ ID NO: 144
  chr1:20812225-20812312
  hyper

SEQ ID NO: 34999 - DNA, 37 bp, Homo sapiens; identical to SEQ ID NO: 145
  chr1:20812695-20812732
  hyper

SEQ ID NO: 35000 - DNA, 144 bp, Homo sapiens; identical to SEQ ID NO: 146
  chr1:20813299-20813443
  hyper

SEQ ID NO: 35001 - DNA, 31 bp, Homo sapiens; identical to SEQ ID NO: 147
  chr1:20959848-20959879
  hyper

SEQ ID NO: 35002 - DNA, 58 bp, Homo sapiens
  chr1:21058206-21058264
  hyper
cgaggcccctgaggggcgggcgcgggggtgcgaagcgctccagagtgggctgccggtc

SEQ ID NO: 35003 - DNA, 11 bp, Homo sapiens
  chr1:21058417-21058428
  hyper
cctcactcccg

SEQ ID NO: 35004 - DNA, 12 bp, Homo sapiens
  chr1:22140662-22140674
  hyper
ccgcatcttagg

SEQ ID NO: 35005 - DNA, 51 bp, Homo sapiens; identical to SEQ ID NO: 151
  chr1:22263554-22263605
  hyper

SEQ ID NO: 35006 - DNA, 46 bp, Homo sapiens; identical to SEQ ID NO: 152
  chr1:22469042-22469088
  hyper

SEQ ID NO: 35007 - DNA, 44 bp, Homo sapiens; identical to SEQ ID NO: 153
  chr1:23037112-23037156
  hyper

SEQ ID NO: 35008 - DNA, 120 bp, Homo sapiens; identical to SEQ ID NO: 154
  chr1:23037774-23037894
  hyper

SEQ ID NO: 35009 - DNA, 39 bp, Homo sapiens; identical to SEQ ID NO: 155
  chr1:23038019-23038058
  hyper

SEQ ID NO: 35010 - DNA, 44 bp, Homo sapiens
  chr1:23038250-23038294
  hyper
cccgggaactctccagctgccgccggggccggaccagatgctct

SEQ ID NO: 35011 - DNA, 31 bp, Homo sapiens; identical to SEQ ID NO: 157
  chr1:23038305-23038336
  hyper

SEQ ID NO: 35012 - DNA, 31 bp, Homo sapiens; identical to SEQ ID NO: 158
  chr1:23346339-23346370
  hyper

SEQ ID NO: 35013 - DNA, 47 bp, Homo sapiens; identical to SEQ ID NO: 159
  chr1:23543644-23543691
  hyper

SEQ ID NO: 35014 - DNA, 35 bp, Homo sapiens; identical to SEQ ID NO: 160
  chr1:23543857-23543892
  hyper

SEQ ID NO: 35015 - DNA, 31 bp, Homo sapiens; identical to SEQ ID NO: 161
  chr1:23857852-23857883
  hyper

SEQ ID NO: 35016 - DNA, 66 bp, Homo sapiens; identical to SEQ ID NO: 162
  chr1:24126328-24126394
  hyper

SEQ ID NO: 35017 - DNA, 86 bp, Homo sapiens; identical to SEQ ID NO: 163
  chr1:24126403-24126489
  hyper

SEQ ID NO: 35018 - DNA, 43 bp, Homo sapiens; identical to SEQ ID NO: 164
  chr1:24126492-24126535
  hyper

SEQ ID NO: 35019 - DNA, 31 bp, Homo sapiens; identical to SEQ ID NO: 165
  chr1:24126678-24126709
  hyper

SEQ ID NO: 35020 - DNA, 31 bp, Homo sapiens; identical to SEQ ID NO: 166
  chr1:24648595-24648626
  hyper

SEQ ID NO: 35021 - DNA, 2 bp, Homo sapiens
  chr1:24648831-24648833
  hyper
at

SEQ ID NO: 35022 - DNA, 7 bp, Homo sapiens
  chr1:25255934-25255941
  hyper
agccaga

SEQ ID NO: 35023 - DNA, 62 bp, Homo sapiens; identical to SEQ ID NO: 174
  chr1:25870617-25870679
  hyper

SEQ ID NO: 35024 - DNA, 81 bp, Homo sapiens; identical to SEQ ID NO: 175
  chr1:25870705-25870786
  hyper

SEQ ID NO: 35025 - DNA, 31 bp, Homo sapiens; identical to SEQ ID NO: 176
  chr1:26248902-26248933
  hyper

SEQ ID NO: 35026 - DNA, 58 bp, Homo sapiens; identical to SEQ ID NO: 177
  chr1:26758409-26758467
  hyper

SEQ ID NO: 35027 - DNA, 80 bp, Homo sapiens; identical to SEQ ID NO: 178
  chr1:26758476-26758556
  hyper

SEQ ID NO: 35028 - DNA, 41 bp, Homo sapiens; identical to SEQ ID NO: 179
  chr1:26855979-26856020
  hyper

SEQ ID NO: 35029 - DNA, 31 bp, Homo sapiens; identical to SEQ ID NO: 180
  chr1:26856055-26856086
  hyper

SEQ ID NO: 35030 - DNA, 31 bp, Homo sapiens; identical to SEQ ID NO: 181
  chr1:27286147-27286178
  hyper

SEQ ID NO: 35031 - DNA, 118 bp, Homo sapiens; identical to SEQ ID NO: 182
  chr1:27286496-27286614
  hyper

SEQ ID NO: 35032 - DNA, 31 bp, Homo sapiens; identical to SEQ ID NO: 183
  chr1:27321039-27321070
  hyper

SEQ ID NO: 35033 - DNA, 31 bp, Homo sapiens; identical to SEQ ID NO: 185
  chr1:27883559-27883590
  hyper

SEQ ID NO: 35034 - DNA, 49 bp, Homo sapiens; identical to SEQ ID NO: 186
  chr1:27902441-27902490
  hyper

SEQ ID NO: 35035 - DNA, 31 bp, Homo sapiens; identical to SEQ ID NO: 188
  chr1:28241431-28241462
  hyper

SEQ ID NO: 35036 - DNA, 31 bp, Homo sapiens; identical to SEQ ID NO: 189
  chr1:28241560-28241591
  hyper

SEQ ID NO: 35037 - DNA, 46 bp, Homo sapiens; identical to SEQ ID NO: 190
  chr1:28879901-28879947
  hyper

SEQ ID NO: 35038 - DNA, 31 bp, Homo sapiens; identical to SEQ ID NO: 191
  chr1:28879959-28879990
  hyper

SEQ ID NO: 35039 - DNA, 31 bp, Homo sapiens; identical to SEQ ID NO: 194
  chr1:31192286-31192317
  hyper

SEQ ID NO: 35040 - DNA, 31 bp, Homo sapiens; identical to SEQ ID NO: 195
  chr1:32666346-32666377
  hyper

SEQ ID NO: 35041 - DNA, 58 bp, Homo sapiens; identical to SEQ ID NO: 196
  chr1:32687708-32687766
  hyper

SEQ ID NO: 35042 - DNA, 31 bp, Homo sapiens; identical to SEQ ID NO: 197
  chr1:32852879-32852910
  hyper

SEQ ID NO: 35043 - DNA, 37 bp, Homo sapiens; identical to SEQ ID NO: 199
  chr1:33005605-33005642
  hyper

SEQ ID NO: 35044 - DNA, 37 bp, Homo sapiens; identical to SEQ ID NO: 200
  chr1:33207543-33207580
  hyper

SEQ ID NO: 35045 - DNA, 55 bp, Homo sapiens; identical to SEQ ID NO: 201
  chr1:33207711-33207766
  hyper

SEQ ID NO: 35046 - DNA, 41 bp, Homo sapiens; identical to SEQ ID NO: 202
  chr1:33207770-33207811
  hyper

SEQ ID NO: 35047 - DNA, 45 bp, Homo sapiens; identical to SEQ ID NO: 203
  chr1:33207825-33207870
  hyper

SEQ ID NO: 35048 - DNA, 35 bp, Homo sapiens; identical to SEQ ID NO: 204
  chr1:33721671-33721706
  hyper

SEQ ID NO: 35049 - DNA, 85 bp, Homo sapiens; identical to SEQ ID NO: 205
  chr1:33896550-33896635
  hyper

SEQ ID NO: 35050 - DNA, 91 bp, Homo sapiens; identical to SEQ ID NO: 206
  chr1:33896721-33896812
  hyper

SEQ ID NO: 35051 - DNA, 31 bp, Homo sapiens; identical to SEQ ID NO: 207
  chr1:35208445-35208476
  hyper

SEQ ID NO: 35052 - DNA, 2 bp, Homo sapiens
  chr1:35394613-35394615
  hyper
ca

SEQ ID NO: 35053 - DNA, 85 bp, Homo sapiens
  chr1:35394790-35394875
  hyper
cccgcggccctgaccgggagcgtgggtccgcggtccgcgtggtcccctgcccgcccctcgggtcgggcccgcgggcagccaggcc

SEQ ID NO: 35054 - DNA, 99 bp, Homo sapiens
  chr1:35394944-35395043
  hyper
gagcccggggcgtgggcggcgccggggccgcagccgggccgtgcctggggggcgctgcagagggagccgcgagcgcggccccgtccccactcctccccg

SEQ ID NO: 35055 - DNA, 31 bp, Homo sapiens; identical to SEQ ID NO: 224
  chr1:36789069-36789100
  hyper

SEQ ID NO: 35056 - DNA, 48 bp, Homo sapiens; identical to SEQ ID NO: 225
  chr1:38100357-38100405
  hyper

SEQ ID NO: 35057 - DNA, 36 bp, Homo sapiens; identical to SEQ ID NO: 226
  chr1:38100408-38100444
  hyper

SEQ ID NO: 35058 - DNA, 52 bp, Homo sapiens; identical to SEQ ID NO: 227
  chr1:38100539-38100591
  hyper

SEQ ID NO: 35059 - DNA, 38 bp, Homo sapiens; identical to SEQ ID NO: 228
  chr1:38461632-38461670
  hyper

SEQ ID NO: 35060 - DNA, 43 bp, Homo sapiens; identical to SEQ ID NO: 231
  chr1:39874198-39874241
  hyper

SEQ ID NO: 35061 - DNA, 60 bp, Homo sapiens; identical to SEQ ID NO: 232
  chr1:39874756-39874816
  hyper

SEQ ID NO: 35062 - DNA, 81 bp, Homo sapiens
  chr1:40781128-40781209
  hyper
cggcgccgcctattggcgacgaggggcactacatctccgggcaccccgaagtccccacccccaccacagcgctcacaaagt

SEQ ID NO: 35063 - DNA, 75 bp, Homo sapiens; identical to SEQ ID NO: 239
  chr1:41328099-41328174
  hyper

SEQ ID NO: 35064 - DNA, 16 bp, Homo sapiens
  chr1:41444974-41444990
  hyper
ccgtcttggaggccag

SEQ ID NO: 35065 - DNA, 230 bp, Homo sapiens; identical to SEQ ID NO: 241
  chr1:41981772-41982002
  hyper

SEQ ID NO: 35066 - DNA, 31 bp, Homo sapiens; identical to SEQ ID NO: 242
  chr1:41982130-41982161
  hyper

SEQ ID NO: 35067 - DNA, 37 bp, Homo sapiens
  chr1:42128196-42128233
  hyper
tcactgctggccaccccgggatgccttcgcggccggg

SEQ ID NO: 35068 - DNA, 62 bp, Homo sapiens; identical to SEQ ID NO: 245
  chr1:42928781-42928843
  hyper

SEQ ID NO: 35069 - DNA, 155 bp, Homo sapiens; identical to SEQ ID NO: 246
  chr1:42928877-42929032
  hyper

SEQ ID NO: 35070 - DNA, 38 bp, Homo sapiens; identical to SEQ ID NO: 247
  chr1:42929107-42929145
  hyper

SEQ ID NO: 35071 - DNA, 31 bp, Homo sapiens; identical to SEQ ID NO: 248
  chr1:42929207-42929238
  hyper

SEQ ID NO: 35072 - DNA, 173 bp, Homo sapiens; identical to SEQ ID NO: 249
  chr1:43919240-43919413
  hyper

SEQ ID NO: 35073 - DNA, 93 bp, Homo sapiens; identical to SEQ ID NO: 250
  chr1:43919567-43919660
  hyper

SEQ ID NO: 35074 - DNA, 35 bp, Homo sapiens; identical to SEQ ID NO: 251
  chr1:43996429-43996464
  hyper

SEQ ID NO: 35075 - DNA, 61 bp, Homo sapiens; identical to SEQ ID NO: 252
  chr1:43997370-43997431
  hyper

SEQ ID NO: 35076 - DNA, 111 bp, Homo sapiens; identical to SEQ ID NO: 253
  chr1:43997477-43997588
  hyper

SEQ ID NO: 35077 - DNA, 49 bp, Homo sapiens; identical to SEQ ID NO: 254
  chr1:44444660-44444709
  hyper

SEQ ID NO: 35078 - DNA, 43 bp, Homo sapiens; identical to SEQ ID NO: 255
  chr1:45097399-45097442
  hyper

SEQ ID NO: 35079 - DNA, 87 bp, Homo sapiens; identical to SEQ ID NO: 256
  chr1:45097717-45097804
  hyper

SEQ ID NO: 35080 - DNA, 31 bp, Homo sapiens; identical to SEQ ID NO: 257
  chr1:45098108-45098139
  hyper

SEQ ID NO: 35081 - DNA, 31 bp, Homo sapiens; identical to SEQ ID NO: 258
  chr1:45098296-45098327
  hyper

SEQ ID NO: 35082 - DNA, 31 bp, Homo sapiens; identical to SEQ ID NO: 260
  chr1:46957409-46957440
  hyper

SEQ ID NO: 35083 - DNA, 238 bp, Homo sapiens; identical to SEQ ID NO: 261
  chr1:47903679-47903917
  hyper

SEQ ID NO: 35084 - DNA, 35 bp, Homo sapiens; identical to SEQ ID NO: 262
  chr1:47904094-47904129
  hyper

SEQ ID NO: 35085 - DNA, 54 bp, Homo sapiens; identical to SEQ ID NO: 264
  chr1:47973919-47973973
  hyper

SEQ ID NO: 35086 - DNA, 31 bp, Homo sapiens; identical to SEQ ID NO: 265
  chr1:47974261-47974292
  hyper

SEQ ID NO: 35087 - DNA, 31 bp, Homo sapiens; identical to SEQ ID NO: 266
  chr1:48175593-48175624
  hyper

SEQ ID NO: 35088 - DNA, 31 bp, Homo sapiens; identical to SEQ ID NO: 267
  chr1:48175630-48175661
  hyper

SEQ ID NO: 35089 - DNA, 31 bp, Homo sapiens; identical to SEQ ID NO: 268
  chr1:48463141-48463172
  hyper

SEQ ID NO: 35090 - DNA, 60 bp, Homo sapiens; identical to SEQ ID NO: 269
  chr1:48463405-48463465
  hyper

SEQ ID NO: 35091 - DNA, 48 bp, Homo sapiens; identical to SEQ ID NO: 270
  chr1:48937983-48938031
  hyper

SEQ ID NO: 35092 - DNA, 75 bp, Homo sapiens; identical to SEQ ID NO: 271
  chr1:48938039-48938114
  hyper

SEQ ID NO: 35093 - DNA, 45 bp, Homo sapiens; identical to SEQ ID NO: 272
  chr1:49242175-49242220
  hyper

SEQ ID NO: 35094 - DNA, 74 bp, Homo sapiens
  chr1:49242226-49242300
  hyper
ggtcccagcccccgcccgggtcccaccgtccctccccgcccgcttgctcacctgccagcgccaggatctgggcc

SEQ ID NO: 35095 - DNA, 31 bp, Homo sapiens; identical to SEQ ID NO: 276
  chr1:50717516-50717547
  hyper

SEQ ID NO: 35096 - DNA, 31 bp, Homo sapiens; identical to SEQ ID NO: 277
  chr1:52194973-52195004
  hyper

SEQ ID NO: 35097 - DNA, 191 bp, Homo sapiens; identical to SEQ ID NO: 278
  chr1:52195012-52195203
  hyper

SEQ ID NO: 35098 - DNA, 121 bp, Homo sapiens; identical to SEQ ID NO: 282
  chr1:53387230-53387351
  hyper

SEQ ID NO: 35099 - DNA, 31 bp, Homo sapiens; identical to SEQ ID NO: 283
  chr1:53401231-53401262
  hyper

SEQ ID NO: 35100 - DNA, 31 bp, Homo sapiens; identical to SEQ ID NO: 284
  chr1:54871324-54871355
  hyper

SEQ ID NO: 35101 - DNA, 31 bp, Homo sapiens; identical to SEQ ID NO: 285
  chr1:55352447-55352478
  hyper

SEQ ID NO: 35102 - DNA, 101 bp, Homo sapiens; identical to SEQ ID NO: 286
  chr1:55352583-55352684
  hyper

SEQ ID NO: 35103 - DNA, 126 bp, Homo sapiens; identical to SEQ ID NO: 287
  chr1:57044386-57044512
  hyper

SEQ ID NO: 35104 - DNA, 53 bp, Homo sapiens; identical to SEQ ID NO: 288
  chr1:57044989-57045042
  hyper

SEQ ID NO: 35105 - DNA, 44 bp, Homo sapiens; identical to SEQ ID NO: 289
  chr1:59612305-59612349
  hyper

SEQ ID NO: 35106 - DNA, 55 bp, Homo sapiens; identical to SEQ ID NO: 293
  chr1:59762086-59762141
  hyper

SEQ ID NO: 35107 - DNA, 42 bp, Homo sapiens; identical to SEQ ID NO: 294
  chr1:59762154-59762196
  hyper

SEQ ID NO: 35108 - DNA, 35 bp, Homo sapiens; identical to SEQ ID NO: 295
  chr1:60280305-60280340
  hyper

SEQ ID NO: 35109 - DNA, 62 bp, Homo sapiens; identical to SEQ ID NO: 296
  chr1:60280812-60280874
  hyper

SEQ ID NO: 35110 - DNA, 41 bp, Homo sapiens; identical to SEQ ID NO: 297
  chr1:61516033-61516074
  hyper

SEQ ID NO: 35111 - DNA, 31 bp, Homo sapiens; identical to SEQ ID NO: 298
  chr1:61522826-61522857
  hyper

SEQ ID NO: 35112 - DNA, 314 bp, Homo sapiens; identical to SEQ ID NO: 299
  chr1:61547870-61548184
  hyper

SEQ ID NO: 35113 - DNA, 76 bp, Homo sapiens; identical to SEQ ID NO: 300
  chr1:61548948-61549024
  hyper

SEQ ID NO: 35114 - DNA, 31 bp, Homo sapiens; identical to SEQ ID NO: 301
  chr1:61549048-61549079
  hyper

SEQ ID NO: 35115 - DNA, 31 bp, Homo sapiens; identical to SEQ ID NO: 302
  chr1:61549083-61549114
  hyper

SEQ ID NO: 35116 - DNA, 31 bp, Homo sapiens; identical to SEQ ID NO: 303
  chr1:62207659-62207690
  hyper

SEQ ID NO: 35117 - DNA, 51 bp, Homo sapiens; identical to SEQ ID NO: 304
  chr1:62207888-62207939
  hyper

SEQ ID NO: 35118 - DNA, 94 bp, Homo sapiens; identical to SEQ ID NO: 305
  chr1:62207948-62208042
  hyper

SEQ ID NO: 35119 - DNA, 172 bp, Homo sapiens; identical to SEQ ID NO: 306
  chr1:62208089-62208261
  hyper

SEQ ID NO: 35120 - DNA, 34 bp, Homo sapiens; identical to SEQ ID NO: 307
  chr1:62208291-62208325
  hyper

SEQ ID NO: 35121 - DNA, 58 bp, Homo sapiens; identical to SEQ ID NO: 308
  chr1:62208416-62208474
  hyper

SEQ ID NO: 35122 - DNA, 218 bp, Homo sapiens; identical to SEQ ID NO: 309
  chr1:62208505-62208723
  hyper

SEQ ID NO: 35123 - DNA, 31 bp, Homo sapiens; identical to SEQ ID NO: 310
  chr1:63153559-63153590
  hyper

SEQ ID NO: 35124 - DNA, 87 bp, Homo sapiens; identical to SEQ ID NO: 311
  chr1:64239514-64239601
  hyper

SEQ ID NO: 35125 - DNA, 108 bp, Homo sapiens; identical to SEQ ID NO: 315
  chr1:65210939-65211047
  hyper

SEQ ID NO: 35126 - DNA, 154 bp, Homo sapiens; identical to SEQ ID NO: 316
  chr1:65211097-65211251
  hyper

SEQ ID NO: 35127 - DNA, 31 bp, Homo sapiens; identical to SEQ ID NO: 317
  chr1:65211257-65211288
  hyper

SEQ ID NO: 35128 - DNA, 53 bp, Homo sapiens; identical to SEQ ID NO: 318
  chr1:65211305-65211358
  hyper

SEQ ID NO: 35129 - DNA, 40 bp, Homo sapiens; identical to SEQ ID NO: 322
  chr1:65720328-65720368
  hyper

SEQ ID NO: 35130 - DNA, 31 bp, Homo sapiens; identical to SEQ ID NO: 323
  chr1:65886883-65886914
  hyper

SEQ ID NO: 35131 - DNA, 87 bp, Homo sapiens; identical to SEQ ID NO: 324
  chr1:68297963-68298050
  hyper

SEQ ID NO: 35132 - DNA, 64 bp, Homo sapiens; identical to SEQ ID NO: 325
  chr1:68298069-68298133
  hyper

SEQ ID NO: 35133 - DNA, 31 bp, Homo sapiens; identical to SEQ ID NO: 326
  chr1:68298147-68298178
  hyper

SEQ ID NO: 35134 - DNA, 104 bp, Homo sapiens; identical to SEQ ID NO: 329
  chr1:68298693-68298797
  hyper

SEQ ID NO: 35135 - DNA, 64 bp, Homo sapiens; identical to SEQ ID NO: 330
  chr1:68298799-68298863
  hyper

SEQ ID NO: 35136 - DNA, 175 bp, Homo sapiens; identical to SEQ ID NO: 331
  chr1:68298874-68299049
  hyper

SEQ ID NO: 35137 - DNA, 37 bp, Homo sapiens; identical to SEQ ID NO: 332
  chr1:68299073-68299110
  hyper

SEQ ID NO: 35138 - DNA, 119 bp, Homo sapiens; identical to SEQ ID NO: 333
  chr1:68299112-68299231
  hyper

SEQ ID NO: 35139 - DNA, 52 bp, Homo sapiens; identical to SEQ ID NO: 334
  chr1:68697470-68697522
  hyper

SEQ ID NO: 35140 - DNA, 126 bp, Homo sapiens; identical to SEQ ID NO: 335
  chr1:68698098-68698224
  hyper

SEQ ID NO: 35141 - DNA, 34 bp, Homo sapiens; identical to SEQ ID NO: 336
  chr1:68698243-68698277
  hyper

SEQ ID NO: 35142 - DNA, 97 bp, Homo sapiens; identical to SEQ ID NO: 339
  chr1:85666111-85666208
  hyper

SEQ ID NO: 35143 - DNA, 61 bp, Homo sapiens; identical to SEQ ID NO: 340
  chr1:85666212-85666273
  hyper

SEQ ID NO: 35144 - DNA, 156 bp, Homo sapiens; identical to SEQ ID NO: 341
  chr1:85666851-85667007
  hyper

SEQ ID NO: 35145 - DNA, 51 bp, Homo sapiens; identical to SEQ ID NO: 342
  chr1:85667112-85667163
  hyper

SEQ ID NO: 35146 - DNA, 94 bp, Homo sapiens
  chr1:85773928-85774022
  hyper
gcagatcctgggaagacgccctttactcagtaaggagggcccaggcgtccaaagcccaccagggggcagcggcggcattcttagccccacttct

SEQ ID NO: 35147 - DNA, 48 bp, Homo sapiens; identical to SEQ ID NO: 344
  chr1:85774089-85774137
  hyper

SEQ ID NO: 35148 - DNA, 78 bp, Homo sapiens; identical to SEQ ID NO: 345
  chr1:85930019-85930097
  hyper

SEQ ID NO: 35149 - DNA, 31 bp, Homo sapiens; identical to SEQ ID NO: 346
  chr1:85930218-85930249
  hyper

SEQ ID NO: 35150 - DNA, 189 bp, Homo sapiens; identical to SEQ ID NO: 347
  chr1:85930279-85930468
  hyper

SEQ ID NO: 35151 - DNA, 49 bp, Homo sapiens; identical to SEQ ID NO: 348
  chr1:85930496-85930545
  hyper

SEQ ID NO: 35152 - DNA, 157 bp, Homo sapiens; identical to SEQ ID NO: 349
  chr1:85930555-85930712
  hyper

SEQ ID NO: 35153 - DNA, 56 bp, Homo sapiens; identical to SEQ ID NO: 350
  chr1:85930890-85930946
  hyper

SEQ ID NO: 35154 - DNA, 31 bp, Homo sapiens; identical to SEQ ID NO: 351
  chr1:86045945-86045976
  hyper

SEQ ID NO: 35155 - DNA, 67 bp, Homo sapiens; identical to SEQ ID NO: 352
  chr1:86046413-86046480
  hyper

SEQ ID NO: 35156 - DNA, 42 bp, Homo sapiens; identical to SEQ ID NO: 353
  chr1:86046491-86046533
  hyper

SEQ ID NO: 35157 - DNA, 31 bp, Homo sapiens; identical to SEQ ID NO: 354
  chr1:86046539-86046570
  hyper

SEQ ID NO: 35158 - DNA, 31 bp, Homo sapiens; identical to SEQ ID NO: 355
  chr1:86046585-86046616
  hyper

SEQ ID NO: 35159 - DNA, 71 bp, Homo sapiens; identical to SEQ ID NO: 356
  chr1:86046830-86046901
  hyper

SEQ ID NO: 35160 - DNA, 84 bp, Homo sapiens; identical to SEQ ID NO: 357
  chr1:86047064-86047148
  hyper

SEQ ID NO: 35161 - DNA, 16 bp, Homo sapiens
  chr1:90309277-90309293
  hyper
ggagctcgcccaagcc

SEQ ID NO: 35162 - DNA, 48 bp, Homo sapiens
  chr1:90309490-90309538
  hyper
actctggctgctgccgccctgggttcgggccggcggaaggccctgggc

SEQ ID NO: 35163 - DNA, 31 bp, Homo sapiens; identical to SEQ ID NO: 360
  chr1:90309542-90309573
  hyper

SEQ ID NO: 35164 - DNA, 31 bp, Homo sapiens; identical to SEQ ID NO: 361
  chr1:92350626-92350657
  hyper

SEQ ID NO: 35165 - DNA, 53 bp, Homo sapiens; identical to SEQ ID NO: 362
  chr1:92350671-92350724
  hyper

SEQ ID NO: 35166 - DNA, 31 bp, Homo sapiens; identical to SEQ ID NO: 363
  chr1:92351055-92351086
  hyper

SEQ ID NO: 35167 - DNA, 66 bp, Homo sapiens; identical to SEQ ID NO: 364
  chr1:92351378-92351444
  hyper

SEQ ID NO: 35168 - DNA, 34 bp, Homo sapiens; identical to SEQ ID NO: 365
  chr1:92351624-92351658
  hyper

SEQ ID NO: 35169 - DNA, 40 bp, Homo sapiens; identical to SEQ ID NO: 366
  chr1:92546224-92546264
  hyper

SEQ ID NO: 35170 - DNA, 56 bp, Homo sapiens; identical to SEQ ID NO: 367
  chr1:92949566-92949622
  hyper

SEQ ID NO: 35171 - DNA, 129 bp, Homo sapiens; identical to SEQ ID NO: 368
  chr1:92950216-92950345
  hyper

SEQ ID NO: 35172 - DNA, 25 bp, Homo sapiens
  chr1:92950410-92950435
  hyper
tcggctggttcagaaacgagggtgc

SEQ ID NO: 35173 - DNA, 107 bp, Homo sapiens; identical to SEQ ID NO: 382
  chr1:93250728-93250835
  hyper

SEQ ID NO: 35174 - DNA, 151 bp, Homo sapiens; identical to SEQ ID NO: 383
  chr1:93250907-93251058
  hyper

SEQ ID NO: 35175 - DNA, 88 bp, Homo sapiens; identical to SEQ ID NO: 384
  chr1:93913453-93913541
  hyper

SEQ ID NO: 35176 - DNA, 378 bp, Homo sapiens; identical to SEQ ID NO: 385
  chr1:93913688-93914066
  hyper

SEQ ID NO: 35177 - DNA, 63 bp, Homo sapiens; identical to SEQ ID NO: 386
  chr1:93914095-93914158
  hyper

SEQ ID NO: 35178 - DNA, 31 bp, Homo sapiens; identical to SEQ ID NO: 387
  chr1:93914232-93914263
  hyper

SEQ ID NO: 35179 - DNA, 47 bp, Homo sapiens; identical to SEQ ID NO: 388
  chr1:93914301-93914348
  hyper

SEQ ID NO: 35180 - DNA, 61 bp, Homo sapiens; identical to SEQ ID NO: 389
  chr1:93914404-93914465
  hyper

SEQ ID NO: 35181 - DNA, 71 bp, Homo sapiens; identical to SEQ ID NO: 390
  chr1:93914735-93914806
  hyper

SEQ ID NO: 35182 - DNA, 59 bp, Homo sapiens; identical to SEQ ID NO: 391
  chr1:93914820-93914879
  hyper

SEQ ID NO: 35183 - DNA, 69 bp, Homo sapiens; identical to SEQ ID NO: 392
  chr1:94702466-94702535
  hyper

SEQ ID NO: 35184 - DNA, 54 bp, Homo sapiens; identical to SEQ ID NO: 393
  chr1:94702548-94702602
  hyper

SEQ ID NO: 35185 - DNA, 112 bp, Homo sapiens
  chr1:94702824-94702936
  hyper
tagcgcagcctgccaccgcttccactcggggccgccccgcgggcctcccggaccctggacggcaattcgcgggcgctcgcgcgggcaaccccagcccggagccacgaccgcc

SEQ ID NO: 35186 - DNA, 31 bp, Homo sapiens
  chr1:94702990-94703021
  hyper
gccggacgcggacgcccgccccacacctacg

SEQ ID NO: 35187 - DNA, 31 bp, Homo sapiens; identical to SEQ ID NO: 395
  chr1:94703446-94703477
  hyper

SEQ ID NO: 35188 - DNA, 38 bp, Homo sapiens; identical to SEQ ID NO: 396
  chr1:94703490-94703528
  hyper

SEQ ID NO: 35189 - DNA, 68 bp, Homo sapiens; identical to SEQ ID NO: 397
  chr1:94713017-94713085
  hyper

SEQ ID NO: 35190 - DNA, 50 bp, Homo sapiens; identical to SEQ ID NO: 398
  chr1:94713212-94713262
  hyper

SEQ ID NO: 35191 - DNA, 38 bp, Homo sapiens; identical to SEQ ID NO: 399
  chr1:94713266-94713304
  hyper

SEQ ID NO: 35192 - DNA, 121 bp, Homo sapiens; identical to SEQ ID NO: 400
  chr1:94884614-94884735
  hyper

SEQ ID NO: 35193 - DNA, 102 bp, Homo sapiens; identical to SEQ ID NO: 401
  chr1:95007082-95007184
  hyper

SEQ ID NO: 35194 - DNA, 79 bp, Homo sapiens; identical to SEQ ID NO: 402
  chr1:95007290-95007369
  hyper

SEQ ID NO: 35195 - DNA, 138 bp, Homo sapiens; identical to SEQ ID NO: 403
  chr1:95007378-95007516
  hyper

SEQ ID NO: 35196 - DNA, 2 bp, Homo sapiens
  chr1:95007666-95007668
  hyper
gg

SEQ ID NO: 35197 - DNA, 137 bp, Homo sapiens; identical to SEQ ID NO: 405
  chr1:95285586-95285723
  hyper

SEQ ID NO: 35198 - DNA, 273 bp, Homo sapiens; identical to SEQ ID NO: 406
  chr1:95285814-95286087
  hyper

SEQ ID NO: 35199 - DNA, 31 bp, Homo sapiens; identical to SEQ ID NO: 407
  chr1:95391394-95391425
  hyper

SEQ ID NO: 35200 - DNA, 31 bp, Homo sapiens; identical to SEQ ID NO: 408
  chr1:95391602-95391633
  hyper

SEQ ID NO: 35201 - DNA, 31 bp, Homo sapiens; identical to SEQ ID NO: 413
  chr1:95428593-95428624
  hyper

SEQ ID NO: 35202 - DNA, 31 bp, Homo sapiens; identical to SEQ ID NO: 414
  chr1:95582867-95582898
  hyper

SEQ ID NO: 35203 - DNA, 41 bp, Homo sapiens; identical to SEQ ID NO: 415
  chr1:95583056-95583097
  hyper

SEQ ID NO: 35204 - DNA, 138 bp, Homo sapiens; identical to SEQ ID NO: 416
  chr1:95583267-95583405
  hyper

SEQ ID NO: 35205 - DNA, 148 bp, Homo sapiens; identical to SEQ ID NO: 417
  chr1:95583420-95583568
  hyper

SEQ ID NO: 35206 - DNA, 31 bp, Homo sapiens; identical to SEQ ID NO: 419
  chr1:99127080-99127111
  hyper

SEQ ID NO: 35207 - DNA, 37 bp, Homo sapiens; identical to SEQ ID NO: 420
  chr1:99127233-99127270
  hyper

SEQ ID NO: 35208 - DNA, 53 bp, Homo sapiens; identical to SEQ ID NO: 421
  chr1:99127286-99127339
  hyper

SEQ ID NO: 35209 - DNA, 95 bp, Homo sapiens; identical to SEQ ID NO: 422
  chr1:99127365-99127460
  hyper

SEQ ID NO: 35210 - DNA, 31 bp, Homo sapiens; identical to SEQ ID NO: 423
  chr1:99127771-99127802
  hyper

SEQ ID NO: 35211 - DNA, 41 bp, Homo sapiens; identical to SEQ ID NO: 424
  chr1:100316317-100316358
  hyper

SEQ ID NO: 35212 - DNA, 21 bp, Homo sapiens
  chr1:100437130-100437151
  hyper
gggattacaggcgtgagccac

SEQ ID NO: 35213 - DNA, 26 bp, Homo sapiens
  chr1:101702344-101702370
  hyper
ctcagcagttcagatccgggggcccc

SEQ ID NO: 35214 - DNA, 31 bp, Homo sapiens; identical to SEQ ID NO: 433
  chr1:101702806-101702837
  hyper

SEQ ID NO: 35215 - DNA, 31 bp, Homo sapiens; identical to SEQ ID NO: 434
  chr1:101702879-101702910
  hyper

SEQ ID NO: 35216 - DNA, 31 bp, Homo sapiens; identical to SEQ ID NO: 435
  chr1:101702911-101702942
  hyper

SEQ ID NO: 35217 - DNA, 13 bp, Homo sapiens
  chr1:101703554-101703567
  hyper
ggtggggtggggg

SEQ ID NO: 35218 - DNA, 72 bp, Homo sapiens; identical to SEQ ID NO: 442
  chr1:107600099-107600171
  hyper

SEQ ID NO: 35219 - DNA, 31 bp, Homo sapiens; identical to SEQ ID NO: 446
  chr1:107842875-107842906
  hyper

SEQ ID NO: 35220 - DNA, 35 bp, Homo sapiens; identical to SEQ ID NO: 447
  chr1:108506549-108506584
  hyper

SEQ ID NO: 35221 - DNA, 2 bp, Homo sapiens
  chr1:108506594-108506596
  hyper
ac

SEQ ID NO: 35222 - DNA, 31 bp, Homo sapiens; identical to SEQ ID NO: 460
  chr1:109420435-109420466
  hyper

SEQ ID NO: 35223 - DNA, 62 bp, Homo sapiens; identical to SEQ ID NO: 461
  chr1:109632944-109633006
  hyper

SEQ ID NO: 35224 - DNA, 31 bp, Homo sapiens; identical to SEQ ID NO: 462
  chr1:109633007-109633038
  hyper

SEQ ID NO: 35225 - DNA, 71 bp, Homo sapiens; identical to SEQ ID NO: 463
  chr1:109940218-109940289
  hyper

SEQ ID NO: 35226 - DNA, 137 bp, Homo sapiens; identical to SEQ ID NO: 464
  chr1:109940368-109940505
  hyper

SEQ ID NO: 35227 - DNA, 45 bp, Homo sapiens; identical to SEQ ID NO: 465
  chr1:109940574-109940619
  hyper

SEQ ID NO: 35228 - DNA, 31 bp, Homo sapiens; identical to SEQ ID NO: 466
  chr1:109940635-109940666
  hyper

SEQ ID NO: 35229 - DNA, 31 bp, Homo sapiens; identical to SEQ ID NO: 467
  chr1:109940704-109940735
  hyper

SEQ ID NO: 35230 - DNA, 31 bp, Homo sapiens; identical to SEQ ID NO: 468
  chr1:109940805-109940836
  hyper

SEQ ID NO: 35231 - DNA, 31 bp, Homo sapiens; identical to SEQ ID NO: 469
  chr1:109941101-109941132
  hyper

SEQ ID NO: 35232 - DNA, 31 bp, Homo sapiens; identical to SEQ ID NO: 470
  chr1:110052254-110052285
  hyper

SEQ ID NO: 35233 - DNA, 49 bp, Homo sapiens
  chr1:110230559-110230608
  hyper
cgagggcgcaggggagggaagtgcgaagcagctgcgggacggactctag

SEQ ID NO: 35234 - DNA, 37 bp, Homo sapiens; identical to SEQ ID NO: 472
  chr1:110230682-110230719
  hyper

SEQ ID NO: 35235 - DNA, 148 bp, Homo sapiens; identical to SEQ ID NO: 473
  chr1:110453159-110453307
  hyper

SEQ ID NO: 35236 - DNA, 239 bp, Homo sapiens; identical to SEQ ID NO: 474
  chr1:110453530-110453769
  hyper

SEQ ID NO: 35237 - DNA, 160 bp, Homo sapiens; identical to SEQ ID NO: 475
  chr1:110453792-110453952
  hyper

SEQ ID NO: 35238 - DNA, 36 bp, Homo sapiens; identical to SEQ ID NO: 491
  chr1:112938561-112938597
  hyper

SEQ ID NO: 35239 - DNA, 43 bp, Homo sapiens; identical to SEQ ID NO: 492
  chr1:113249255-113249298
  hyper

SEQ ID NO: 35240 - DNA, 2 bp, Homo sapiens
  chr1:113497970-113497972
  hyper
tc

SEQ ID NO: 35241 - DNA, 80 bp, Homo sapiens; identical to SEQ ID NO: 496
  chr1:113499269-113499349
  hyper

SEQ ID NO: 35242 - DNA, 31 bp, Homo sapiens; identical to SEQ ID NO: 497
  chr1:113499352-113499383
  hyper

SEQ ID NO: 35243 - DNA, 229 bp, Homo sapiens; identical to SEQ ID NO: 498
  chr1:113932572-113932801
  hyper

SEQ ID NO: 35244 - DNA, 31 bp, Homo sapiens; identical to SEQ ID NO: 499
  chr1:113932872-113932903
  hyper

SEQ ID NO: 35245 - DNA, 80 bp, Homo sapiens; identical to SEQ ID NO: 500
  chr1:113932989-113933069
  hyper

SEQ ID NO: 35246 - DNA, 162 bp, Homo sapiens; identical to SEQ ID NO: 501
  chr1:113933116-113933278
  hyper

SEQ ID NO: 35247 - DNA, 94 bp, Homo sapiens; identical to SEQ ID NO: 502
  chr1:113933395-113933489
  hyper

SEQ ID NO: 35248 - DNA, 165 bp, Homo sapiens; identical to SEQ ID NO: 503
  chr1:113933515-113933680
  hyper

SEQ ID NO: 35249 - DNA, 136 bp, Homo sapiens; identical to SEQ ID NO: 504
  chr1:113933692-113933828
  hyper

SEQ ID NO: 35250 - DNA, 80 bp, Homo sapiens; identical to SEQ ID NO: 505
  chr1:113933829-113933909
  hyper

SEQ ID NO: 35251 - DNA, 99 bp, Homo sapiens; identical to SEQ ID NO: 506
  chr1:113933912-113934011
  hyper

SEQ ID NO: 35252 - DNA, 71 bp, Homo sapiens; identical to SEQ ID NO: 507
  chr1:113934012-113934083
  hyper

SEQ ID NO: 35253 - DNA, 286 bp, Homo sapiens; identical to SEQ ID NO: 508
  chr1:116184426-116184712
  hyper

SEQ ID NO: 35254 - DNA, 75 bp, Homo sapiens; identical to SEQ ID NO: 509
  chr1:116184713-116184788
  hyper

SEQ ID NO: 35255 - DNA, 108 bp, Homo sapiens; identical to SEQ ID NO: 510
  chr1:116184804-116184912
  hyper

SEQ ID NO: 35256 - DNA, 411 bp, Homo sapiens; identical to SEQ ID NO: 511
  chr1:116184919-116185330
  hyper

SEQ ID NO: 35257 - DNA, 57 bp, Homo sapiens; identical to SEQ ID NO: 512
  chr1:116185332-116185389
  hyper

SEQ ID NO: 35258 - DNA, 53 bp, Homo sapiens; identical to SEQ ID NO: 513
  chr1:116185400-116185453
  hyper

SEQ ID NO: 35259 - DNA, 31 bp, Homo sapiens; identical to SEQ ID NO: 514
  chr1:116185470-116185501
  hyper

SEQ ID NO: 35260 - DNA, 65 bp, Homo sapiens; identical to SEQ ID NO: 515
  chr1:116185508-116185573
  hyper

SEQ ID NO: 35261 - DNA, 31 bp, Homo sapiens; identical to SEQ ID NO: 516
  chr1:117209808-117209839
  hyper

SEQ ID NO: 35262 - DNA, 56 bp, Homo sapiens; identical to SEQ ID NO: 517
  chr1:117210091-117210147
  hyper

SEQ ID NO: 35263 - DNA, 46 bp, Homo sapiens; identical to SEQ ID NO: 518
  chr1:117452333-117452379
  hyper

SEQ ID NO: 35264 - DNA, 41 bp, Homo sapiens
  chr1:117452804-117452845
  hyper
agtcgctcccgccgggcgagcatggggcgcctggcctcgag

SEQ ID NO: 35265 - DNA, 57 bp, Homo sapiens
  chr1:117453203-117453260
  hyper
tcaccttgaactcccggcccggaaggtgctgcggtcccggcccgggtcctcggctcg

SEQ ID NO: 35266 - DNA, 128 bp, Homo sapiens; identical to SEQ ID NO: 523
  chr1:117453293-117453421
  hyper

SEQ ID NO: 35267 - DNA, 12 bp, Homo sapiens
  chr1:120190800-120190812
  hyper
ctgggtggcccg

SEQ ID NO: 35268 - DNA, 45 bp, Homo sapiens; identical to SEQ ID NO: 530
  chr1:150947648-150947693
  hyper

SEQ ID NO: 35269 - DNA, 2 bp, Homo sapiens
  chr1:150947696-150947698
  hyper
cc

SEQ ID NO: 35270 - DNA, 240 bp, Homo sapiens; identical to SEQ ID NO: 532
  chr1:151512608-151512848
  hyper

SEQ ID NO: 35271 - DNA, 210 bp, Homo sapiens; identical to SEQ ID NO: 533
  chr1:151512881-151513091
  hyper

SEQ ID NO: 35272 - DNA, 47 bp, Homo sapiens; identical to SEQ ID NO: 534
  chr1:151513226-151513273
  hyper

SEQ ID NO: 35273 - DNA, 42 bp, Homo sapiens
  chr1:151693821-151693863
  hyper
aatcagtcccccaatccgggaaaggcgatcctttagagaccc

SEQ ID NO: 35274 - DNA, 129 bp, Homo sapiens; identical to SEQ ID NO: 538
  chr1:153936614-153936743
  hyper

SEQ ID NO: 35275 - DNA, 38 bp, Homo sapiens; identical to SEQ ID NO: 539
  chr1:153936753-153936791
  hyper

SEQ ID NO: 35276 - DNA, 54 bp, Homo sapiens; identical to SEQ ID NO: 540
  chr1:153940531-153940585
  hyper

SEQ ID NO: 35277 - DNA, 40 bp, Homo sapiens; identical to SEQ ID NO: 541
  chr1:153940599-153940639
  hyper

SEQ ID NO: 35278 - DNA, 31 bp, Homo sapiens; identical to SEQ ID NO: 542
  chr1:153940657-153940688
  hyper

SEQ ID NO: 35279 - DNA, 131 bp, Homo sapiens; identical to SEQ ID NO: 543
  chr1:153958680-153958811
  hyper

SEQ ID NO: 35280 - DNA, 87 bp, Homo sapiens; identical to SEQ ID NO: 544
  chr1:153958816-153958903
  hyper

SEQ ID NO: 35281 - DNA, 31 bp, Homo sapiens; identical to SEQ ID NO: 545
  chr1:154297718-154297749
  hyper

SEQ ID NO: 35282 - DNA, 168 bp, Homo sapiens; identical to SEQ ID NO: 546
  chr1:154297758-154297926
  hyper

SEQ ID NO: 35283 - DNA, 73 bp, Homo sapiens
  chr1:154298038-154298111
  hyper
cgggccgaggccccgggggagcggggccgcagctgggggggcgggagcccgtggggagccgagccgagcgccc

SEQ ID NO: 35284 - DNA, 31 bp, Homo sapiens; identical to SEQ ID NO: 549
  chr1:154816590-154816621
  hyper

SEQ ID NO: 35285 - DNA, 183 bp, Homo sapiens; identical to SEQ ID NO: 550
  chr1:154972114-154972297
  hyper

SEQ ID NO: 35286 - DNA, 43 bp, Homo sapiens; identical to SEQ ID NO: 551
  chr1:155099555-155099598
  hyper

SEQ ID NO: 35287 - DNA, 90 bp, Homo sapiens; identical to SEQ ID NO: 552
  chr1:155099599-155099689
  hyper

SEQ ID NO: 35288 - DNA, 31 bp, Homo sapiens; identical to SEQ ID NO: 553
  chr1:155099827-155099858
  hyper

SEQ ID NO: 35289 - DNA, 71 bp, Homo sapiens; identical to SEQ ID NO: 554
  chr1:155099899-155099970
  hyper

SEQ ID NO: 35290 - DNA, 44 bp, Homo sapiens; identical to SEQ ID NO: 555
  chr1:155100351-155100395
  hyper

SEQ ID NO: 35291 - DNA, 59 bp, Homo sapiens; identical to SEQ ID NO: 556
  chr1:155100404-155100463
  hyper

SEQ ID NO: 35292 - DNA, 49 bp, Homo sapiens; identical to SEQ ID NO: 557
  chr1:155100484-155100533
  hyper

SEQ ID NO: 35293 - DNA, 40 bp, Homo sapiens; identical to SEQ ID NO: 558
  chr1:155100537-155100577
  hyper

SEQ ID NO: 35294 - DNA, 45 bp, Homo sapiens; identical to SEQ ID NO: 559
  chr1:155147169-155147214
  hyper

SEQ ID NO: 35295 - DNA, 2 bp, Homo sapiens
  chr1:155830323-155830325
  hyper
cc

SEQ ID NO: 35296 - DNA, 19 bp, Homo sapiens
  chr1:155830382-155830401
  hyper
gggcgcgatccaggccgga

SEQ ID NO: 35297 - DNA, 65 bp, Homo sapiens; identical to SEQ ID NO: 562
  chr1:156036260-156036325
  hyper

SEQ ID NO: 35298 - DNA, 31 bp, Homo sapiens; identical to SEQ ID NO: 563
  chr1:156084628-156084659
  hyper

SEQ ID NO: 35299 - DNA, 12 bp, Homo sapiens
  chr1:156390085-156390097
  hyper
ctcccgcccgtg

SEQ ID NO: 35300 - DNA, 30 bp, Homo sapiens
  chr1:156611684-156611714
  hyper
ccctactccaagccctcggcttctcatccg

SEQ ID NO: 35301 - DNA, 2 bp, Homo sapiens
  chr1:156626474-156626476
  hyper
gg

SEQ ID NO: 35302 - DNA, 31 bp, Homo sapiens; identical to SEQ ID NO: 576
  chr1:156647116-156647147
  hyper

SEQ ID NO: 35303 - DNA, 31 bp, Homo sapiens; identical to SEQ ID NO: 577
  chr1:156716424-156716455
  hyper

SEQ ID NO: 35304 - DNA, 48 bp, Homo sapiens; identical to SEQ ID NO: 578
  chr1:156716482-156716530
  hyper

SEQ ID NO: 35305 - DNA, 34 bp, Homo sapiens; identical to SEQ ID NO: 579
  chr1:156716556-156716590
  hyper

SEQ ID NO: 35306 - DNA, 31 bp, Homo sapiens; identical to SEQ ID NO: 582
  chr1:159915517-159915548
  hyper

SEQ ID NO: 35307 - DNA, 62 bp, Homo sapiens; identical to SEQ ID NO: 583
  chr1:159915632-159915694
  hyper

SEQ ID NO: 35308 - DNA, 19 bp, Homo sapiens
  chr1:159915791-159915810
  hyper
gcagcgagggttgaaatct

SEQ ID NO: 35309 - DNA, 31 bp, Homo sapiens; identical to SEQ ID NO: 585
  chr1:159915818-159915849
  hyper

SEQ ID NO: 35310 - DNA, 31 bp, Homo sapiens; identical to SEQ ID NO: 586
  chr1:160175619-160175650
  hyper

SEQ ID NO: 35311 - DNA, 100 bp, Homo sapiens; identical to SEQ ID NO: 587
  chr1:161171824-161171924
  hyper

SEQ ID NO: 35312 - DNA, 113 bp, Homo sapiens; identical to SEQ ID NO: 593
  chr1:161410312-161410425
  hyper

SEQ ID NO: 35313 - DNA, 2 bp, Homo sapiens
  chr1:161582233-161582235
  hyper
gc

SEQ ID NO: 35314 - DNA, 26 bp, Homo sapiens
  chr1:161582647-161582673
  hyper
ttacgcctcaacgaaactgcagcaat

SEQ ID NO: 35315 - DNA, 135 bp, Homo sapiens; identical to SEQ ID NO: 603
  chr1:162039283-162039418
  hyper

SEQ ID NO: 35316 - DNA, 117 bp, Homo sapiens; identical to SEQ ID NO: 604
  chr1:162039485-162039602
  hyper

SEQ ID NO: 35317 - DNA, 82 bp, Homo sapiens; identical to SEQ ID NO: 605
  chr1:162039725-162039807
  hyper

SEQ ID NO: 35318 - DNA, 81 bp, Homo sapiens; identical to SEQ ID NO: 606
  chr1:162039811-162039892
  hyper

SEQ ID NO: 35319 - DNA, 55 bp, Homo sapiens; identical to SEQ ID NO: 607
  chr1:162039917-162039972
  hyper

SEQ ID NO: 35320 - DNA, 82 bp, Homo sapiens; identical to SEQ ID NO: 608
  chr1:162039983-162040065
  hyper

SEQ ID NO: 35321 - DNA, 48 bp, Homo sapiens; identical to SEQ ID NO: 609
  chr1:162530851-162530899
  hyper

SEQ ID NO: 35322 - DNA, 42 bp, Homo sapiens; identical to SEQ ID NO: 610
  chr1:166135600-166135642
  hyper

SEQ ID NO: 35323 - DNA, 42 bp, Homo sapiens; identical to SEQ ID NO: 611
  chr1:167028535-167028577
  hyper

SEQ ID NO: 35324 - DNA, 44 bp, Homo sapiens; identical to SEQ ID NO: 612
  chr1:167190357-167190401
  hyper

SEQ ID NO: 35325 - DNA, 47 bp, Homo sapiens; identical to SEQ ID NO: 613
  chr1:167423948-167423995
  hyper

SEQ ID NO: 35326 - DNA, 2 bp, Homo sapiens
  chr1:167599107-167599109
  hyper
ca

SEQ ID NO: 35327 - DNA, 81 bp, Homo sapiens; identical to SEQ ID NO: 619
  chr1:168311896-168311977
  hyper

SEQ ID NO: 35328 - DNA, 67 bp, Homo sapiens; identical to SEQ ID NO: 620
  chr1:168311987-168312054
  hyper

SEQ ID NO: 35329 - DNA, 47 bp, Homo sapiens; identical to SEQ ID NO: 621
  chr1:168312074-168312121
  hyper

SEQ ID NO: 35330 - DNA, 40 bp, Homo sapiens; identical to SEQ ID NO: 622
  chr1:168312139-168312179
  hyper

SEQ ID NO: 35331 - DNA, 48 bp, Homo sapiens; identical to SEQ ID NO: 623
  chr1:169076041-169076089
  hyper

SEQ ID NO: 35332 - DNA, 76 bp, Homo sapiens; identical to SEQ ID NO: 624
  chr1:169076134-169076210
  hyper

SEQ ID NO: 35333 - DNA, 82 bp, Homo sapiens; identical to SEQ ID NO: 625
  chr1:169076243-169076325
  hyper

SEQ ID NO: 35334 - DNA, 31 bp, Homo sapiens; identical to SEQ ID NO: 626
  chr1:169454464-169454495
  hyper

SEQ ID NO: 35335 - DNA, 112 bp, Homo sapiens; identical to SEQ ID NO: 627
  chr1:169454503-169454615
  hyper

SEQ ID NO: 35336 - DNA, 31 bp, Homo sapiens; identical to SEQ ID NO: 628
  chr1:169455341-169455372
  hyper

SEQ ID NO: 35337 - DNA, 39 bp, Homo sapiens; identical to SEQ ID NO: 629
  chr1:171751070-171751109
  hyper

SEQ ID NO: 35338 - DNA, 31 bp, Homo sapiens; identical to SEQ ID NO: 630
  chr1:171751129-171751160
  hyper

SEQ ID NO: 35339 - DNA, 31 bp, Homo sapiens; identical to SEQ ID NO: 631
  chr1:171751207-171751238
  hyper

SEQ ID NO: 35340 - DNA, 52 bp, Homo sapiens; identical to SEQ ID NO: 632
  chr1:171751253-171751305
  hyper

SEQ ID NO: 35341 - DNA, 31 bp, Homo sapiens; identical to SEQ ID NO: 633
  chr1:173991621-173991652
  hyper

SEQ ID NO: 35342 - DNA, 104 bp, Homo sapiens; identical to SEQ ID NO: 634
  chr1:178062639-178062743
  hyper

SEQ ID NO: 35343 - DNA, 346 bp, Homo sapiens; identical to SEQ ID NO: 635
  chr1:178062745-178063091
  hyper

SEQ ID NO: 35344 - DNA, 2 bp, Homo sapiens
  chr1:178063111-178063113
  hyper
cc

SEQ ID NO: 35345 - DNA, 87 bp, Homo sapiens
  chr1:178063150-178063237
  hyper
ggcggcggcgggagccggtcagagggggcggcccctggcggcgacgcccccaagcccagccctgcccggccccgctccatccccagc

SEQ ID NO: 35346 - DNA, 200 bp, Homo sapiens; identical to SEQ ID NO: 637
  chr1:178063273-178063473
  hyper

SEQ ID NO: 35347 - DNA, 59 bp, Homo sapiens
  chr1:178063567-178063626
  hyper
gagccgcgcgccagcccgccccgaagccgccgcctcgtccccctcccgcctcggggcac

SEQ ID NO: 35348 - DNA, 40 bp, Homo sapiens
  chr1:178063733-178063773
  hyper
cggttgtcccagtcagtggagccgtcgccggtggcatgtt

SEQ ID NO: 35349 - DNA, 31 bp, Homo sapiens; identical to SEQ ID NO: 640
  chr1:178694819-178694850
  hyper

SEQ ID NO: 35350 - DNA, 58 bp, Homo sapiens; identical to SEQ ID NO: 641
  chr1:182360259-182360317
  hyper

SEQ ID NO: 35351 - DNA, 43 bp, Homo sapiens; identical to SEQ ID NO: 642
  chr1:182360916-182360959
  hyper

SEQ ID NO: 35352 - DNA, 117 bp, Homo sapiens; identical to SEQ ID NO: 649
  chr1:182992919-182993036
  hyper

SEQ ID NO: 35353 - DNA, 31 bp, Homo sapiens; identical to SEQ ID NO: 650
  chr1:184355380-184355411
  hyper

SEQ ID NO: 35354 - DNA, 174 bp, Homo sapiens; identical to SEQ ID NO: 651
  chr1:184355550-184355724
  hyper

SEQ ID NO: 35355 - DNA, 31 bp, Homo sapiens; identical to SEQ ID NO: 652
  chr1:184355746-184355777
  hyper

SEQ ID NO: 35356 - DNA, 74 bp, Homo sapiens; identical to SEQ ID NO: 653
  chr1:184355814-184355888
  hyper

SEQ ID NO: 35357 - DNA, 71 bp, Homo sapiens; identical to SEQ ID NO: 654
  chr1:184355957-184356028
  hyper

SEQ ID NO: 35358 - DNA, 141 bp, Homo sapiens; identical to SEQ ID NO: 655
  chr1:184356073-184356214
  hyper

SEQ ID NO: 35359 - DNA, 97 bp, Homo sapiens; identical to SEQ ID NO: 656
  chr1:184356590-184356687
  hyper

SEQ ID NO: 35360 - DNA, 236 bp, Homo sapiens; identical to SEQ ID NO: 657
  chr1:200708631-200708867
  hyper

SEQ ID NO: 35361 - DNA, 31 bp, Homo sapiens; identical to SEQ ID NO: 658
  chr1:201050380-201050411
  hyper

SEQ ID NO: 35362 - DNA, 88 bp, Homo sapiens; identical to SEQ ID NO: 659
  chr1:201083265-201083353
  hyper

SEQ ID NO: 35363 - DNA, 59 bp, Homo sapiens; identical to SEQ ID NO: 660
  chr1:201083369-201083428
  hyper

SEQ ID NO: 35364 - DNA, 122 bp, Homo sapiens; identical to SEQ ID NO: 661
  chr1:201083442-201083564
  hyper

SEQ ID NO: 35365 - DNA, 31 bp, Homo sapiens; identical to SEQ ID NO: 662
  chr1:201083641-201083672
  hyper

SEQ ID NO: 35366 - DNA, 31 bp, Homo sapiens; identical to SEQ ID NO: 663
  chr1:201122936-201122967
  hyper

SEQ ID NO: 35367 - DNA, 234 bp, Homo sapiens; identical to SEQ ID NO: 665
  chr1:201437932-201438166
  hyper

SEQ ID NO: 35368 - DNA, 31 bp, Homo sapiens; identical to SEQ ID NO: 666
  chr1:201507612-201507643
  hyper

SEQ ID NO: 35369 - DNA, 123 bp, Homo sapiens; identical to SEQ ID NO: 667
  chr1:201858058-201858181
  hyper

SEQ ID NO: 35370 - DNA, 74 bp, Homo sapiens; identical to SEQ ID NO: 668
  chr1:201858200-201858274
  hyper

SEQ ID NO: 35371 - DNA, 45 bp, Homo sapiens; identical to SEQ ID NO: 671
  chr1:202612530-202612575
  hyper

SEQ ID NO: 35372 - DNA, 31 bp, Homo sapiens; identical to SEQ ID NO: 672
  chr1:202612864-202612895
  hyper

SEQ ID NO: 35373 - DNA, 91 bp, Homo sapiens; identical to SEQ ID NO: 673
  chr1:202612931-202613022
  hyper

SEQ ID NO: 35374 - DNA, 52 bp, Homo sapiens; identical to SEQ ID NO: 674
  chr1:202830112-202830164
  hyper

SEQ ID NO: 35375 - DNA, 31 bp, Homo sapiens; identical to SEQ ID NO: 675
  chr1:202935961-202935992
  hyper

SEQ ID NO: 35376 - DNA, 31 bp, Homo sapiens; identical to SEQ ID NO: 676
  chr1:203143408-203143439
  hyper

SEQ ID NO: 35377 - DNA, 88 bp, Homo sapiens; identical to SEQ ID NO: 677
  chr1:203242475-203242563
  hyper

SEQ ID NO: 35378 - DNA, 31 bp, Homo sapiens; identical to SEQ ID NO: 678
  chr1:203561334-203561365
  hyper

SEQ ID NO: 35379 - DNA, 34 bp, Homo sapiens; identical to SEQ ID NO: 679
  chr1:204042321-204042355
  hyper

SEQ ID NO: 35380 - DNA, 93 bp, Homo sapiens
  chr1:204042532-204042625
  hyper
ggcagagggcagagagcggcctggctcggcggagagggcgccgcccggccggaaccaagctcgccgcccgggacggcgggccccgtggggcgc

SEQ ID NO: 35381 - DNA, 34 bp, Homo sapiens; identical to SEQ ID NO: 681
  chr1:204042806-204042840
  hyper

SEQ ID NO: 35382 - DNA, 39 bp, Homo sapiens; identical to SEQ ID NO: 682
  chr1:204042895-204042934
  hyper

SEQ ID NO: 35383 - DNA, 43 bp, Homo sapiens; identical to SEQ ID NO: 684
  chr1:204043133-204043176
  hyper

SEQ ID NO: 35384 - DNA, 31 bp, Homo sapiens; identical to SEQ ID NO: 685
  chr1:204043325-204043356
  hyper

SEQ ID NO: 35385 - DNA, 88 bp, Homo sapiens; identical to SEQ ID NO: 686
  chr1:204043483-204043571
  hyper

SEQ ID NO: 35386 - DNA, 31 bp, Homo sapiens; identical to SEQ ID NO: 687
  chr1:204043837-204043868
  hyper

SEQ ID NO: 35387 - DNA, 113 bp, Homo sapiens; identical to SEQ ID NO: 688
  chr1:204043907-204044020
  hyper

SEQ ID NO: 35388 - DNA, 66 bp, Homo sapiens; identical to SEQ ID NO: 689
  chr1:204044034-204044100
  hyper

SEQ ID NO: 35389 - DNA, 89 bp, Homo sapiens; identical to SEQ ID NO: 690
  chr1:204347105-204347194
  hyper

SEQ ID NO: 35390 - DNA, 57 bp, Homo sapiens; identical to SEQ ID NO: 691
  chr1:204347196-204347253
  hyper

SEQ ID NO: 35391 - DNA, 54 bp, Homo sapiens; identical to SEQ ID NO: 692
  chr1:204347293-204347347
  hyper

SEQ ID NO: 35392 - DNA, 31 bp, Homo sapiens; identical to SEQ ID NO: 693
  chr1:204347367-204347398
  hyper

SEQ ID NO: 35393 - DNA, 31 bp, Homo sapiens; identical to SEQ ID NO: 694
  chr1:204487762-204487793
  hyper

SEQ ID NO: 35394 - DNA, 48 bp, Homo sapiens; identical to SEQ ID NO: 700
  chr1:205400163-205400211
  hyper

SEQ ID NO: 35395 - DNA, 39 bp, Homo sapiens; identical to SEQ ID NO: 701
  chr1:205426039-205426078
  hyper

SEQ ID NO: 35396 - DNA, 31 bp, Homo sapiens; identical to SEQ ID NO: 702
  chr1:205426080-205426111
  hyper

SEQ ID NO: 35397 - DNA, 31 bp, Homo sapiens; identical to SEQ ID NO: 703
  chr1:205743848-205743879
  hyper

SEQ ID NO: 35398 - DNA, 63 bp, Homo sapiens
  chr1:207628133-207628196
  hyper
gcaggtgctcatcgctctctggccggcggtcagcgctaccgctcgccacgggaaacctaccca

SEQ ID NO: 35399 - DNA, 306 bp, Homo sapiens; identical to SEQ ID NO: 709
  chr1:208416771-208417077
  hyper

SEQ ID NO: 35400 - DNA, 31 bp, Homo sapiens; identical to SEQ ID NO: 710
  chr1:208417126-208417157
  hyper

SEQ ID NO: 35401 - DNA, 42 bp, Homo sapiens; identical to SEQ ID NO: 711
  chr1:208417260-208417302
  hyper

SEQ ID NO: 35402 - DNA, 31 bp, Homo sapiens; identical to SEQ ID NO: 712
  chr1:208418635-208418666
  hyper

SEQ ID NO: 35403 - DNA, 31 bp, Homo sapiens; identical to SEQ ID NO: 713
  chr1:208418805-208418836
  hyper

SEQ ID NO: 35404 - DNA, 37 bp, Homo sapiens; identical to SEQ ID NO: 714
  chr1:210405962-210405999
  hyper

SEQ ID NO: 35405 - DNA, 31 bp, Homo sapiens; identical to SEQ ID NO: 715
  chr1:210407058-210407089
  hyper

SEQ ID NO: 35406 - DNA, 31 bp, Homo sapiens; identical to SEQ ID NO: 716
  chr1:210502487-210502518
  hyper

SEQ ID NO: 35407 - DNA, 341 bp, Homo sapiens; identical to SEQ ID NO: 717
  chr1:212003415-212003756
  hyper

SEQ ID NO: 35408 - DNA, 62 bp, Homo sapiens; identical to SEQ ID NO: 718
  chr1:212003805-212003867
  hyper

SEQ ID NO: 35409 - DNA, 196 bp, Homo sapiens; identical to SEQ ID NO: 719
  chr1:212003876-212004072
  hyper

SEQ ID NO: 35410 - DNA, 42 bp, Homo sapiens; identical to SEQ ID NO: 720
  chr1:212004141-212004183
  hyper

SEQ ID NO: 35411 - DNA, 123 bp, Homo sapiens; identical to SEQ ID NO: 721
  chr1:212873600-212873723
  hyper

SEQ ID NO: 35412 - DNA, 82 bp, Homo sapiens; identical to SEQ ID NO: 722
  chr1:212873750-212873832
  hyper

SEQ ID NO: 35413 - DNA, 45 bp, Homo sapiens; identical to SEQ ID NO: 723
  chr1:212873837-212873882
  hyper

SEQ ID NO: 35414 - DNA, 2 bp, Homo sapiens
  chr1:214387628-214387630
  hyper
tt

SEQ ID NO: 35415 - DNA, 41 bp, Homo sapiens; identical to SEQ ID NO: 728
  chr1:214724404-214724445
  hyper

SEQ ID NO: 35416 - DNA, 2 bp, Homo sapiens
  chr1:214724447-214724449
  hyper
ca

SEQ ID NO: 35417 - DNA, 45 bp, Homo sapiens; identical to SEQ ID NO: 28177
  chr1:214724487-214724532
  hyper

SEQ ID NO: 35418 - DNA, 52 bp, Homo sapiens; identical to SEQ ID NO: 730
  chr1:214725017-214725069
  hyper

SEQ ID NO: 35419 - DNA, 54 bp, Homo sapiens; identical to SEQ ID NO: 731
  chr1:214725080-214725134
  hyper

SEQ ID NO: 35420 - DNA, 149 bp, Homo sapiens; identical to SEQ ID NO: 733
  chr1:215740889-215741038
  hyper

SEQ ID NO: 35421 - DNA, 94 bp, Homo sapiens
  chr1:219347093-219347187
  hyper
aaagctcctcagagagcgggccagcagcgctgcgcatgcgcgctcccgggcgtgctcccgcgcgtgcctgcgtatttgcgtgcgcggccccgcg

SEQ ID NO: 35422 - DNA, 45 bp, Homo sapiens; identical to SEQ ID NO: 740
  chr1:220863575-220863620
  hyper

SEQ ID NO: 35423 - DNA, 2 bp, Homo sapiens
  chr1:220863639-220863641
  hyper
gg

SEQ ID NO: 35424 - DNA, 93 bp, Homo sapiens; identical to SEQ ID NO: 745
  chr1:223307233-223307326
  hyper

SEQ ID NO: 35425 - DNA, 38 bp, Homo sapiens; identical to SEQ ID NO: 746
  chr1:223674887-223674925
  hyper

SEQ ID NO: 35426 - DNA, 46 bp, Homo sapiens; identical to SEQ ID NO: 747
  chr1:223899910-223899956
  hyper

SEQ ID NO: 35427 - DNA, 339 bp, Homo sapiens; identical to SEQ ID NO: 748
  chr1:223899974-223900313
  hyper

SEQ ID NO: 35428 - DNA, 102 bp, Homo sapiens; identical to SEQ ID NO: 749
  chr1:223900421-223900523
  hyper

SEQ ID NO: 35429 - DNA, 63 bp, Homo sapiens; identical to SEQ ID NO: 750
  chr1:223900623-223900686
  hyper

SEQ ID NO: 35430 - DNA, 2 bp, Homo sapiens
  chr1:223936579-223936581
  hyper
tc

SEQ ID NO: 35431 - DNA, 31 bp, Homo sapiens; identical to SEQ ID NO: 754
  chr1:224481115-224481146
  hyper

SEQ ID NO: 35432 - DNA, 35 bp, Homo sapiens; identical to SEQ ID NO: 755
  chr1:224622765-224622800
  hyper

SEQ ID NO: 35433 - DNA, 97 bp, Homo sapiens; identical to SEQ ID NO: 756
  chr1:224691179-224691276
  hyper

SEQ ID NO: 35434 - DNA, 31 bp, Homo sapiens; identical to SEQ ID NO: 757
  chr1:224691399-224691430
  hyper

SEQ ID NO: 35435 - DNA, 31 bp, Homo sapiens; identical to SEQ ID NO: 758
  chr1:225841440-225841471
  hyper

SEQ ID NO: 35436 - DNA, 51 bp, Homo sapiens; identical to SEQ ID NO: 759
  chr1:225998106-225998157
  hyper

SEQ ID NO: 35437 - DNA, 40 bp, Homo sapiens; identical to SEQ ID NO: 760
  chr1:226297511-226297551
  hyper

SEQ ID NO: 35438 - DNA, 33 bp, Homo sapiens
  chr1:226814314-226814347
  hyper
caccttgtaatgcacccgaccgtccagaagggg

SEQ ID NO: 35439 - DNA, 34 bp, Homo sapiens; identical to SEQ ID NO: 768
  chr1:227058122-227058156
  hyper

SEQ ID NO: 35440 - DNA, 9 bp, Homo sapiens
  chr1:227505859-227505868
  hyper
ggtgcttct

SEQ ID NO: 35441 - DNA, 46 bp, Homo sapiens; identical to SEQ ID NO: 771
  chr1:227505884-227505930
  hyper

SEQ ID NO: 35442 - DNA, 38 bp, Homo sapiens; identical to SEQ ID NO: 772
  chr1:227505973-227506011
  hyper

SEQ ID NO: 35443 - DNA, 55 bp, Homo sapiens; identical to SEQ ID NO: 774
  chr1:227506076-227506131
  hyper

SEQ ID NO: 35444 - DNA, 244 bp, Homo sapiens; identical to SEQ ID NO: 775
  chr1:227506132-227506376
  hyper

SEQ ID NO: 35445 - DNA, 31 bp, Homo sapiens; identical to SEQ ID NO: 776
  chr1:228444739-228444770
  hyper

SEQ ID NO: 35446 - DNA, 31 bp, Homo sapiens; identical to SEQ ID NO: 777
  chr1:228870692-228870723
  hyper

SEQ ID NO: 35447 - DNA, 10 bp, Homo sapiens
  chr1:228870899-228870909
  hyper
cagtcgcgcg

SEQ ID NO: 35448 - DNA, 48 bp, Homo sapiens; identical to SEQ ID NO: 779
  chr1:228871131-228871179
  hyper

SEQ ID NO: 35449 - DNA, 52 bp, Homo sapiens; identical to SEQ ID NO: 781
  chr1:232765434-232765486
  hyper

SEQ ID NO: 35450 - DNA, 42 bp, Homo sapiens; identical to SEQ ID NO: 782
  chr1:232765494-232765536
  hyper

SEQ ID NO: 35451 - DNA, 82 bp, Homo sapiens; identical to SEQ ID NO: 783
  chr1:232765595-232765677
  hyper

SEQ ID NO: 35452 - DNA, 96 bp, Homo sapiens; identical to SEQ ID NO: 784
  chr1:232765940-232766036
  hyper

SEQ ID NO: 35453 - DNA, 31 bp, Homo sapiens; identical to SEQ ID NO: 785
  chr1:232766315-232766346
  hyper

SEQ ID NO: 35454 - DNA, 96 bp, Homo sapiens; identical to SEQ ID NO: 788
  chr1:233749825-233749921
  hyper

SEQ ID NO: 35455 - DNA, 48 bp, Homo sapiens
  chr1:233750511-233750559
  hyper
gagaggtgactccagacgtgacttggttgttgccgtccgtaactctgg

SEQ ID NO: 35456 - DNA, 51 bp, Homo sapiens; identical to SEQ ID NO: 792
  chr1:234828256-234828307
  hyper

SEQ ID NO: 35457 - DNA, 36 bp, Homo sapiens; identical to SEQ ID NO: 793
  chr1:235257346-235257382
  hyper

SEQ ID NO: 35458 - DNA, 31 bp, Homo sapiens; identical to SEQ ID NO: 794
  chr1:243418478-243418509
  hyper

SEQ ID NO: 35459 - DNA, 58 bp, Homo sapiens; identical to SEQ ID NO: 795
  chr1:244013023-244013081
  hyper

SEQ ID NO: 35460 - DNA, 195 bp, Homo sapiens; identical to SEQ ID NO: 796
  chr1:246887363-246887558
  hyper

SEQ ID NO: 35461 - DNA, 62 bp, Homo sapiens; identical to SEQ ID NO: 797
  chr2:45821-45883
  hyper

SEQ ID NO: 35462 - DNA, 49 bp, Homo sapiens; identical to SEQ ID NO: 799
  chr2:46558-46607
  hyper

SEQ ID NO: 35463 - DNA, 31 bp, Homo sapiens; identical to SEQ ID NO: 800
  chr2:46629-46660
  hyper

SEQ ID NO: 35464 - DNA, 57 bp, Homo sapiens; identical to SEQ ID NO: 801
  chr2:46739-46796
  hyper

SEQ ID NO: 35465 - DNA, 73 bp, Homo sapiens; identical to SEQ ID NO: 802
  chr2:46810-46883
  hyper

SEQ ID NO: 35466 - DNA, 31 bp, Homo sapiens; identical to SEQ ID NO: 803
  chr2:46981-47012
  hyper

SEQ ID NO: 35467 - DNA, 116 bp, Homo sapiens; identical to SEQ ID NO: 805
  chr2:3465148-3465264
  hyper

SEQ ID NO: 35468 - DNA, 38 bp, Homo sapiens; identical to SEQ ID NO: 806
  chr2:7005629-7005667
  hyper

SEQ ID NO: 35469 - DNA, 182 bp, Homo sapiens; identical to SEQ ID NO: 807
  chr2:7005741-7005923
  hyper

SEQ ID NO: 35470 - DNA, 263 bp, Homo sapiens; identical to SEQ ID NO: 808
  chr2:7005935-7006198
  hyper

SEQ ID NO: 35471 - DNA, 42 bp, Homo sapiens; identical to SEQ ID NO: 809
  chr2:8818538-8818580
  hyper

SEQ ID NO: 35472 - DNA, 442 bp, Homo sapiens; identical to SEQ ID NO: 810
  chr2:8818828-8819270
  hyper

SEQ ID NO: 35473 - DNA, 31 bp, Homo sapiens; identical to SEQ ID NO: 811
  chr2:8821591-8821622
  hyper

SEQ ID NO: 35474 - DNA, 31 bp, Homo sapiens; identical to SEQ ID NO: 812
  chr2:8821625-8821656
  hyper

SEQ ID NO: 35475 - DNA, 277 bp, Homo sapiens; identical to SEQ ID NO: 813
  chr2:8821975-8822252
  hyper

SEQ ID NO: 35476 - DNA, 146 bp, Homo sapiens; identical to SEQ ID NO: 814
  chr2:8822253-8822399
  hyper

SEQ ID NO: 35477 - DNA, 61 bp, Homo sapiens; identical to SEQ ID NO: 815
  chr2:8822479-8822540
  hyper

SEQ ID NO: 35478 - DNA, 31 bp, Homo sapiens; identical to SEQ ID NO: 816
  chr2:8822640-8822671
  hyper

SEQ ID NO: 35479 - DNA, 44 bp, Homo sapiens; identical to SEQ ID NO: 817
  chr2:8825799-8825843
  hyper

SEQ ID NO: 35480 - DNA, 31 bp, Homo sapiens; identical to SEQ ID NO: 818
  chr2:9143657-9143688
  hyper

SEQ ID NO: 35481 - DNA, 45 bp, Homo sapiens; identical to SEQ ID NO: 819
  chr2:9144127-9144172
  hyper

SEQ ID NO: 35482 - DNA, 34 bp, Homo sapiens; identical to SEQ ID NO: 820
  chr2:9346367-9346401
  hyper

SEQ ID NO: 35483 - DNA, 39 bp, Homo sapiens; identical to SEQ ID NO: 821
  chr2:9346514-9346553
  hyper

SEQ ID NO: 35484 - DNA, 111 bp, Homo sapiens; identical to SEQ ID NO: 822
  chr2:9346710-9346821
  hyper

SEQ ID NO: 35485 - DNA, 388 bp, Homo sapiens; identical to SEQ ID NO: 823
  chr2:9346877-9347265
  hyper

SEQ ID NO: 35486 - DNA, 66 bp, Homo sapiens; identical to SEQ ID NO: 824
  chr2:9347472-9347538
  hyper

SEQ ID NO: 35487 - DNA, 2 bp, Homo sapiens
  chr2:9347559-9347561
  hyper
aa

SEQ ID NO: 35488 - DNA, 139 bp, Homo sapiens
  chr2:9347677-9347816
  hyper
cccgccgccgcccgccgccgcccggggtctttggtacccggtgcggaccttatcaacttgttcttgaagtggaccggcgggggcagctccgcgctccgagctccccgccgcagcccccgagcgccgcagggcccccacc

SEQ ID NO: 35489 - DNA, 80 bp, Homo sapiens; identical to SEQ ID NO: 827
  chr2:10092150-10092230
  hyper

SEQ ID NO: 35490 - DNA, 47 bp, Homo sapiens; identical to SEQ ID NO: 828
  chr2:10092315-10092362
  hyper

SEQ ID NO: 35491 - DNA, 40 bp, Homo sapiens; identical to SEQ ID NO: 829
  chr2:10092377-10092417
  hyper

SEQ ID NO: 35492 - DNA, 41 bp, Homo sapiens; identical to SEQ ID NO: 830
  chr2:10092428-10092469
  hyper

SEQ ID NO: 35493 - DNA, 34 bp, Homo sapiens
  chr2:10151689-10151723
  hyper
acgggcgggtcaggtggacagtattggcgtgcgt

SEQ ID NO: 35494 - DNA, 56 bp, Homo sapiens; identical to SEQ ID NO: 833
  chr2:10152417-10152473
  hyper

SEQ ID NO: 35495 - DNA, 80 bp, Homo sapiens; identical to SEQ ID NO: 834
  chr2:10152482-10152562
  hyper

SEQ ID NO: 35496 - DNA, 71 bp, Homo sapiens; identical to SEQ ID NO: 835
  chr2:10183603-10183674
  hyper

SEQ ID NO: 35497 - DNA, 39 bp, Homo sapiens; identical to SEQ ID NO: 836
  chr2:10183763-10183802
  hyper

SEQ ID NO: 35498 - DNA, 43 bp, Homo sapiens; identical to SEQ ID NO: 837
  chr2:10183844-10183887
  hyper

SEQ ID NO: 35499 - DNA, 236 bp, Homo sapiens; identical to SEQ ID NO: 838
  chr2:10183982-10184218
  hyper

SEQ ID NO: 35500 - DNA, 31 bp, Homo sapiens; identical to SEQ ID NO: 839
  chr2:10184236-10184267
  hyper

SEQ ID NO: 35501 - DNA, 37 bp, Homo sapiens; identical to SEQ ID NO: 843
  chr2:10589000-10589037
  hyper

SEQ ID NO: 35502 - DNA, 31 bp, Homo sapiens; identical to SEQ ID NO: 844
  chr2:10589038-10589069
  hyper

SEQ ID NO: 35503 - DNA, 73 bp, Homo sapiens; identical to SEQ ID NO: 845
  chr2:10589095-10589168
  hyper

SEQ ID NO: 35504 - DNA, 2 bp, Homo sapiens
  chr2:10589171-10589173
  hyper
ga

SEQ ID NO: 35505 - DNA, 31 bp, Homo sapiens; identical to SEQ ID NO: 849
  chr2:16079904-16079935
  hyper

SEQ ID NO: 35506 - DNA, 31 bp, Homo sapiens; identical to SEQ ID NO: 850
  chr2:16079966-16079997
  hyper

SEQ ID NO: 35507 - DNA, 38 bp, Homo sapiens; identical to SEQ ID NO: 851
  chr2:16080353-16080391
  hyper

SEQ ID NO: 35508 - DNA, 31 bp, Homo sapiens; identical to SEQ ID NO: 852
  chr2:16080605-16080636
  hyper

SEQ ID NO: 35509 - DNA, 93 bp, Homo sapiens; identical to SEQ ID NO: 853
  chr2:16080681-16080774
  hyper

SEQ ID NO: 35510 - DNA, 98 bp, Homo sapiens; identical to SEQ ID NO: 858
  chr2:20212144-20212242
  hyper

SEQ ID NO: 35511 - DNA, 77 bp, Homo sapiens; identical to SEQ ID NO: 859
  chr2:20212297-20212374
  hyper

SEQ ID NO: 35512 - DNA, 41 bp, Homo sapiens; identical to SEQ ID NO: 860
  chr2:20424155-20424196
  hyper

SEQ ID NO: 35513 - DNA, 255 bp, Homo sapiens; identical to SEQ ID NO: 861
  chr2:20424604-20424859
  hyper

SEQ ID NO: 35514 - DNA, 31 bp, Homo sapiens; identical to SEQ ID NO: 862
  chr2:20424862-20424893
  hyper

SEQ ID NO: 35515 - DNA, 42 bp, Homo sapiens; identical to SEQ ID NO: 863
  chr2:20646412-20646454
  hyper

SEQ ID NO: 35516 - DNA, 71 bp, Homo sapiens; identical to SEQ ID NO: 864
  chr2:20646463-20646534
  hyper

SEQ ID NO: 35517 - DNA, 235 bp, Homo sapiens; identical to SEQ ID NO: 865
  chr2:20646538-20646773
  hyper

SEQ ID NO: 35518 - DNA, 103 bp, Homo sapiens; identical to SEQ ID NO: 867
  chr2:20646863-20646966
  hyper

SEQ ID NO: 35519 - DNA, 35 bp, Homo sapiens; identical to SEQ ID NO: 868
  chr2:20646981-20647016
  hyper

SEQ ID NO: 35520 - DNA, 84 bp, Homo sapiens; identical to SEQ ID NO: 869
  chr2:20647037-20647121
  hyper

SEQ ID NO: 35521 - DNA, 31 bp, Homo sapiens; identical to SEQ ID NO: 870
  chr2:20647341-20647372
  hyper

SEQ ID NO: 35522 - DNA, 60 bp, Homo sapiens; identical to SEQ ID NO: 871
  chr2:20647388-20647448
  hyper

SEQ ID NO: 35523 - DNA, 46 bp, Homo sapiens; identical to SEQ ID NO: 872
  chr2:20647497-20647543
  hyper

SEQ ID NO: 35524 - DNA, 72 bp, Homo sapiens; identical to SEQ ID NO: 873
  chr2:21022608-21022680
  hyper

SEQ ID NO: 35525 - DNA, 26 bp, Homo sapiens
  chr2:21022682-21022708
  hyper
ggcaacaggggctctgcgaggaacca

SEQ ID NO: 35526 - DNA, 80 bp, Homo sapiens; identical to SEQ ID NO: 879
  chr2:25265054-25265134
  hyper

SEQ ID NO: 35527 - DNA, 31 bp, Homo sapiens; identical to SEQ ID NO: 881
  chr2:26749880-26749911
  hyper

SEQ ID NO: 35528 - DNA, 31 bp, Homo sapiens; identical to SEQ ID NO: 882
  chr2:27069031-27069062
  hyper

SEQ ID NO: 35529 - DNA, 31 bp, Homo sapiens; identical to SEQ ID NO: 883
  chr2:27165797-27165828
  hyper

SEQ ID NO: 35530 - DNA, 216 bp, Homo sapiens; identical to SEQ ID NO: 884
  chr2:27308892-27309108
  hyper

SEQ ID NO: 35531 - DNA, 45 bp, Homo sapiens; identical to SEQ ID NO: 886
  chr2:27309206-27309251
  hyper

SEQ ID NO: 35532 - DNA, 57 bp, Homo sapiens; identical to SEQ ID NO: 887
  chr2:27309260-27309317
  hyper

SEQ ID NO: 35533 - DNA, 25 bp, Homo sapiens
  chr2:27473358-27473383
  hyper
ccttggccttcgcctcttaaacgtg

SEQ ID NO: 35534 - DNA, 37 bp, Homo sapiens; identical to SEQ ID NO: 893
  chr2:27712735-27712772
  hyper

SEQ ID NO: 35535 - DNA, 143 bp, Homo sapiens; identical to SEQ ID NO: 894
  chr2:27805948-27806091
  hyper

SEQ ID NO: 35536 - DNA, 31 bp, Homo sapiens; identical to SEQ ID NO: 895
  chr2:27806100-27806131
  hyper

SEQ ID NO: 35537 - DNA, 31 bp, Homo sapiens; identical to SEQ ID NO: 898
  chr2:30369485-30369516
  hyper

SEQ ID NO: 35538 - DNA, 2 bp, Homo sapiens
  chr2:30455402-30455404
  hyper
tg

SEQ ID NO: 35539 - DNA, 69 bp, Homo sapiens
  chr2:31361021-31361090
  hyper
gggcaggagtcctggcgagcgcctcgctctggggagctctagacccaggatccggttggaggggcggca

SEQ ID NO: 35540 - DNA, 48 bp, Homo sapiens
  chr2:31361118-31361166
  hyper
gaagagaagcgagcctgggtggggggtgcagggcgacccgaaacgtgg

SEQ ID NO: 35541 - DNA, 2 bp, Homo sapiens
  chr2:31361295-31361297
  hyper
ga

SEQ ID NO: 35542 - DNA, 2 bp, Homo sapiens
  chr2:31456681-31456683
  hyper
gc

SEQ ID NO: 35543 - DNA, 31 bp, Homo sapiens; identical to SEQ ID NO: 919
  chr2:37980872-37980903
  hyper

SEQ ID NO: 35544 - DNA, 31 bp, Homo sapiens; identical to SEQ ID NO: 920
  chr2:42067664-42067695
  hyper

SEQ ID NO: 35545 - DNA, 218 bp, Homo sapiens
  chr2:42274691-42274909
  hyper
gtcccctccggagcccgctacccgccggcctcgcccctttatctttcccccactccgcccggccggctccgttatccacctcccaatcccgttatccggccgccccggccccgttatccgccctcgcgttgggcgcggagcccccgcgcgcctcctggccgccgccgccccctcccccgctcccagacggagctcgggggaccgcgggctgggcggga

SEQ ID NO: 35546 - DNA, 70 bp, Homo sapiens; identical to SEQ ID NO: 922
  chr2:42274911-42274981
  hyper

SEQ ID NO: 35547 - DNA, 35 bp, Homo sapiens; identical to SEQ ID NO: 923
  chr2:42275167-42275202
  hyper

SEQ ID NO: 35548 - DNA, 58 bp, Homo sapiens; identical to SEQ ID NO: 924
  chr2:42275208-42275266
  hyper

SEQ ID NO: 35549 - DNA, 405 bp, Homo sapiens; identical to SEQ ID NO: 925
  chr2:42275281-42275686
  hyper

SEQ ID NO: 35550 - DNA, 31 bp, Homo sapiens; identical to SEQ ID NO: 926
  chr2:42796455-42796486
  hyper

SEQ ID NO: 35551 - DNA, 31 bp, Homo sapiens; identical to SEQ ID NO: 927
  chr2:43019556-43019587
  hyper

SEQ ID NO: 35552 - DNA, 2 bp, Homo sapiens
  chr2:43019597-43019599
  hyper
tg

SEQ ID NO: 35553 - DNA, 31 bp, Homo sapiens; identical to SEQ ID NO: 933
  chr2:43037886-43037917
  hyper

SEQ ID NO: 35554 - DNA, 2 bp, Homo sapiens
  chr2:43037935-43037937
  hyper
ac

SEQ ID NO: 35555 - DNA, 46 bp, Homo sapiens; identical to SEQ ID NO: 935
  chr2:46524184-46524230
  hyper

SEQ ID NO: 35556 - DNA, 56 bp, Homo sapiens; identical to SEQ ID NO: 936
  chr2:46524317-46524373
  hyper

SEQ ID NO: 35557 - DNA, 122 bp, Homo sapiens; identical to SEQ ID NO: 937
  chr2:46524519-46524641
  hyper

SEQ ID NO: 35558 - DNA, 48 bp, Homo sapiens; identical to SEQ ID NO: 938
  chr2:46524645-46524693
  hyper

SEQ ID NO: 35559 - DNA, 60 bp, Homo sapiens; identical to SEQ ID NO: 939
  chr2:46525000-46525060
  hyper

SEQ ID NO: 35560 - DNA, 97 bp, Homo sapiens; identical to SEQ ID NO: 940
  chr2:46525065-46525162
  hyper

SEQ ID NO: 35561 - DNA, 45 bp, Homo sapiens; identical to SEQ ID NO: 941
  chr2:46525166-46525211
  hyper

SEQ ID NO: 35562 - DNA, 43 bp, Homo sapiens; identical to SEQ ID NO: 942
  chr2:46525215-46525258
  hyper

SEQ ID NO: 35563 - DNA, 111 bp, Homo sapiens; identical to SEQ ID NO: 943
  chr2:46525259-46525370
  hyper

SEQ ID NO: 35564 - DNA, 31 bp, Homo sapiens; identical to SEQ ID NO: 944
  chr2:46525425-46525456
  hyper

SEQ ID NO: 35565 - DNA, 54 bp, Homo sapiens; identical to SEQ ID NO: 945
  chr2:46525462-46525516
  hyper

SEQ ID NO: 35566 - DNA, 88 bp, Homo sapiens; identical to SEQ ID NO: 946
  chr2:46525604-46525692
  hyper

SEQ ID NO: 35567 - DNA, 48 bp, Homo sapiens; identical to SEQ ID NO: 947
  chr2:46526457-46526505
  hyper

SEQ ID NO: 35568 - DNA, 46 bp, Homo sapiens; identical to SEQ ID NO: 948
  chr2:47167941-47167987
  hyper

SEQ ID NO: 35569 - DNA, 15 bp, Homo sapiens
  chr2:47596551-47596566
  hyper
tgcccggccggctcc

SEQ ID NO: 35570 - DNA, 31 bp, Homo sapiens; identical to SEQ ID NO: 954
  chr2:48009755-48009786
  hyper

SEQ ID NO: 35571 - DNA, 31 bp, Homo sapiens; identical to SEQ ID NO: 955
  chr2:48339288-48339319
  hyper

SEQ ID NO: 35572 - DNA, 42 bp, Homo sapiens; identical to SEQ ID NO: 956
  chr2:54682462-54682504
  hyper

SEQ ID NO: 35573 - DNA, 59 bp, Homo sapiens; identical to SEQ ID NO: 957
  chr2:54683031-54683090
  hyper

SEQ ID NO: 35574 - DNA, 56 bp, Homo sapiens; identical to SEQ ID NO: 958
  chr2:54683116-54683172
  hyper

SEQ ID NO: 35575 - DNA, 31 bp, Homo sapiens; identical to SEQ ID NO: 960
  chr2:58777010-58777041
  hyper

SEQ ID NO: 35576 - DNA, 31 bp, Homo sapiens; identical to SEQ ID NO: 961
  chr2:60783806-60783837
  hyper

SEQ ID NO: 35577 - DNA, 37 bp, Homo sapiens; identical to SEQ ID NO: 962
  chr2:60783864-60783901
  hyper

SEQ ID NO: 35578 - DNA, 52 bp, Homo sapiens; identical to SEQ ID NO: 963
  chr2:61990959-61991011
  hyper

SEQ ID NO: 35579 - DNA, 53 bp, Homo sapiens; identical to SEQ ID NO: 964
  chr2:61991090-61991143
  hyper

SEQ ID NO: 35580 - DNA, 83 bp, Homo sapiens; identical to SEQ ID NO: 965
  chr2:61991157-61991240
  hyper

SEQ ID NO: 35581 - DNA, 31 bp, Homo sapiens; identical to SEQ ID NO: 966
  chr2:61991256-61991287
  hyper

SEQ ID NO: 35582 - DNA, 69 bp, Homo sapiens; identical to SEQ ID NO: 967
  chr2:61991312-61991381
  hyper

SEQ ID NO: 35583 - DNA, 233 bp, Homo sapiens; identical to SEQ ID NO: 968
  chr2:61991553-61991786
  hyper

SEQ ID NO: 35584 - DNA, 228 bp, Homo sapiens; identical to SEQ ID NO: 969
  chr2:62732952-62733180
  hyper

SEQ ID NO: 35585 - DNA, 37 bp, Homo sapiens; identical to SEQ ID NO: 970
  chr2:62733230-62733267
  hyper

SEQ ID NO: 35586 - DNA, 257 bp, Homo sapiens; identical to SEQ ID NO: 971
  chr2:62733282-62733539
  hyper

SEQ ID NO: 35587 - DNA, 31 bp, Homo sapiens; identical to SEQ ID NO: 972
  chr2:62733559-62733590
  hyper

SEQ ID NO: 35588 - DNA, 31 bp, Homo sapiens; identical to SEQ ID NO: 974
  chr2:66661598-66661629
  hyper

SEQ ID NO: 35589 - DNA, 37 bp, Homo sapiens; identical to SEQ ID NO: 975
  chr2:66661767-66661804
  hyper

SEQ ID NO: 35590 - DNA, 77 bp, Homo sapiens; identical to SEQ ID NO: 976
  chr2:66661824-66661901
  hyper

SEQ ID NO: 35591 - DNA, 31 bp, Homo sapiens; identical to SEQ ID NO: 977
  chr2:69614637-69614668
  hyper

SEQ ID NO: 35592 - DNA, 70 bp, Homo sapiens; identical to SEQ ID NO: 978
  chr2:69968733-69968803
  hyper

SEQ ID NO: 35593 - DNA, 21 bp, Homo sapiens
  chr2:70313328-70313349
  hyper
tgcattctagagctttcgggc

SEQ ID NO: 35594 - DNA, 42 bp, Homo sapiens
  chr2:70313475-70313517
  hyper
ctgagagattgtgaagcacgttgcgcacggggccctttctgg

SEQ ID NO: 35595 - DNA, 64 bp, Homo sapiens; identical to SEQ ID NO: 980
  chr2:70313557-70313621
  hyper

SEQ ID NO: 35596 - DNA, 31 bp, Homo sapiens; identical to SEQ ID NO: 981
  chr2:70351210-70351241
  hyper

SEQ ID NO: 35597 - DNA, 91 bp, Homo sapiens; identical to SEQ ID NO: 982
  chr2:70351300-70351391
  hyper

SEQ ID NO: 35598 - DNA, 53 bp, Homo sapiens; identical to SEQ ID NO: 983
  chr2:70351408-70351461
  hyper

SEQ ID NO: 35599 - DNA, 31 bp, Homo sapiens; identical to SEQ ID NO: 984
  chr2:70369300-70369331
  hyper

SEQ ID NO: 35600 - DNA, 31 bp, Homo sapiens; identical to SEQ ID NO: 985
  chr2:70418190-70418221
  hyper

SEQ ID NO: 35601 - DNA, 73 bp, Homo sapiens; identical to SEQ ID NO: 986
  chr2:70485549-70485622
  hyper

SEQ ID NO: 35602 - DNA, 34 bp, Homo sapiens; identical to SEQ ID NO: 987
  chr2:72375617-72375651
  hyper

SEQ ID NO: 35603 - DNA, 50 bp, Homo sapiens; identical to SEQ ID NO: 988
  chr2:72375662-72375712
  hyper

SEQ ID NO: 35604 - DNA, 2 bp, Homo sapiens
  chr2:72376557-72376559
  hyper
ca

SEQ ID NO: 35605 - DNA, 81 bp, Homo sapiens
  chr2:72376588-72376669
  hyper
actggcaggcgcccaaagccctcgaaactgtgccttagggtcccgagcttccaacccccgggatcccgctggctcttatct

SEQ ID NO: 35606 - DNA, 138 bp, Homo sapiens; identical to SEQ ID NO: 990
  chr2:73052643-73052781
  hyper

SEQ ID NO: 35607 - DNA, 443 bp, Homo sapiens; identical to SEQ ID NO: 991
  chr2:73052797-73053240
  hyper

SEQ ID NO: 35608 - DNA, 31 bp, Homo sapiens; identical to SEQ ID NO: 992
  chr2:73053272-73053303
  hyper

SEQ ID NO: 35609 - DNA, 39 bp, Homo sapiens; identical to SEQ ID NO: 993
  chr2:73053314-73053353
  hyper

SEQ ID NO: 35610 - DNA, 31 bp, Homo sapiens; identical to SEQ ID NO: 994
  chr2:73114324-73114355
  hyper

SEQ ID NO: 35611 - DNA, 97 bp, Homo sapiens; identical to SEQ ID NO: 995
  chr2:73114405-73114502
  hyper

SEQ ID NO: 35612 - DNA, 38 bp, Homo sapiens; identical to SEQ ID NO: 996
  chr2:73114709-73114747
  hyper

SEQ ID NO: 35613 - DNA, 41 bp, Homo sapiens; identical to SEQ ID NO: 997
  chr2:73511942-73511983
  hyper

SEQ ID NO: 35614 - DNA, 65 bp, Homo sapiens
  chr2:73512162-73512227
  hyper
gctcttaaagagccgcctaggaacacgtgtacccatcacaaatcccatcccggacctagaggagg

SEQ ID NO: 35615 - DNA, 37 bp, Homo sapiens; identical to SEQ ID NO: 1003
  chr2:74776039-74776076
  hyper

SEQ ID NO: 35616 - DNA, 31 bp, Homo sapiens; identical to SEQ ID NO: 1004
  chr2:74776507-74776538
  hyper

SEQ ID NO: 35617 - DNA, 59 bp, Homo sapiens; identical to SEQ ID NO: 1005
  chr2:74780964-74781023
  hyper

SEQ ID NO: 35618 - DNA, 26 bp, Homo sapiens
  chr2:74781910-74781936
  hyper
ttttttgcagagtcagcgctttggga

SEQ ID NO: 35619 - DNA, 84 bp, Homo sapiens; identical to SEQ ID NO: 1010
  chr2:85829250-85829334
  hyper

SEQ ID NO: 35620 - DNA, 31 bp, Homo sapiens; identical to SEQ ID NO: 1011
  chr2:85829368-85829399
  hyper

SEQ ID NO: 35621 - DNA, 89 bp, Homo sapiens; identical to SEQ ID NO: 1012
  chr2:85842677-85842766
  hyper

SEQ ID NO: 35622 - DNA, 31 bp, Homo sapiens; identical to SEQ ID NO: 1013
  chr2:86850367-86850398
  hyper

SEQ ID NO: 35623 - DNA, 31 bp, Homo sapiens; identical to SEQ ID NO: 1014
  chr2:95825322-95825353
  hyper

SEQ ID NO: 35624 - DNA, 42 bp, Homo sapiens; identical to SEQ ID NO: 1015
  chr2:95825489-95825531
  hyper

SEQ ID NO: 35625 - DNA, 44 bp, Homo sapiens; identical to SEQ ID NO: 1016
  chr2:95825584-95825628
  hyper

SEQ ID NO: 35626 - DNA, 12 bp, Homo sapiens
  chr2:96987312-96987324
  hyper
aagtgcgtctcc

SEQ ID NO: 35627 - DNA, 56 bp, Homo sapiens; identical to SEQ ID NO: 1018
  chr2:97171201-97171257
  hyper

SEQ ID NO: 35628 - DNA, 31 bp, Homo sapiens; identical to SEQ ID NO: 1019
  chr2:97171276-97171307
  hyper

SEQ ID NO: 35629 - DNA, 46 bp, Homo sapiens; identical to SEQ ID NO: 1020
  chr2:97171366-97171412
  hyper

SEQ ID NO: 35630 - DNA, 37 bp, Homo sapiens; identical to SEQ ID NO: 1021
  chr2:97175301-97175338
  hyper

SEQ ID NO: 35631 - DNA, 2 bp, Homo sapiens
  chr2:97193014-97193016
  hyper
ag

SEQ ID NO: 35632 - DNA, 31 bp, Homo sapiens; identical to SEQ ID NO: 1028
  chr2:97304170-97304201
  hyper

SEQ ID NO: 35633 - DNA, 31 bp, Homo sapiens; identical to SEQ ID NO: 1029
  chr2:97405566-97405597
  hyper

SEQ ID NO: 35634 - DNA, 174 bp, Homo sapiens; identical to SEQ ID NO: 1030
  chr2:97482862-97483036
  hyper

SEQ ID NO: 35635 - DNA, 45 bp, Homo sapiens; identical to SEQ ID NO: 1031
  chr2:97483116-97483161
  hyper

SEQ ID NO: 35636 - DNA, 157 bp, Homo sapiens; identical to SEQ ID NO: 1032
  chr2:97535759-97535916
  hyper

SEQ ID NO: 35637 - DNA, 39 bp, Homo sapiens; identical to SEQ ID NO: 1034
  chr2:98964752-98964791
  hyper

SEQ ID NO: 35638 - DNA, 31 bp, Homo sapiens; identical to SEQ ID NO: 1035
  chr2:101033529-101033560
  hyper

SEQ ID NO: 35639 - DNA, 21 bp, Homo sapiens
  chr2:101033571-101033592
  hyper
aagtaaattgtaggctcgcac

SEQ ID NO: 35640 - DNA, 2 bp, Homo sapiens
  chr2:101435683-101435685
  hyper
aa

SEQ ID NO: 35641 - DNA, 93 bp, Homo sapiens; identical to SEQ ID NO: 1043
  chr2:101767138-101767231
  hyper

SEQ ID NO: 35642 - DNA, 64 bp, Homo sapiens; identical to SEQ ID NO: 1044
  chr2:101767298-101767362
  hyper

SEQ ID NO: 35643 - DNA, 274 bp, Homo sapiens; identical to SEQ ID NO: 1045
  chr2:101767367-101767641
  hyper

SEQ ID NO: 35644 - DNA, 182 bp, Homo sapiens; identical to SEQ ID NO: 1046
  chr2:101767661-101767843
  hyper

SEQ ID NO: 35645 - DNA, 158 bp, Homo sapiens; identical to SEQ ID NO: 1047
  chr2:101924526-101924684
  hyper

SEQ ID NO: 35646 - DNA, 383 bp, Homo sapiens; identical to SEQ ID NO: 1048
  chr2:101924690-101925073
  hyper

SEQ ID NO: 35647 - DNA, 31 bp, Homo sapiens; identical to SEQ ID NO: 1049
  chr2:101925074-101925105
  hyper

SEQ ID NO: 35648 - DNA, 300 bp, Homo sapiens; identical to SEQ ID NO: 1050
  chr2:101925108-101925408
  hyper

SEQ ID NO: 35649 - DNA, 47 bp, Homo sapiens; identical to SEQ ID NO: 1051
  chr2:102313749-102313796
  hyper

SEQ ID NO: 35650 - DNA, 174 bp, Homo sapiens; identical to SEQ ID NO: 1052
  chr2:102313837-102314011
  hyper

SEQ ID NO: 35651 - DNA, 44 bp, Homo sapiens; identical to SEQ ID NO: 1053
  chr2:102314200-102314244
  hyper

SEQ ID NO: 35652 - DNA, 31 bp, Homo sapiens; identical to SEQ ID NO: 1054
  chr2:103235664-103235695
  hyper

SEQ ID NO: 35653 - DNA, 22 bp, Homo sapiens
  chr2:103236292-103236314
  hyper
caaccggcggcacccatggaac

SEQ ID NO: 35654 - DNA, 47 bp, Homo sapiens; identical to SEQ ID NO: 1058
  chr2:103236321-103236368
  hyper

SEQ ID NO: 35655 - DNA, 37 bp, Homo sapiens; identical to SEQ ID NO: 1059
  chr2:103236615-103236652
  hyper

SEQ ID NO: 35656 - DNA, 13 bp, Homo sapiens
  chr2:110371219-110371232
  hyper
gccgccgcggaag

SEQ ID NO: 35657 - DNA, 104 bp, Homo sapiens; identical to SEQ ID NO: 1061
  chr2:110371251-110371355
  hyper

SEQ ID NO: 35658 - DNA, 180 bp, Homo sapiens; identical to SEQ ID NO: 1062
  chr2:110371427-110371607
  hyper

SEQ ID NO: 35659 - DNA, 87 bp, Homo sapiens; identical to SEQ ID NO: 1063
  chr2:110371615-110371702
  hyper

SEQ ID NO: 35660 - DNA, 99 bp, Homo sapiens
  chr2:110371818-110371917
  hyper
tggccgagacagcggggagcggaagtgggcgtggcctggtggcgtgggcgcggggcgggggtgcggggggcgtgtccgcccgggcgcggcccagtgagg

SEQ ID NO: 35661 - DNA, 31 bp, Homo sapiens; identical to SEQ ID NO: 1065
  chr2:111880645-111880676
  hyper

SEQ ID NO: 35662 - DNA, 54 bp, Homo sapiens; identical to SEQ ID NO: 1066
  chr2:111880677-111880731
  hyper

SEQ ID NO: 35663 - DNA, 31 bp, Homo sapiens; identical to SEQ ID NO: 1067
  chr2:112655268-112655299
  hyper

SEQ ID NO: 35664 - DNA, 93 bp, Homo sapiens; identical to SEQ ID NO: 1069
  chr2:120301686-120301779
  hyper

SEQ ID NO: 35665 - DNA, 53 bp, Homo sapiens; identical to SEQ ID NO: 1070
  chr2:120301887-120301940
  hyper

SEQ ID NO: 35666 - DNA, 72 bp, Homo sapiens; identical to SEQ ID NO: 1071
  chr2:120302113-120302185
  hyper

SEQ ID NO: 35667 - DNA, 129 bp, Homo sapiens; identical to SEQ ID NO: 1072
  chr2:120770808-120770937
  hyper

SEQ ID NO: 35668 - DNA, 92 bp, Homo sapiens; identical to SEQ ID NO: 1073
  chr2:120771018-120771110
  hyper

SEQ ID NO: 35669 - DNA, 31 bp, Homo sapiens; identical to SEQ ID NO: 1074
  chr2:121438058-121438089
  hyper

SEQ ID NO: 35670 - DNA, 36 bp, Homo sapiens; identical to SEQ ID NO: 1075
  chr2:127413346-127413382
  hyper

SEQ ID NO: 35671 - DNA, 31 bp, Homo sapiens; identical to SEQ ID NO: 1076
  chr2:127413403-127413434
  hyper

SEQ ID NO: 35672 - DNA, 31 bp, Homo sapiens; identical to SEQ ID NO: 1077
  chr2:127413488-127413519
  hyper

SEQ ID NO: 35673 - DNA, 31 bp, Homo sapiens; identical to SEQ ID NO: 1078
  chr2:127414331-127414362
  hyper

SEQ ID NO: 35674 - DNA, 20 bp, Homo sapiens
  chr2:127535179-127535199
  hyper
aagggcgtcccaagaaagga

SEQ ID NO: 35675 - DNA, 82 bp, Homo sapiens; identical to SEQ ID NO: 1083
  chr2:127864221-127864303
  hyper

SEQ ID NO: 35676 - DNA, 59 bp, Homo sapiens; identical to SEQ ID NO: 1084
  chr2:127865203-127865262
  hyper

SEQ ID NO: 35677 - DNA, 31 bp, Homo sapiens; identical to SEQ ID NO: 1085
  chr2:128165991-128166022
  hyper

SEQ ID NO: 35678 - DNA, 31 bp, Homo sapiens; identical to SEQ ID NO: 1086
  chr2:129063668-129063699
  hyper

SEQ ID NO: 35679 - DNA, 182 bp, Homo sapiens; identical to SEQ ID NO: 1089
  chr2:133173852-133174034
  hyper

SEQ ID NO: 35680 - DNA, 85 bp, Homo sapiens; identical to SEQ ID NO: 1090
  chr2:133174237-133174322
  hyper

SEQ ID NO: 35681 - DNA, 58 bp, Homo sapiens; identical to SEQ ID NO: 1091
  chr2:133174324-133174382
  hyper

SEQ ID NO: 35682 - DNA, 34 bp, Homo sapiens; identical to SEQ ID NO: 1092
  chr2:136288365-136288399
  hyper

SEQ ID NO: 35683 - DNA, 43 bp, Homo sapiens; identical to SEQ ID NO: 1093
  chr2:136288411-136288454
  hyper

SEQ ID NO: 35684 - DNA, 43 bp, Homo sapiens; identical to SEQ ID NO: 1094
  chr2:136874156-136874199
  hyper

SEQ ID NO: 35685 - DNA, 63 bp, Homo sapiens
  chr2:136874870-136874933
  hyper
actgcaggacccactcgcggccgtggggaagaggcgcgcttcggacggcgggaaggttttccc

SEQ ID NO: 35686 - DNA, 52 bp, Homo sapiens; identical to SEQ ID NO: 1098
  chr2:136875472-136875524
  hyper

SEQ ID NO: 35687 - DNA, 159 bp, Homo sapiens; identical to SEQ ID NO: 1099
  chr2:136875620-136875779
  hyper

SEQ ID NO: 35688 - DNA, 2 bp, Homo sapiens
  chr2:136875880-136875882
  hyper
gg

SEQ ID NO: 35689 - DNA, 34 bp, Homo sapiens; identical to SEQ ID NO: 1107
  chr2:145090079-145090113
  hyper

SEQ ID NO: 35690 - DNA, 1 bp, Homo sapiens
  chr2:145273327-145273328
  hyper
a

SEQ ID NO: 35691 - DNA, 317 bp, Homo sapiens; identical to SEQ ID NO: 1129
  chr2:148601815-148602132
  hyper

SEQ ID NO: 35692 - DNA, 277 bp, Homo sapiens; identical to SEQ ID NO: 1130
  chr2:148602136-148602413
  hyper

SEQ ID NO: 35693 - DNA, 38 bp, Homo sapiens; identical to SEQ ID NO: 1131
  chr2:148602727-148602765
  hyper

SEQ ID NO: 35694 - DNA, 36 bp, Homo sapiens; identical to SEQ ID NO: 1132
  chr2:148602775-148602811
  hyper

SEQ ID NO: 35695 - DNA, 54 bp, Homo sapiens; identical to SEQ ID NO: 1133
  chr2:148602889-148602943
  hyper

SEQ ID NO: 35696 - DNA, 39 bp, Homo sapiens; identical to SEQ ID NO: 1134
  chr2:150186116-150186155
  hyper

SEQ ID NO: 35697 - DNA, 64 bp, Homo sapiens; identical to SEQ ID NO: 1135
  chr2:151342427-151342491
  hyper

SEQ ID NO: 35698 - DNA, 35 bp, Homo sapiens; identical to SEQ ID NO: 1136
  chr2:151342512-151342547
  hyper

SEQ ID NO: 35699 - DNA, 146 bp, Homo sapiens; identical to SEQ ID NO: 1137
  chr2:151342556-151342702
  hyper

SEQ ID NO: 35700 - DNA, 59 bp, Homo sapiens; identical to SEQ ID NO: 1138
  chr2:151342747-151342806
  hyper

SEQ ID NO: 35701 - DNA, 54 bp, Homo sapiens; identical to SEQ ID NO: 1139
  chr2:151343469-151343523
  hyper

SEQ ID NO: 35702 - DNA, 31 bp, Homo sapiens; identical to SEQ ID NO: 1140
  chr2:151343526-151343557
  hyper

SEQ ID NO: 35703 - DNA, 77 bp, Homo sapiens; identical to SEQ ID NO: 1141
  chr2:151343682-151343759
  hyper

SEQ ID NO: 35704 - DNA, 91 bp, Homo sapiens; identical to SEQ ID NO: 1142
  chr2:151344275-151344366
  hyper

SEQ ID NO: 35705 - DNA, 24 bp, Homo sapiens
  chr2:152118718-152118742
  hyper
caatcatctcgtagttgcagagag

SEQ ID NO: 35706 - DNA, 31 bp, Homo sapiens; identical to SEQ ID NO: 1144
  chr2:153192136-153192167
  hyper

SEQ ID NO: 35707 - DNA, 31 bp, Homo sapiens; identical to SEQ ID NO: 1145
  chr2:153192302-153192333
  hyper

SEQ ID NO: 35708 - DNA, 31 bp, Homo sapiens; identical to SEQ ID NO: 1146
  chr2:153192342-153192373
  hyper

SEQ ID NO: 35709 - DNA, 31 bp, Homo sapiens; identical to SEQ ID NO: 1147
  chr2:157188948-157188979
  hyper

SEQ ID NO: 35710 - DNA, 56 bp, Homo sapiens; identical to SEQ ID NO: 1148
  chr2:157189364-157189420
  hyper

SEQ ID NO: 35711 - DNA, 96 bp, Homo sapiens; identical to SEQ ID NO: 1149
  chr2:157189481-157189577
  hyper

SEQ ID NO: 35712 - DNA, 108 bp, Homo sapiens; identical to SEQ ID NO: 1150
  chr2:157292330-157292438
  hyper

SEQ ID NO: 35713 - DNA, 177 bp, Homo sapiens; identical to SEQ ID NO: 1151
  chr2:157292445-157292622
  hyper

SEQ ID NO: 35714 - DNA, 31 bp, Homo sapiens; identical to SEQ ID NO: 1152
  chr2:158484973-158485004
  hyper

SEQ ID NO: 35715 - DNA, 31 bp, Homo sapiens; identical to SEQ ID NO: 1153
  chr2:158485185-158485216
  hyper

SEQ ID NO: 35716 - DNA, 75 bp, Homo sapiens; identical to SEQ ID NO: 1154
  chr2:158485223-158485298
  hyper

SEQ ID NO: 35717 - DNA, 31 bp, Homo sapiens; identical to SEQ ID NO: 1155
  chr2:158485822-158485853
  hyper

SEQ ID NO: 35718 - DNA, 31 bp, Homo sapiens; identical to SEQ ID NO: 1156
  chr2:158485859-158485890
  hyper

SEQ ID NO: 35719 - DNA, 31 bp, Homo sapiens; identical to SEQ ID NO: 1157
  chr2:159313053-159313084
  hyper

SEQ ID NO: 35720 - DNA, 199 bp, Homo sapiens; identical to SEQ ID NO: 1158
  chr2:159313328-159313527
  hyper

SEQ ID NO: 35721 - DNA, 147 bp, Homo sapiens; identical to SEQ ID NO: 1159
  chr2:159313580-159313727
  hyper

SEQ ID NO: 35722 - DNA, 163 bp, Homo sapiens; identical to SEQ ID NO: 1160
  chr2:159313730-159313893
  hyper

SEQ ID NO: 35723 - DNA, 103 bp, Homo sapiens; identical to SEQ ID NO: 1161
  chr2:159314097-159314200
  hyper

SEQ ID NO: 35724 - DNA, 248 bp, Homo sapiens; identical to SEQ ID NO: 1162
  chr2:159314217-159314465
  hyper

SEQ ID NO: 35725 - DNA, 66 bp, Homo sapiens; identical to SEQ ID NO: 1163
  chr2:159314657-159314723
  hyper

SEQ ID NO: 35726 - DNA, 71 bp, Homo sapiens; identical to SEQ ID NO: 1164
  chr2:159314726-159314797
  hyper

SEQ ID NO: 35727 - DNA, 113 bp, Homo sapiens; identical to SEQ ID NO: 1165
  chr2:159825049-159825162
  hyper

SEQ ID NO: 35728 - DNA, 149 bp, Homo sapiens; identical to SEQ ID NO: 1166
  chr2:159825248-159825397
  hyper

SEQ ID NO: 35729 - DNA, 242 bp, Homo sapiens; identical to SEQ ID NO: 1167
  chr2:159825399-159825641
  hyper

SEQ ID NO: 35730 - DNA, 64 bp, Homo sapiens; identical to SEQ ID NO: 1168
  chr2:159826350-159826414
  hyper

SEQ ID NO: 35731 - DNA, 31 bp, Homo sapiens; identical to SEQ ID NO: 1169
  chr2:160142448-160142479
  hyper

SEQ ID NO: 35732 - DNA, 31 bp, Homo sapiens; identical to SEQ ID NO: 1170
  chr2:160142591-160142622
  hyper

SEQ ID NO: 35733 - DNA, 45 bp, Homo sapiens; identical to SEQ ID NO: 1171
  chr2:160142703-160142748
  hyper

SEQ ID NO: 35734 - DNA, 31 bp, Homo sapiens; identical to SEQ ID NO: 1172
  chr2:160142757-160142788
  hyper

SEQ ID NO: 35735 - DNA, 31 bp, Homo sapiens; identical to SEQ ID NO: 1173
  chr2:160142924-160142955
  hyper

SEQ ID NO: 35736 - DNA, 58 bp, Homo sapiens; identical to SEQ ID NO: 1174
  chr2:160472575-160472633
  hyper

SEQ ID NO: 35737 - DNA, 31 bp, Homo sapiens; identical to SEQ ID NO: 1175
  chr2:160654434-160654465
  hyper

SEQ ID NO: 35738 - DNA, 43 bp, Homo sapiens; identical to SEQ ID NO: 1181
  chr2:161349351-161349394
  hyper

SEQ ID NO: 35739 - DNA, 8 bp, Homo sapiens
  chr2:161560564-161560572
  hyper
aggaaatg

SEQ ID NO: 35740 - DNA, 23 bp, Homo sapiens
  chr2:161560616-161560639
  hyper
tgtggcctcgttgaaaggctttc

SEQ ID NO: 35741 - DNA, 31 bp, Homo sapiens; identical to SEQ ID NO: 1183
  chr2:161560642-161560673
  hyper

SEQ ID NO: 35742 - DNA, 31 bp, Homo sapiens; identical to SEQ ID NO: 1184
  chr2:161560675-161560706
  hyper

SEQ ID NO: 35743 - DNA, 64 bp, Homo sapiens; identical to SEQ ID NO: 1185
  chr2:165477629-165477693
  hyper

SEQ ID NO: 35744 - DNA, 53 bp, Homo sapiens; identical to SEQ ID NO: 1186
  chr2:165697708-165697761
  hyper

SEQ ID NO: 35745 - DNA, 36 bp, Homo sapiens; identical to SEQ ID NO: 1187
  chr2:165697973-165698009
  hyper

SEQ ID NO: 35746 - DNA, 37 bp, Homo sapiens; identical to SEQ ID NO: 1188
  chr2:165698273-165698310
  hyper

SEQ ID NO: 35747 - DNA, 129 bp, Homo sapiens; identical to SEQ ID NO: 1189
  chr2:165698490-165698619
  hyper

SEQ ID NO: 35748 - DNA, 46 bp, Homo sapiens; identical to SEQ ID NO: 1190
  chr2:165698623-165698669
  hyper

SEQ ID NO: 35749 - DNA, 31 bp, Homo sapiens; identical to SEQ ID NO: 1191
  chr2:165873601-165873632
  hyper

SEQ ID NO: 35750 - DNA, 31 bp, Homo sapiens; identical to SEQ ID NO: 1192
  chr2:169312447-169312478
  hyper

SEQ ID NO: 35751 - DNA, 109 bp, Homo sapiens; identical to SEQ ID NO: 1193
  chr2:169312527-169312636
  hyper

SEQ ID NO: 35752 - DNA, 26 bp, Homo sapiens
  chr2:169312793-169312819
  hyper
gagccttcgagagcagcggccgcgga

SEQ ID NO: 35753 - DNA, 66 bp, Homo sapiens
  chr2:169312881-169312947
  hyper
gcgcatccccgggcgccctgcgcggtggagagcttggcgggctgcgggtgccgcaggacaggagtg

SEQ ID NO: 35754 - DNA, 31 bp, Homo sapiens; identical to SEQ ID NO: 1195
  chr2:169313095-169313126
  hyper

SEQ ID NO: 35755 - DNA, 59 bp, Homo sapiens; identical to SEQ ID NO: 1196
  chr2:169313239-169313298
  hyper

SEQ ID NO: 35756 - DNA, 77 bp, Homo sapiens; identical to SEQ ID NO: 1197
  chr2:169313306-169313383
  hyper

SEQ ID NO: 35757 - DNA, 44 bp, Homo sapiens; identical to SEQ ID NO: 1198
  chr2:169313388-169313432
  hyper

SEQ ID NO: 35758 - DNA, 49 bp, Homo sapiens; identical to SEQ ID NO: 1199
  chr2:169313660-169313709
  hyper

SEQ ID NO: 35759 - DNA, 31 bp, Homo sapiens; identical to SEQ ID NO: 1200
  chr2:169313768-169313799
  hyper

SEQ ID NO: 35760 - DNA, 49 bp, Homo sapiens; identical to SEQ ID NO: 1201
  chr2:171627263-171627312
  hyper

SEQ ID NO: 35761 - DNA, 34 bp, Homo sapiens; identical to SEQ ID NO: 1202
  chr2:171627346-171627380
  hyper

SEQ ID NO: 35762 - DNA, 208 bp, Homo sapiens; identical to SEQ ID NO: 1203
  chr2:171627473-171627681
  hyper

SEQ ID NO: 35763 - DNA, 73 bp, Homo sapiens; identical to SEQ ID NO: 1204
  chr2:171627823-171627896
  hyper

SEQ ID NO: 35764 - DNA, 48 bp, Homo sapiens; identical to SEQ ID NO: 1205
  chr2:171627930-171627978
  hyper

SEQ ID NO: 35765 - DNA, 31 bp, Homo sapiens; identical to SEQ ID NO: 1206
  chr2:171673093-171673124
  hyper

SEQ ID NO: 35766 - DNA, 42 bp, Homo sapiens; identical to SEQ ID NO: 1207
  chr2:171673129-171673171
  hyper

SEQ ID NO: 35767 - DNA, 62 bp, Homo sapiens; identical to SEQ ID NO: 1208
  chr2:171673178-171673240
  hyper

SEQ ID NO: 35768 - DNA, 51 bp, Homo sapiens; identical to SEQ ID NO: 1209
  chr2:171673659-171673710
  hyper

SEQ ID NO: 35769 - DNA, 76 bp, Homo sapiens; identical to SEQ ID NO: 1210
  chr2:172289936-172290012
  hyper

SEQ ID NO: 35770 - DNA, 128 bp, Homo sapiens; identical to SEQ ID NO: 1211
  chr2:173037342-173037470
  hyper

SEQ ID NO: 35771 - DNA, 80 bp, Homo sapiens; identical to SEQ ID NO: 1212
  chr2:173037601-173037681
  hyper

SEQ ID NO: 35772 - DNA, 51 bp, Homo sapiens; identical to SEQ ID NO: 1213
  chr2:173292961-173293012
  hyper

SEQ ID NO: 35773 - DNA, 46 bp, Homo sapiens; identical to SEQ ID NO: 1214
  chr2:173940455-173940501
  hyper

SEQ ID NO: 35774 - DNA, 106 bp, Homo sapiens; identical to SEQ ID NO: 1215
  chr2:173940629-173940735
  hyper

SEQ ID NO: 35775 - DNA, 31 bp, Homo sapiens; identical to SEQ ID NO: 1216
  chr2:174349950-174349981
  hyper

SEQ ID NO: 35776 - DNA, 52 bp, Homo sapiens; identical to SEQ ID NO: 1217
  chr2:174349995-174350047
  hyper

SEQ ID NO: 35777 - DNA, 31 bp, Homo sapiens; identical to SEQ ID NO: 1218
  chr2:174350101-174350132
  hyper

SEQ ID NO: 35778 - DNA, 31 bp, Homo sapiens; identical to SEQ ID NO: 1219
  chr2:174350137-174350168
  hyper

SEQ ID NO: 35779 - DNA, 31 bp, Homo sapiens; identical to SEQ ID NO: 1220
  chr2:175320206-175320237
  hyper

SEQ ID NO: 35780 - DNA, 31 bp, Homo sapiens; identical to SEQ ID NO: 1221
  chr2:175546697-175546728
  hyper

SEQ ID NO: 35781 - DNA, 31 bp, Homo sapiens; identical to SEQ ID NO: 1222
  chr2:175546731-175546762
  hyper

SEQ ID NO: 35782 - DNA, 1 bp, Homo sapiens
  chr2:175546788-175546789
  hyper
g

SEQ ID NO: 35783 - DNA, 103 bp, Homo sapiens; identical to SEQ ID NO: 1227
  chr2:178937428-178937531
  hyper

SEQ ID NO: 35784 - DNA, 86 bp, Homo sapiens; identical to SEQ ID NO: 1231
  chr2:180129610-180129696
  hyper

SEQ ID NO: 35785 - DNA, 2 bp, Homo sapiens
  chr2:182321356-182321358
  hyper
gg

SEQ ID NO: 35786 - DNA, 31 bp, Homo sapiens; identical to SEQ ID NO: 1244
  chr2:182323112-182323143
  hyper

SEQ ID NO: 35787 - DNA, 31 bp, Homo sapiens; identical to SEQ ID NO: 1245
  chr2:182756672-182756703
  hyper

SEQ ID NO: 35788 - DNA, 74 bp, Homo sapiens; identical to SEQ ID NO: 1246
  chr2:182757522-182757596
  hyper

SEQ ID NO: 35789 - DNA, 36 bp, Homo sapiens; identical to SEQ ID NO: 1247
  chr2:182757600-182757636
  hyper

SEQ ID NO: 35790 - DNA, 58 bp, Homo sapiens; identical to SEQ ID NO: 1248
  chr2:182818944-182819002
  hyper

SEQ ID NO: 35791 - DNA, 18 bp, Homo sapiens
  chr2:182819013-182819031
  hyper
acacacacaccccgcgcg

SEQ ID NO: 35792 - DNA, 31 bp, Homo sapiens; identical to SEQ ID NO: 1254
  chr2:183902296-183902327
  hyper

SEQ ID NO: 35793 - DNA, 31 bp, Homo sapiens; identical to SEQ ID NO: 1255
  chr2:183902341-183902372
  hyper

SEQ ID NO: 35794 - DNA, 44 bp, Homo sapiens; identical to SEQ ID NO: 1257
  chr2:183902442-183902486
  hyper

SEQ ID NO: 35795 - DNA, 121 bp, Homo sapiens; identical to SEQ ID NO: 1258
  chr2:183902679-183902800
  hyper

SEQ ID NO: 35796 - DNA, 31 bp, Homo sapiens; identical to SEQ ID NO: 1259
  chr2:183902804-183902835
  hyper

SEQ ID NO: 35797 - DNA, 31 bp, Homo sapiens; identical to SEQ ID NO: 1260
  chr2:183902865-183902896
  hyper

SEQ ID NO: 35798 - DNA, 58 bp, Homo sapiens; identical to SEQ ID NO: 1261
  chr2:183902905-183902963
  hyper

SEQ ID NO: 35799 - DNA, 45 bp, Homo sapiens; identical to SEQ ID NO: 1262
  chr2:183902964-183903009
  hyper

SEQ ID NO: 35800 - DNA, 178 bp, Homo sapiens; identical to SEQ ID NO: 1263
  chr2:183903037-183903215
  hyper

SEQ ID NO: 35801 - DNA, 190 bp, Homo sapiens; identical to SEQ ID NO: 1264
  chr2:183903236-183903426
  hyper

SEQ ID NO: 35802 - DNA, 39 bp, Homo sapiens; identical to SEQ ID NO: 1265
  chr2:187454989-187455028
  hyper

SEQ ID NO: 35803 - DNA, 61 bp, Homo sapiens; identical to SEQ ID NO: 1266
  chr2:187455150-187455211
  hyper

SEQ ID NO: 35804 - DNA, 58 bp, Homo sapiens; identical to SEQ ID NO: 1267
  chr2:187455216-187455274
  hyper

SEQ ID NO: 35805 - DNA, 125 bp, Homo sapiens; identical to SEQ ID NO: 1268
  chr2:190445656-190445781
  hyper

SEQ ID NO: 35806 - DNA, 35 bp, Homo sapiens; identical to SEQ ID NO: 1269
  chr2:190445796-190445831
  hyper

SEQ ID NO: 35807 - DNA, 40 bp, Homo sapiens; identical to SEQ ID NO: 1270
  chr2:191513081-191513121
  hyper

SEQ ID NO: 35808 - DNA, 36 bp, Homo sapiens; identical to SEQ ID NO: 1271
  chr2:192109886-192109922
  hyper

SEQ ID NO: 35809 - DNA, 117 bp, Homo sapiens; identical to SEQ ID NO: 1272
  chr2:192110380-192110497
  hyper

SEQ ID NO: 35810 - DNA, 31 bp, Homo sapiens; identical to SEQ ID NO: 1274
  chr2:200604746-200604777
  hyper

SEQ ID NO: 35811 - DNA, 31 bp, Homo sapiens; identical to SEQ ID NO: 1275
  chr2:200604795-200604826
  hyper

SEQ ID NO: 35812 - DNA, 40 bp, Homo sapiens; identical to SEQ ID NO: 1276
  chr2:201171094-201171134
  hyper

SEQ ID NO: 35813 - DNA, 134 bp, Homo sapiens; identical to SEQ ID NO: 1277
  chr2:201171184-201171318
  hyper

SEQ ID NO: 35814 - DNA, 103 bp, Homo sapiens; identical to SEQ ID NO: 1278
  chr2:201171396-201171499
  hyper

SEQ ID NO: 35815 - DNA, 405 bp, Homo sapiens; identical to SEQ ID NO: 1279
  chr2:201171603-201172008
  hyper

SEQ ID NO: 35816 - DNA, 226 bp, Homo sapiens; identical to SEQ ID NO: 1280
  chr2:201172122-201172348
  hyper

SEQ ID NO: 35817 - DNA, 31 bp, Homo sapiens; identical to SEQ ID NO: 1281
  chr2:201172568-201172599
  hyper

SEQ ID NO: 35818 - DNA, 82 bp, Homo sapiens; identical to SEQ ID NO: 1282
  chr2:204399881-204399963
  hyper

SEQ ID NO: 35819 - DNA, 89 bp, Homo sapiens; identical to SEQ ID NO: 1283
  chr2:205409781-205409870
  hyper

SEQ ID NO: 35820 - DNA, 31 bp, Homo sapiens; identical to SEQ ID NO: 1284
  chr2:205409904-205409935
  hyper

SEQ ID NO: 35821 - DNA, 700 bp, Homo sapiens; identical to SEQ ID NO: 1285
  chr2:205410072-205410772
  hyper

SEQ ID NO: 35822 - DNA, 106 bp, Homo sapiens; identical to SEQ ID NO: 1286
  chr2:205410817-205410923
  hyper

SEQ ID NO: 35823 - DNA, 31 bp, Homo sapiens; identical to SEQ ID NO: 1287
  chr2:206166172-206166203
  hyper

SEQ ID NO: 35824 - DNA, 49 bp, Homo sapiens; identical to SEQ ID NO: 1288
  chr2:206750498-206750547
  hyper

SEQ ID NO: 35825 - DNA, 31 bp, Homo sapiens; identical to SEQ ID NO: 1289
  chr2:208395299-208395330
  hyper

SEQ ID NO: 35826 - DNA, 150 bp, Homo sapiens; identical to SEQ ID NO: 1290
  chr2:208633393-208633543
  hyper

SEQ ID NO: 35827 - DNA, 50 bp, Homo sapiens; identical to SEQ ID NO: 1291
  chr2:208633755-208633805
  hyper

SEQ ID NO: 35828 - DNA, 36 bp, Homo sapiens; identical to SEQ ID NO: 1292
  chr2:208633821-208633857
  hyper

SEQ ID NO: 35829 - DNA, 86 bp, Homo sapiens; identical to SEQ ID NO: 1293
  chr2:209118760-209118846
  hyper

SEQ ID NO: 35830 - DNA, 37 bp, Homo sapiens; identical to SEQ ID NO: 1294
  chr2:209118862-209118899
  hyper

SEQ ID NO: 35831 - DNA, 31 bp, Homo sapiens; identical to SEQ ID NO: 1295
  chr2:216826037-216826068
  hyper

SEQ ID NO: 35832 - DNA, 31 bp, Homo sapiens; identical to SEQ ID NO: 1296
  chr2:218802244-218802275
  hyper

SEQ ID NO: 35833 - DNA, 41 bp, Homo sapiens; identical to SEQ ID NO: 1297
  chr2:219261656-219261697
  hyper

SEQ ID NO: 35834 - DNA, 31 bp, Homo sapiens; identical to SEQ ID NO: 1298
  chr2:219263996-219264027
  hyper

SEQ ID NO: 35835 - DNA, 140 bp, Homo sapiens; identical to SEQ ID NO: 1299
  chr2:219264032-219264172
  hyper

SEQ ID NO: 35836 - DNA, 237 bp, Homo sapiens; identical to SEQ ID NO: 1300
  chr2:219264205-219264442
  hyper

SEQ ID NO: 35837 - DNA, 79 bp, Homo sapiens; identical to SEQ ID NO: 1301
  chr2:219724230-219724309
  hyper

SEQ ID NO: 35838 - DNA, 36 bp, Homo sapiens; identical to SEQ ID NO: 1302
  chr2:219735641-219735677
  hyper

SEQ ID NO: 35839 - DNA, 2 bp, Homo sapiens
  chr2:219735784-219735786
  hyper
ca

SEQ ID NO: 35840 - DNA, 31 bp, Homo sapiens; identical to SEQ ID NO: 1308
  chr2:219757765-219757796
  hyper

SEQ ID NO: 35841 - DNA, 166 bp, Homo sapiens
  chr2:219757800-219757966
  hyper
ggcgggcaccgtgggccgcctgtgcaacaagagcagcgccggctcggatggctgcggcagcatgtgctgcggccgcggccacaacatcctgcgccagacgcgcagcgagcgctgccactgccgcttccactggtgctgtttcgtggtctgcgaagagtgccgcatc

SEQ ID NO: 35842 - DNA, 21 bp, Homo sapiens
  chr2:219758014-219758035
  hyper
cctgatcgaggtcccctcctg

SEQ ID NO: 35843 - DNA, 51 bp, Homo sapiens; identical to SEQ ID NO: 1310
  chr2:219758041-219758092
  hyper

SEQ ID NO: 35844 - DNA, 31 bp, Homo sapiens; identical to SEQ ID NO: 1312
  chr2:219924976-219925007
  hyper

SEQ ID NO: 35845 - DNA, 31 bp, Homo sapiens; identical to SEQ ID NO: 1313
  chr2:220408153-220408184
  hyper

SEQ ID NO: 35846 - DNA, 31 bp, Homo sapiens; identical to SEQ ID NO: 1314
  chr2:220408748-220408779
  hyper

SEQ ID NO: 35847 - DNA, 43 bp, Homo sapiens; identical to SEQ ID NO: 1315
  chr2:220492469-220492512
  hyper

SEQ ID NO: 35848 - DNA, 94 bp, Homo sapiens; identical to SEQ ID NO: 1316
  chr2:222437144-222437238
  hyper

SEQ ID NO: 35849 - DNA, 41 bp, Homo sapiens; identical to SEQ ID NO: 1317
  chr2:222437313-222437354
  hyper

SEQ ID NO: 35850 - DNA, 40 bp, Homo sapiens; identical to SEQ ID NO: 1318
  chr2:222437650-222437690
  hyper

SEQ ID NO: 35851 - DNA, 102 bp, Homo sapiens; identical to SEQ ID NO: 1319
  chr2:222438668-222438770
  hyper

SEQ ID NO: 35852 - DNA, 95 bp, Homo sapiens; identical to SEQ ID NO: 1322
  chr2:224809097-224809192
  hyper

SEQ ID NO: 35853 - DNA, 31 bp, Homo sapiens; identical to SEQ ID NO: 1323
  chr2:225381703-225381734
  hyper

SEQ ID NO: 35854 - DNA, 52 bp, Homo sapiens; identical to SEQ ID NO: 1324
  chr2:225906312-225906364
  hyper

SEQ ID NO: 35855 - DNA, 2 bp, Homo sapiens
  chr2:225906403-225906405
  hyper
gt

SEQ ID NO: 35856 - DNA, 62 bp, Homo sapiens; identical to SEQ ID NO: 1333
  chr2:231902080-231902142
  hyper

SEQ ID NO: 35857 - DNA, 128 bp, Homo sapiens; identical to SEQ ID NO: 1334
  chr2:231902159-231902287
  hyper

SEQ ID NO: 35858 - DNA, 48 bp, Homo sapiens; identical to SEQ ID NO: 1335
  chr2:231902294-231902342
  hyper

SEQ ID NO: 35859 - DNA, 100 bp, Homo sapiens; identical to SEQ ID NO: 1336
  chr2:231902439-231902539
  hyper

SEQ ID NO: 35860 - DNA, 110 bp, Homo sapiens; identical to SEQ ID NO: 1337
  chr2:231902829-231902939
  hyper

SEQ ID NO: 35861 - DNA, 39 bp, Homo sapiens; identical to SEQ ID NO: 1340
  chr2:232539452-232539491
  hyper

SEQ ID NO: 35862 - DNA, 58 bp, Homo sapiens; identical to SEQ ID NO: 1341
  chr2:234699502-234699560
  hyper

SEQ ID NO: 35863 - DNA, 185 bp, Homo sapiens; identical to SEQ ID NO: 1342
  chr2:235860166-235860351
  hyper

SEQ ID NO: 35864 - DNA, 134 bp, Homo sapiens; identical to SEQ ID NO: 1343
  chr2:235860416-235860550
  hyper

SEQ ID NO: 35865 - DNA, 130 bp, Homo sapiens; identical to SEQ ID NO: 1344
  chr2:235860594-235860724
  hyper

SEQ ID NO: 35866 - DNA, 224 bp, Homo sapiens; identical to SEQ ID NO: 1345
  chr2:235861073-235861297
  hyper

SEQ ID NO: 35867 - DNA, 61 bp, Homo sapiens; identical to SEQ ID NO: 1346
  chr2:236402445-236402506
  hyper

SEQ ID NO: 35868 - DNA, 107 bp, Homo sapiens; identical to SEQ ID NO: 1347
  chr2:236402571-236402678
  hyper

SEQ ID NO: 35869 - DNA, 14 bp, Homo sapiens
  chr2:236403138-236403152
  hyper
gccatgaactgagc

SEQ ID NO: 35870 - DNA, 41 bp, Homo sapiens; identical to SEQ ID NO: 1351
  chr2:236403741-236403782
  hyper

SEQ ID NO: 35871 - DNA, 104 bp, Homo sapiens; identical to SEQ ID NO: 1352
  chr2:236404012-236404116
  hyper

SEQ ID NO: 35872 - DNA, 31 bp, Homo sapiens; identical to SEQ ID NO: 1353
  chr2:236404126-236404157
  hyper

SEQ ID NO: 35873 - DNA, 31 bp, Homo sapiens; identical to SEQ ID NO: 1354
  chr2:237436059-237436090
  hyper

SEQ ID NO: 35874 - DNA, 31 bp, Homo sapiens; identical to SEQ ID NO: 1355
  chr2:237436091-237436122
  hyper

SEQ ID NO: 35875 - DNA, 31 bp, Homo sapiens; identical to SEQ ID NO: 1356
  chr2:237436126-237436157
  hyper

SEQ ID NO: 35876 - DNA, 31 bp, Homo sapiens; identical to SEQ ID NO: 1357
  chr2:238200161-238200192
  hyper

SEQ ID NO: 35877 - DNA, 50 bp, Homo sapiens; identical to SEQ ID NO: 1358
  chr2:238384222-238384272
  hyper

SEQ ID NO: 35878 - DNA, 31 bp, Homo sapiens; identical to SEQ ID NO: 1359
  chr2:238791402-238791433
  hyper

SEQ ID NO: 35879 - DNA, 52 bp, Homo sapiens; identical to SEQ ID NO: 1360
  chr2:238876149-238876201
  hyper

SEQ ID NO: 35880 - DNA, 79 bp, Homo sapiens; identical to SEQ ID NO: 1361
  chr2:239148239-239148318
  hyper

SEQ ID NO: 35881 - DNA, 31 bp, Homo sapiens; identical to SEQ ID NO: 1362
  chr2:239148419-239148450
  hyper

SEQ ID NO: 35882 - DNA, 40 bp, Homo sapiens; identical to SEQ ID NO: 1363
  chr2:239148489-239148529
  hyper

SEQ ID NO: 35883 - DNA, 193 bp, Homo sapiens; identical to SEQ ID NO: 1364
  chr2:239148533-239148726
  hyper

SEQ ID NO: 35884 - DNA, 252 bp, Homo sapiens; identical to SEQ ID NO: 1365
  chr2:239148736-239148988
  hyper

SEQ ID NO: 35885 - DNA, 31 bp, Homo sapiens; identical to SEQ ID NO: 1366
  chr2:239149126-239149157
  hyper

SEQ ID NO: 35886 - DNA, 138 bp, Homo sapiens; identical to SEQ ID NO: 1367
  chr2:239149158-239149296
  hyper

SEQ ID NO: 35887 - DNA, 31 bp, Homo sapiens; identical to SEQ ID NO: 1368
  chr2:240294440-240294471
  hyper

SEQ ID NO: 35888 - DNA, 31 bp, Homo sapiens; identical to SEQ ID NO: 1369
  chr2:240965329-240965360
  hyper

SEQ ID NO: 35889 - DNA, 37 bp, Homo sapiens; identical to SEQ ID NO: 1370
  chr2:241374578-241374615
  hyper

SEQ ID NO: 35890 - DNA, 68 bp, Homo sapiens; identical to SEQ ID NO: 1371
  chr2:241375297-241375365
  hyper

SEQ ID NO: 35891 - DNA, 223 bp, Homo sapiens; identical to SEQ ID NO: 1372
  chr2:241375406-241375629
  hyper

SEQ ID NO: 35892 - DNA, 31 bp, Homo sapiens; identical to SEQ ID NO: 1373
  chr2:241902830-241902861
  hyper

SEQ ID NO: 35893 - DNA, 40 bp, Homo sapiens; identical to SEQ ID NO: 1375
  chr2:242448318-242448358
  hyper

SEQ ID NO: 35894 - DNA, 108 bp, Homo sapiens; identical to SEQ ID NO: 1376
  chr2:242498018-242498126
  hyper

SEQ ID NO: 35895 - DNA, 118 bp, Homo sapiens; identical to SEQ ID NO: 1377
  chr2:242498147-242498265
  hyper

SEQ ID NO: 35896 - DNA, 69 bp, Homo sapiens
  chr2:242498800-242498869
  hyper
gcccggcgccccgcgcgccccgttccccgcgccgcctccctccacccggctgagcgcttgtgcccgcag

SEQ ID NO: 35897 - DNA, 56 bp, Homo sapiens; identical to SEQ ID NO: 1379
  chr2:242549739-242549795
  hyper

SEQ ID NO: 35898 - DNA, 2 bp, Homo sapiens
  chr2:242550006-242550008
  hyper
cc

SEQ ID NO: 35899 - DNA, 31 bp, Homo sapiens; identical to SEQ ID NO: 1381
  chr3:5020396-5020427
  hyper

SEQ ID NO: 35900 - DNA, 31 bp, Homo sapiens; identical to SEQ ID NO: 1382
  chr3:8543387-8543418
  hyper

SEQ ID NO: 35901 - DNA, 65 bp, Homo sapiens; identical to SEQ ID NO: 1384
  chr3:9811684-9811749
  hyper

SEQ ID NO: 35902 - DNA, 53 bp, Homo sapiens; identical to SEQ ID NO: 1385
  chr3:9812388-9812441
  hyper

SEQ ID NO: 35903 - DNA, 31 bp, Homo sapiens; identical to SEQ ID NO: 1386
  chr3:9812449-9812480
  hyper

SEQ ID NO: 35904 - DNA, 31 bp, Homo sapiens; identical to SEQ ID NO: 1387
  chr3:9851550-9851581
  hyper

SEQ ID NO: 35905 - DNA, 31 bp, Homo sapiens; identical to SEQ ID NO: 1388
  chr3:9851988-9852019
  hyper

SEQ ID NO: 35906 - DNA, 18 bp, Homo sapiens
  chr3:9904708-9904726
  hyper
ggccgtgctgtccaggct

SEQ ID NO: 35907 - DNA, 31 bp, Homo sapiens; identical to SEQ ID NO: 1394
  chr3:10052428-10052459
  hyper

SEQ ID NO: 35908 - DNA, 31 bp, Homo sapiens; identical to SEQ ID NO: 1395
  chr3:11258023-11258054
  hyper

SEQ ID NO: 35909 - DNA, 185 bp, Homo sapiens; identical to SEQ ID NO: 1396
  chr3:12329084-12329269
  hyper

SEQ ID NO: 35910 - DNA, 31 bp, Homo sapiens; identical to SEQ ID NO: 1397
  chr3:12524521-12524552
  hyper

SEQ ID NO: 35911 - DNA, 31 bp, Homo sapiens; identical to SEQ ID NO: 1398
  chr3:13008871-13008902
  hyper

SEQ ID NO: 35912 - DNA, 54 bp, Homo sapiens; identical to SEQ ID NO: 1399
  chr3:13460979-13461033
  hyper

SEQ ID NO: 35913 - DNA, 31 bp, Homo sapiens; identical to SEQ ID NO: 1400
  chr3:16553593-16553624
  hyper

SEQ ID NO: 35914 - DNA, 28 bp, Homo sapiens
  chr3:16553951-16553979
  hyper
gtttgttttaagcccccgaagaaactca

SEQ ID NO: 35915 - DNA, 31 bp, Homo sapiens; identical to SEQ ID NO: 1409
  chr3:16555435-16555466
  hyper

SEQ ID NO: 35916 - DNA, 31 bp, Homo sapiens; identical to SEQ ID NO: 1410
  chr3:16555487-16555518
  hyper

SEQ ID NO: 35917 - DNA, 2 bp, Homo sapiens
  chr3:16925655-16925657
  hyper
at

SEQ ID NO: 35918 - DNA, 231 bp, Homo sapiens
  chr3:16925705-16925936
  hyper
agcgccgagctcgggaggagacagcagccggcgggtggggtgggtctgggctgccccctccgggagctgccccggggccgcacggcgattgtcatacccggccgcccctgcccgccgtgggcttcctctcggcgccgcgggccttaacggggctctgaggggacgtgacagagctcggcacgcggcagcctctggggagttagggtccggagagacccacgcgtcgccccc

SEQ ID NO: 35919 - DNA, 144 bp, Homo sapiens; identical to SEQ ID NO: 1412
  chr3:16925998-16926142
  hyper

SEQ ID NO: 35920 - DNA, 61 bp, Homo sapiens; identical to SEQ ID NO: 1413
  chr3:16926801-16926862
  hyper

SEQ ID NO: 35921 - DNA, 31 bp, Homo sapiens; identical to SEQ ID NO: 1414
  chr3:17571374-17571405
  hyper

SEQ ID NO: 35922 - DNA, 31 bp, Homo sapiens; identical to SEQ ID NO: 1415
  chr3:23654182-23654213
  hyper

SEQ ID NO: 35923 - DNA, 65 bp, Homo sapiens; identical to SEQ ID NO: 1416
  chr3:23986745-23986810
  hyper

SEQ ID NO: 35924 - DNA, 59 bp, Homo sapiens; identical to SEQ ID NO: 1417
  chr3:24536767-24536826
  hyper

SEQ ID NO: 35925 - DNA, 31 bp, Homo sapiens; identical to SEQ ID NO: 1418
  chr3:24536986-24537017
  hyper

SEQ ID NO: 35926 - DNA, 54 bp, Homo sapiens; identical to SEQ ID NO: 1419
  chr3:24563200-24563254
  hyper

SEQ ID NO: 35927 - DNA, 2 bp, Homo sapiens
  chr3:32433864-32433866
  hyper
gg

SEQ ID NO: 35928 - DNA, 35 bp, Homo sapiens; identical to SEQ ID NO: 1421
  chr3:32612741-32612776
  hyper

SEQ ID NO: 35929 - DNA, 31 bp, Homo sapiens; identical to SEQ ID NO: 1422
  chr3:37033964-37033995
  hyper

SEQ ID NO: 35930 - DNA, 31 bp, Homo sapiens; identical to SEQ ID NO: 1423
  chr3:37034011-37034042
  hyper

SEQ ID NO: 35931 - DNA, 49 bp, Homo sapiens; identical to SEQ ID NO: 1424
  chr3:37034049-37034098
  hyper

SEQ ID NO: 35932 - DNA, 55 bp, Homo sapiens; identical to SEQ ID NO: 1425
  chr3:37034125-37034180
  hyper

SEQ ID NO: 35933 - DNA, 31 bp, Homo sapiens; identical to SEQ ID NO: 1426
  chr3:37034213-37034244
  hyper

SEQ ID NO: 35934 - DNA, 232 bp, Homo sapiens; identical to SEQ ID NO: 1427
  chr3:37034290-37034522
  hyper

SEQ ID NO: 35935 - DNA, 31 bp, Homo sapiens; identical to SEQ ID NO: 1428
  chr3:37902232-37902263
  hyper

SEQ ID NO: 35936 - DNA, 140 bp, Homo sapiens; identical to SEQ ID NO: 1429
  chr3:37903575-37903715
  hyper

SEQ ID NO: 35937 - DNA, 138 bp, Homo sapiens; identical to SEQ ID NO: 1430
  chr3:37903721-37903859
  hyper

SEQ ID NO: 35938 - DNA, 92 bp, Homo sapiens; identical to SEQ ID NO: 1431
  chr3:37903861-37903953
  hyper

SEQ ID NO: 35939 - DNA, 98 bp, Homo sapiens; identical to SEQ ID NO: 1432
  chr3:37903954-37904052
  hyper

SEQ ID NO: 35940 - DNA, 46 bp, Homo sapiens; identical to SEQ ID NO: 1435
  chr3:38206258-38206304
  hyper

SEQ ID NO: 35941 - DNA, 30 bp, Homo sapiens; identical to SEQ ID NO: 1436
  chr3:38495144-38495174
  hyper

SEQ ID NO: 35942 - DNA, 52 bp, Homo sapiens; identical to SEQ ID NO: 1437
  chr3:38495213-38495265
  hyper

SEQ ID NO: 35943 - DNA, 102 bp, Homo sapiens; identical to SEQ ID NO: 1438
  chr3:38495678-38495780
  hyper

SEQ ID NO: 35944 - DNA, 150 bp, Homo sapiens; identical to SEQ ID NO: 1439
  chr3:38496020-38496170
  hyper

SEQ ID NO: 35945 - DNA, 31 bp, Homo sapiens; identical to SEQ ID NO: 1440
  chr3:38496255-38496286
  hyper

SEQ ID NO: 35946 - DNA, 53 bp, Homo sapiens; identical to SEQ ID NO: 1441
  chr3:38496294-38496347
  hyper

SEQ ID NO: 35947 - DNA, 71 bp, Homo sapiens; identical to SEQ ID NO: 1442
  chr3:38496417-38496488
  hyper

SEQ ID NO: 35948 - DNA, 356 bp, Homo sapiens; identical to SEQ ID NO: 1443
  chr3:38496526-38496882
  hyper

SEQ ID NO: 35949 - DNA, 82 bp, Homo sapiens; identical to SEQ ID NO: 1444
  chr3:38496886-38496968
  hyper

SEQ ID NO: 35950 - DNA, 31 bp, Homo sapiens; identical to SEQ ID NO: 1445
  chr3:38497012-38497043
  hyper

SEQ ID NO: 35951 - DNA, 116 bp, Homo sapiens; identical to SEQ ID NO: 1446
  chr3:38497048-38497164
  hyper

SEQ ID NO: 35952 - DNA, 90 bp, Homo sapiens; identical to SEQ ID NO: 1447
  chr3:38497165-38497255
  hyper

SEQ ID NO: 35953 - DNA, 43 bp, Homo sapiens; identical to SEQ ID NO: 1448
  chr3:39148466-39148509
  hyper

SEQ ID NO: 35954 - DNA, 37 bp, Homo sapiens; identical to SEQ ID NO: 1449
  chr3:40350852-40350889
  hyper

SEQ ID NO: 35955 - DNA, 31 bp, Homo sapiens; identical to SEQ ID NO: 1450
  chr3:40547427-40547458
  hyper

SEQ ID NO: 35956 - DNA, 31 bp, Homo sapiens; identical to SEQ ID NO: 1451
  chr3:40547550-40547581
  hyper

SEQ ID NO: 35957 - DNA, 31 bp, Homo sapiens; identical to SEQ ID NO: 1452
  chr3:42696340-42696371
  hyper

SEQ ID NO: 35958 - DNA, 41 bp, Homo sapiens; identical to SEQ ID NO: 1453
  chr3:42696420-42696461
  hyper

SEQ ID NO: 35959 - DNA, 2 bp, Homo sapiens
  chr3:42814257-42814259
  hyper
gg

SEQ ID NO: 35960 - DNA, 34 bp, Homo sapiens; identical to SEQ ID NO: 1459
  chr3:42845261-42845295
  hyper

SEQ ID NO: 35961 - DNA, 40 bp, Homo sapiens; identical to SEQ ID NO: 1460
  chr3:43147124-43147164
  hyper

SEQ ID NO: 35962 - DNA, 104 bp, Homo sapiens; identical to SEQ ID NO: 1461
  chr3:43147168-43147272
  hyper

SEQ ID NO: 35963 - DNA, 9 bp, Homo sapiens
  chr3:43147273-43147282
  hyper
agtcccagg

SEQ ID NO: 35964 - DNA, 119 bp, Homo sapiens
  chr3:43147607-43147726
  hyper
cggccacaaccttggctcgcggaatcctgggaggtgtagttttgcgtacgaggacagcccgcgccgccaccagcctgcggaatgttgggagtgataatttgcgccgagaggctgagttt

SEQ ID NO: 35965 - DNA, 31 bp, Homo sapiens; identical to SEQ ID NO: 1465
  chr3:43662925-43662956
  hyper

SEQ ID NO: 35966 - DNA, 43 bp, Homo sapiens; identical to SEQ ID NO: 1466
  chr3:43663333-43663376
  hyper

SEQ ID NO: 35967 - DNA, 57 bp, Homo sapiens; identical to SEQ ID NO: 1467
  chr3:43663491-43663548
  hyper

SEQ ID NO: 35968 - DNA, 31 bp, Homo sapiens; identical to SEQ ID NO: 1468
  chr3:43811143-43811174
  hyper

SEQ ID NO: 35969 - DNA, 31 bp, Homo sapiens; identical to SEQ ID NO: 1469
  chr3:44379883-44379914
  hyper

SEQ ID NO: 35970 - DNA, 42 bp, Homo sapiens; identical to SEQ ID NO: 1470
  chr3:44518641-44518683
  hyper

SEQ ID NO: 35971 - DNA, 44 bp, Homo sapiens; identical to SEQ ID NO: 1471
  chr3:44666868-44666912
  hyper

SEQ ID NO: 35972 - DNA, 36 bp, Homo sapiens; identical to SEQ ID NO: 1472
  chr3:48470349-48470385
  hyper

SEQ ID NO: 35973 - DNA, 55 bp, Homo sapiens; identical to SEQ ID NO: 1473
  chr3:48470476-48470531
  hyper

SEQ ID NO: 35974 - DNA, 31 bp, Homo sapiens; identical to SEQ ID NO: 1474
  chr3:48470537-48470568
  hyper

SEQ ID NO: 35975 - DNA, 72 bp, Homo sapiens; identical to SEQ ID NO: 1475
  chr3:48471201-48471273
  hyper

SEQ ID NO: 35976 - DNA, 56 bp, Homo sapiens; identical to SEQ ID NO: 1477
  chr3:50192567-50192623
  hyper

SEQ ID NO: 35977 - DNA, 39 bp, Homo sapiens; identical to SEQ ID NO: 1478
  chr3:50192965-50193004
  hyper

SEQ ID NO: 35978 - DNA, 48 bp, Homo sapiens; identical to SEQ ID NO: 1479
  chr3:50193032-50193080
  hyper

SEQ ID NO: 35979 - DNA, 31 bp, Homo sapiens; identical to SEQ ID NO: 1480
  chr3:50374390-50374421
  hyper

SEQ ID NO: 35980 - DNA, 31 bp, Homo sapiens; identical to SEQ ID NO: 1481
  chr3:50374463-50374494
  hyper

SEQ ID NO: 35981 - DNA, 49 bp, Homo sapiens; identical to SEQ ID NO: 1484
  chr3:50387961-50388010
  hyper

SEQ ID NO: 35982 - DNA, 41 bp, Homo sapiens; identical to SEQ ID NO: 1488
  chr3:52001296-52001337
  hyper

SEQ ID NO: 35983 - DNA, 31 bp, Homo sapiens; identical to SEQ ID NO: 1489
  chr3:52477535-52477566
  hyper

SEQ ID NO: 35984 - DNA, 105 bp, Homo sapiens; identical to SEQ ID NO: 1490
  chr3:53195773-53195878
  hyper

SEQ ID NO: 35985 - DNA, 48 bp, Homo sapiens; identical to SEQ ID NO: 1491
  chr3:53195952-53196000
  hyper

SEQ ID NO: 35986 - DNA, 38 bp, Homo sapiens; identical to SEQ ID NO: 1492
  chr3:53528138-53528176
  hyper

SEQ ID NO: 35987 - DNA, 62 bp, Homo sapiens; identical to SEQ ID NO: 1493
  chr3:53528338-53528400
  hyper

SEQ ID NO: 35988 - DNA, 68 bp, Homo sapiens; identical to SEQ ID NO: 1494
  chr3:53528642-53528710
  hyper

SEQ ID NO: 35989 - DNA, 56 bp, Homo sapiens; identical to SEQ ID NO: 1495
  chr3:57112602-57112658
  hyper

SEQ ID NO: 35990 - DNA, 89 bp, Homo sapiens; identical to SEQ ID NO: 1496
  chr3:57112783-57112872
  hyper

SEQ ID NO: 35991 - DNA, 238 bp, Homo sapiens; identical to SEQ ID NO: 1497
  chr3:57112979-57113217
  hyper

SEQ ID NO: 35992 - DNA, 31 bp, Homo sapiens; identical to SEQ ID NO: 1498
  chr3:57113349-57113380
  hyper

SEQ ID NO: 35993 - DNA, 35 bp, Homo sapiens; identical to SEQ ID NO: 1499
  chr3:57113437-57113472
  hyper

SEQ ID NO: 35994 - DNA, 127 bp, Homo sapiens; identical to SEQ ID NO: 1500
  chr3:57198836-57198963
  hyper

SEQ ID NO: 35995 - DNA, 54 bp, Homo sapiens; identical to SEQ ID NO: 1501
  chr3:57199029-57199083
  hyper

SEQ ID NO: 35996 - DNA, 54 bp, Homo sapiens; identical to SEQ ID NO: 1502
  chr3:57199094-57199148
  hyper

SEQ ID NO: 35997 - DNA, 31 bp, Homo sapiens; identical to SEQ ID NO: 1503
  chr3:57261347-57261378
  hyper

SEQ ID NO: 35998 - DNA, 55 bp, Homo sapiens; identical to SEQ ID NO: 1505
  chr3:61548795-61548850
  hyper

SEQ ID NO: 35999 - DNA, 31 bp, Homo sapiens; identical to SEQ ID NO: 1506
  chr3:61656125-61656156
  hyper

SEQ ID NO: 36000 - DNA, 48 bp, Homo sapiens; identical to SEQ ID NO: 1507
  chr3:61656168-61656216
  hyper

SEQ ID NO: 36001 - DNA, 47 bp, Homo sapiens; identical to SEQ ID NO: 1508
  chr3:64671587-64671634
  hyper

SEQ ID NO: 36002 - DNA, 31 bp, Homo sapiens; identical to SEQ ID NO: 1509
  chr3:64673805-64673836
  hyper

SEQ ID NO: 36003 - DNA, 64 bp, Homo sapiens; identical to SEQ ID NO: 1510
  chr3:66024207-66024271
  hyper

SEQ ID NO: 36004 - DNA, 62 bp, Homo sapiens; identical to SEQ ID NO: 1511
  chr3:66024415-66024477
  hyper

SEQ ID NO: 36005 - DNA, 64 bp, Homo sapiens; identical to SEQ ID NO: 1512
  chr3:66024641-66024705
  hyper

SEQ ID NO: 36006 - DNA, 67 bp, Homo sapiens; identical to SEQ ID NO: 1513
  chr3:66024996-66025063
  hyper

SEQ ID NO: 36007 - DNA, 280 bp, Homo sapiens; identical to SEQ ID NO: 1514
  chr3:66550413-66550693
  hyper

SEQ ID NO: 36008 - DNA, 68 bp, Homo sapiens; identical to SEQ ID NO: 1515
  chr3:66550698-66550766
  hyper

SEQ ID NO: 36009 - DNA, 69 bp, Homo sapiens; identical to SEQ ID NO: 1516
  chr3:66550867-66550936
  hyper

SEQ ID NO: 36010 - DNA, 80 bp, Homo sapiens; identical to SEQ ID NO: 1517
  chr3:66551011-66551091
  hyper

SEQ ID NO: 36011 - DNA, 356 bp, Homo sapiens; identical to SEQ ID NO: 1518
  chr3:66551117-66551473
  hyper

SEQ ID NO: 36012 - DNA, 126 bp, Homo sapiens; identical to SEQ ID NO: 1519
  chr3:66551524-66551650
  hyper

SEQ ID NO: 36013 - DNA, 31 bp, Homo sapiens; identical to SEQ ID NO: 1520
  chr3:66551712-66551743
  hyper

SEQ ID NO: 36014 - DNA, 76 bp, Homo sapiens; identical to SEQ ID NO: 1521
  chr3:66551785-66551861
  hyper

SEQ ID NO: 36015 - DNA, 37 bp, Homo sapiens; identical to SEQ ID NO: 1522
  chr3:66551865-66551902
  hyper

SEQ ID NO: 36016 - DNA, 31 bp, Homo sapiens; identical to SEQ ID NO: 1523
  chr3:69788413-69788444
  hyper

SEQ ID NO: 36017 - DNA, 148 bp, Homo sapiens; identical to SEQ ID NO: 1524
  chr3:69788530-69788678
  hyper

SEQ ID NO: 36018 - DNA, 49 bp, Homo sapiens; identical to SEQ ID NO: 1525
  chr3:71114104-71114153
  hyper

SEQ ID NO: 36019 - DNA, 133 bp, Homo sapiens; identical to SEQ ID NO: 1526
  chr3:71631263-71631396
  hyper

SEQ ID NO: 36020 - DNA, 103 bp, Homo sapiens; identical to SEQ ID NO: 1527
  chr3:71631398-71631501
  hyper

SEQ ID NO: 36021 - DNA, 110 bp, Homo sapiens; identical to SEQ ID NO: 1528
  chr3:71631789-71631899
  hyper

SEQ ID NO: 36022 - DNA, 49 bp, Homo sapiens; identical to SEQ ID NO: 1529
  chr3:72149904-72149953
  hyper

SEQ ID NO: 36023 - DNA, 1 bp, Homo sapiens
  chr3:72149958-72149959
  hyper
a

SEQ ID NO: 36024 - DNA, 22 bp, Homo sapiens
  chr3:72150077-72150099
  hyper
gaaactccgtgcaggggcaaag

SEQ ID NO: 36025 - DNA, 31 bp, Homo sapiens; identical to SEQ ID NO: 1532
  chr3:72496832-72496863
  hyper

SEQ ID NO: 36026 - DNA, 31 bp, Homo sapiens; identical to SEQ ID NO: 1533
  chr3:72896942-72896973
  hyper

SEQ ID NO: 36027 - DNA, 31 bp, Homo sapiens; identical to SEQ ID NO: 1534
  chr3:72937967-72937998
  hyper

SEQ ID NO: 36028 - DNA, 2 bp, Homo sapiens
  chr3:74663813-74663815
  hyper
cg

SEQ ID NO: 36029 - DNA, 102 bp, Homo sapiens; identical to SEQ ID NO: 1536
  chr3:97690940-97691042
  hyper

SEQ ID NO: 36030 - DNA, 93 bp, Homo sapiens; identical to SEQ ID NO: 1537
  chr3:98311893-98311986
  hyper

SEQ ID NO: 36031 - DNA, 31 bp, Homo sapiens; identical to SEQ ID NO: 1538
  chr3:101475323-101475354
  hyper

SEQ ID NO: 36032 - DNA, 81 bp, Homo sapiens; identical to SEQ ID NO: 1539
  chr3:107148892-107148973
  hyper

SEQ ID NO: 36033 - DNA, 2 bp, Homo sapiens
  chr3:107148995-107148997
  hyper
ga

SEQ ID NO: 36034 - DNA, 31 bp, Homo sapiens; identical to SEQ ID NO: 1541
  chr3:107245009-107245040
  hyper

SEQ ID NO: 36035 - DNA, 31 bp, Homo sapiens; identical to SEQ ID NO: 1542
  chr3:110790314-110790345
  hyper

SEQ ID NO: 36036 - DNA, 31 bp, Homo sapiens; identical to SEQ ID NO: 1545
  chr3:120068919-120068950
  hyper

SEQ ID NO: 36037 - DNA, 37 bp, Homo sapiens; identical to SEQ ID NO: 1546
  chr3:121741106-121741143
  hyper

SEQ ID NO: 36038 - DNA, 31 bp, Homo sapiens; identical to SEQ ID NO: 1547
  chr3:121741346-121741377
  hyper

SEQ ID NO: 36039 - DNA, 99 bp, Homo sapiens; identical to SEQ ID NO: 1549
  chr3:122514391-122514490
  hyper

SEQ ID NO: 36040 - DNA, 31 bp, Homo sapiens; identical to SEQ ID NO: 1550
  chr3:122514524-122514555
  hyper

SEQ ID NO: 36041 - DNA, 70 bp, Homo sapiens; identical to SEQ ID NO: 1551
  chr3:122785819-122785889
  hyper

SEQ ID NO: 36042 - DNA, 89 bp, Homo sapiens; identical to SEQ ID NO: 1552
  chr3:123752027-123752116
  hyper

SEQ ID NO: 36043 - DNA, 58 bp, Homo sapiens; identical to SEQ ID NO: 1553
  chr3:124605379-124605437
  hyper

SEQ ID NO: 36044 - DNA, 61 bp, Homo sapiens; identical to SEQ ID NO: 1554
  chr3:124605739-124605800
  hyper

SEQ ID NO: 36045 - DNA, 50 bp, Homo sapiens; identical to SEQ ID NO: 1555
  chr3:124605853-124605903
  hyper

SEQ ID NO: 36046 - DNA, 31 bp, Homo sapiens; identical to SEQ ID NO: 1556
  chr3:125635404-125635435
  hyper

SEQ ID NO: 36047 - DNA, 31 bp, Homo sapiens; identical to SEQ ID NO: 1557
  chr3:125677241-125677272
  hyper

SEQ ID NO: 36048 - DNA, 92 bp, Homo sapiens; identical to SEQ ID NO: 1558
  chr3:126195082-126195174
  hyper

SEQ ID NO: 36049 - DNA, 128 bp, Homo sapiens; identical to SEQ ID NO: 1559
  chr3:126195273-126195401
  hyper

SEQ ID NO: 36050 - DNA, 43 bp, Homo sapiens
  chr3:133646451-133646494
  hyper
gcgctgagccgggtggtggagtcccgcccggctggctgtgggg

SEQ ID NO: 36051 - DNA, 66 bp, Homo sapiens; identical to SEQ ID NO: 1564
  chr3:133748885-133748951
  hyper

SEQ ID NO: 36052 - DNA, 31 bp, Homo sapiens; identical to SEQ ID NO: 1565
  chr3:133969928-133969959
  hyper

SEQ ID NO: 36053 - DNA, 63 bp, Homo sapiens
  chr3:134092502-134092565
  hyper
cgccccaccacgagcccgggcggacctggagcaccggtggccgctggtacgcctggggcgagc

SEQ ID NO: 36054 - DNA, 42 bp, Homo sapiens
  chr3:134092643-134092685
  hyper
ttccaaatactctaacgctgacgtcaccgggctggacagcag

SEQ ID NO: 36055 - DNA, 31 bp, Homo sapiens; identical to SEQ ID NO: 1568
  chr3:134092698-134092729
  hyper

SEQ ID NO: 36056 - DNA, 31 bp, Homo sapiens; identical to SEQ ID NO: 1569
  chr3:134092795-134092826
  hyper

SEQ ID NO: 36057 - DNA, 127 bp, Homo sapiens
  chr3:134092992-134093119
  hyper
cgctccctgggcagagcggcccttgccaggcactgcggctgcctcgaaagggcgcactgcgccccgaggacgctcgatcctcgaggctccgactcccggaaaaggccgggttgcgccgagactccag

SEQ ID NO: 36058 - DNA, 205 bp, Homo sapiens
  chr3:134093148-134093353
  hyper
gcgcgctctcccgagcgccgagcggccttccttaccgctgcggcccgagggtgcccagcgcagtcagacaccacaacctccggctcggcccagctcagctcggcggcgaagatgtgttctcggccgtggcgccgacgctctggctgttcgcgccccagcgcgcagccccagggtcggcccgcgccggaggcggctgctatgccag

SEQ ID NO: 36059 - DNA, 188 bp, Homo sapiens; identical to SEQ ID NO: 1571
  chr3:134093363-134093551
  hyper

SEQ ID NO: 36060 - DNA, 128 bp, Homo sapiens; identical to SEQ ID NO: 1572
  chr3:134093626-134093754
  hyper

SEQ ID NO: 36061 - DNA, 36 bp, Homo sapiens; identical to SEQ ID NO: 1573
  chr3:135684722-135684758
  hyper

SEQ ID NO: 36062 - DNA, 31 bp, Homo sapiens; identical to SEQ ID NO: 1577
  chr3:137834285-137834316
  hyper

SEQ ID NO: 36063 - DNA, 50 bp, Homo sapiens; identical to SEQ ID NO: 1578
  chr3:138048436-138048486
  hyper

SEQ ID NO: 36064 - DNA, 46 bp, Homo sapiens; identical to SEQ ID NO: 1579
  chr3:138067287-138067333
  hyper

SEQ ID NO: 36065 - DNA, 95 bp, Homo sapiens; identical to SEQ ID NO: 1580
  chr3:138312853-138312948
  hyper

SEQ ID NO: 36066 - DNA, 31 bp, Homo sapiens; identical to SEQ ID NO: 1581
  chr3:138313152-138313183
  hyper

SEQ ID NO: 36067 - DNA, 50 bp, Homo sapiens; identical to SEQ ID NO: 1582
  chr3:138313376-138313426
  hyper

SEQ ID NO: 36068 - DNA, 15 bp, Homo sapiens
  chr3:145878854-145878869
  hyper
cgggtccgccctgag

SEQ ID NO: 36069 - DNA, 44 bp, Homo sapiens; identical to SEQ ID NO: 1596
  chr3:145879058-145879102
  hyper

SEQ ID NO: 36070 - DNA, 36 bp, Homo sapiens; identical to SEQ ID NO: 1597
  chr3:148710030-148710066
  hyper

SEQ ID NO: 36071 - DNA, 31 bp, Homo sapiens; identical to SEQ ID NO: 1598
  chr3:148710176-148710207
  hyper

SEQ ID NO: 36072 - DNA, 53 bp, Homo sapiens; identical to SEQ ID NO: 1599
  chr3:150321029-150321082
  hyper

SEQ ID NO: 36073 - DNA, 2 bp, Homo sapiens
  chr3:150505713-150505715
  hyper
ct

SEQ ID NO: 36074 - DNA, 78 bp, Homo sapiens; identical to SEQ ID NO: 1602
  chr3:156799360-156799438
  hyper

SEQ ID NO: 36075 - DNA, 31 bp, Homo sapiens; identical to SEQ ID NO: 1603
  chr3:156799497-156799528
  hyper

SEQ ID NO: 36076 - DNA, 2 bp, Homo sapiens
  chr3:157815888-157815890
  hyper
gt

SEQ ID NO: 36077 - DNA, 48 bp, Homo sapiens
  chr3:157815923-157815971
  hyper
ggcggaagccgaatccgcggccagcgtggcgagcggcagtccgaaggg

SEQ ID NO: 36078 - DNA, 159 bp, Homo sapiens; identical to SEQ ID NO: 1606
  chr3:160472595-160472754
  hyper

SEQ ID NO: 36079 - DNA, 268 bp, Homo sapiens; identical to SEQ ID NO: 1607
  chr3:160472764-160473032
  hyper

SEQ ID NO: 36080 - DNA, 62 bp, Homo sapiens; identical to SEQ ID NO: 1608
  chr3:160473172-160473234
  hyper

SEQ ID NO: 36081 - DNA, 96 bp, Homo sapiens; identical to SEQ ID NO: 1609
  chr3:160473309-160473405
  hyper

SEQ ID NO: 36082 - DNA, 216 bp, Homo sapiens; identical to SEQ ID NO: 1610
  chr3:160473409-160473625
  hyper

SEQ ID NO: 36083 - DNA, 31 bp, Homo sapiens; identical to SEQ ID NO: 1611
  chr3:160473642-160473673
  hyper

SEQ ID NO: 36084 - DNA, 34 bp, Homo sapiens; identical to SEQ ID NO: 1612
  chr3:160473774-160473808
  hyper

SEQ ID NO: 36085 - DNA, 91 bp, Homo sapiens; identical to SEQ ID NO: 1613
  chr3:160473982-160474073
  hyper

SEQ ID NO: 36086 - DNA, 31 bp, Homo sapiens; identical to SEQ ID NO: 1614
  chr3:160822406-160822437
  hyper

SEQ ID NO: 36087 - DNA, 35 bp, Homo sapiens; identical to SEQ ID NO: 1615
  chr3:164924699-164924734
  hyper

SEQ ID NO: 36088 - DNA, 76 bp, Homo sapiens; identical to SEQ ID NO: 1616
  chr3:164924742-164924818
  hyper

SEQ ID NO: 36089 - DNA, 31 bp, Homo sapiens; identical to SEQ ID NO: 1617
  chr3:168754776-168754807
  hyper

SEQ ID NO: 36090 - DNA, 65 bp, Homo sapiens; identical to SEQ ID NO: 1624
  chr3:169386972-169387037
  hyper

SEQ ID NO: 36091 - DNA, 51 bp, Homo sapiens; identical to SEQ ID NO: 1625
  chr3:169482234-169482285
  hyper

SEQ ID NO: 36092 - DNA, 88 bp, Homo sapiens
  chr3:169482322-169482410
  hyper
cacaagcccccattgccggcgaggggtgacggatgcgcacgatcggcgttccccccaccaacaggaaagcgaactgcatgtgtgagcc

SEQ ID NO: 36093 - DNA, 44 bp, Homo sapiens
  chr3:169482439-169482483
  hyper
ggaatcgcgccgcgcgcggggactcgctccgttcctcttcctgc

SEQ ID NO: 36094 - DNA, 57 bp, Homo sapiens; identical to SEQ ID NO: 1627
  chr3:169482613-169482670
  hyper

SEQ ID NO: 36095 - DNA, 2 bp, Homo sapiens
  chr3:169482679-169482681
  hyper
tt

SEQ ID NO: 36096 - DNA, 31 bp, Homo sapiens; identical to SEQ ID NO: 1630
  chr3:170074249-170074280
  hyper

SEQ ID NO: 36097 - DNA, 50 bp, Homo sapiens; identical to SEQ ID NO: 1631
  chr3:170074283-170074333
  hyper

SEQ ID NO: 36098 - DNA, 36 bp, Homo sapiens; identical to SEQ ID NO: 1632
  chr3:170074334-170074370
  hyper

SEQ ID NO: 36099 - DNA, 31 bp, Homo sapiens; identical to SEQ ID NO: 1633
  chr3:170819237-170819268
  hyper

SEQ ID NO: 36100 - DNA, 80 bp, Homo sapiens; identical to SEQ ID NO: 1634
  chr3:170878636-170878716
  hyper

SEQ ID NO: 36101 - DNA, 62 bp, Homo sapiens; identical to SEQ ID NO: 1635
  chr3:170878774-170878836
  hyper

SEQ ID NO: 36102 - DNA, 89 bp, Homo sapiens; identical to SEQ ID NO: 1636
  chr3:171527743-171527832
  hyper

SEQ ID NO: 36103 - DNA, 100 bp, Homo sapiens; identical to SEQ ID NO: 1638
  chr3:171528335-171528435
  hyper

SEQ ID NO: 36104 - DNA, 73 bp, Homo sapiens; identical to SEQ ID NO: 1639
  chr3:171528475-171528548
  hyper

SEQ ID NO: 36105 - DNA, 31 bp, Homo sapiens; identical to SEQ ID NO: 1640
  chr3:171758578-171758609
  hyper

SEQ ID NO: 36106 - DNA, 62 bp, Homo sapiens; identical to SEQ ID NO: 1641
  chr3:174158580-174158642
  hyper

SEQ ID NO: 36107 - DNA, 88 bp, Homo sapiens; identical to SEQ ID NO: 1642
  chr3:174158754-174158842
  hyper

SEQ ID NO: 36108 - DNA, 163 bp, Homo sapiens; identical to SEQ ID NO: 1643
  chr3:174158852-174159015
  hyper

SEQ ID NO: 36109 - DNA, 97 bp, Homo sapiens; identical to SEQ ID NO: 1644
  chr3:174159124-174159221
  hyper

SEQ ID NO: 36110 - DNA, 31 bp, Homo sapiens; identical to SEQ ID NO: 1645
  chr3:176915777-176915808
  hyper

SEQ ID NO: 36111 - DNA, 31 bp, Homo sapiens; identical to SEQ ID NO: 1646
  chr3:177077212-177077243
  hyper

SEQ ID NO: 36112 - DNA, 43 bp, Homo sapiens; identical to SEQ ID NO: 1647
  chr3:178789081-178789124
  hyper

SEQ ID NO: 36113 - DNA, 31 bp, Homo sapiens; identical to SEQ ID NO: 1652
  chr3:181433615-181433646
  hyper

SEQ ID NO: 36114 - DNA, 2 bp, Homo sapiens
  chr3:181438166-181438168
  hyper
tg

SEQ ID NO: 36115 - DNA, 101 bp, Homo sapiens; identical to SEQ ID NO: 1655
  chr3:183165243-183165344
  hyper

SEQ ID NO: 36116 - DNA, 31 bp, Homo sapiens; identical to SEQ ID NO: 1656
  chr3:183165349-183165380
  hyper

SEQ ID NO: 36117 - DNA, 31 bp, Homo sapiens; identical to SEQ ID NO: 1657
  chr3:183602889-183602920
  hyper

SEQ ID NO: 36118 - DNA, 7 bp, Homo sapiens
  chr3:183676020-183676027
  hyper
tgtgtat

SEQ ID NO: 36119 - DNA, 31 bp, Homo sapiens; identical to SEQ ID NO: 1660
  chr3:183736077-183736108
  hyper

SEQ ID NO: 36120 - DNA, 31 bp, Homo sapiens; identical to SEQ ID NO: 1661
  chr3:183851914-183851945
  hyper

SEQ ID NO: 36121 - DNA, 31 bp, Homo sapiens; identical to SEQ ID NO: 1662
  chr3:184097687-184097718
  hyper

SEQ ID NO: 36122 - DNA, 45 bp, Homo sapiens; identical to SEQ ID NO: 1663
  chr3:184097867-184097912
  hyper

SEQ ID NO: 36123 - DNA, 71 bp, Homo sapiens; identical to SEQ ID NO: 1664
  chr3:184098371-184098442
  hyper

SEQ ID NO: 36124 - DNA, 31 bp, Homo sapiens; identical to SEQ ID NO: 1665
  chr3:184279244-184279275
  hyper

SEQ ID NO: 36125 - DNA, 31 bp, Homo sapiens; identical to SEQ ID NO: 1666
  chr3:184279783-184279814
  hyper

SEQ ID NO: 36126 - DNA, 25 bp, Homo sapiens
  chr3:184279929-184279954
  hyper
gcccgccgagcgcaccctctctcgg

SEQ ID NO: 36127 - DNA, 76 bp, Homo sapiens; identical to SEQ ID NO: 1668
  chr3:184280002-184280078
  hyper

SEQ ID NO: 36128 - DNA, 8 bp, Homo sapiens
  chr3:184280222-184280230
  hyper
gattgagc

SEQ ID NO: 36129 - DNA, 31 bp, Homo sapiens; identical to SEQ ID NO: 1670
  chr3:185541178-185541209
  hyper

SEQ ID NO: 36130 - DNA, 123 bp, Homo sapiens; identical to SEQ ID NO: 1671
  chr3:185541309-185541432
  hyper

SEQ ID NO: 36131 - DNA, 38 bp, Homo sapiens; identical to SEQ ID NO: 1672
  chr3:185541794-185541832
  hyper

SEQ ID NO: 36132 - DNA, 31 bp, Homo sapiens; identical to SEQ ID NO: 1673
  chr3:185541901-185541932
  hyper

SEQ ID NO: 36133 - DNA, 43 bp, Homo sapiens; identical to SEQ ID NO: 1674
  chr3:185542333-185542376
  hyper

SEQ ID NO: 36134 - DNA, 190 bp, Homo sapiens; identical to SEQ ID NO: 1675
  chr3:185542380-185542570
  hyper

SEQ ID NO: 36135 - DNA, 101 bp, Homo sapiens; identical to SEQ ID NO: 1676
  chr3:185543411-185543512
  hyper

SEQ ID NO: 36136 - DNA, 31 bp, Homo sapiens; identical to SEQ ID NO: 1680
  chr3:186079334-186079365
  hyper

SEQ ID NO: 36137 - DNA, 31 bp, Homo sapiens; identical to SEQ ID NO: 1681
  chr3:186079400-186079431
  hyper

SEQ ID NO: 36138 - DNA, 42 bp, Homo sapiens; identical to SEQ ID NO: 1682
  chr3:186079436-186079478
  hyper

SEQ ID NO: 36139 - DNA, 85 bp, Homo sapiens; identical to SEQ ID NO: 1683
  chr3:186079481-186079566
  hyper

SEQ ID NO: 36140 - DNA, 44 bp, Homo sapiens
  chr3:186079578-186079622
  hyper
tggcaggtggaactgtcggggtgggcgccgtggctttggctgca

SEQ ID NO: 36141 - DNA, 28 bp, Homo sapiens
  chr3:187455315-187455343
  hyper
caaacaccagccctgcgcgccggggcaa

SEQ ID NO: 36142 - DNA, 31 bp, Homo sapiens; identical to SEQ ID NO: 1705
  chr3:187456764-187456795
  hyper

SEQ ID NO: 36143 - DNA, 46 bp, Homo sapiens; identical to SEQ ID NO: 1706
  chr3:187456797-187456843
  hyper

SEQ ID NO: 36144 - DNA, 71 bp, Homo sapiens; identical to SEQ ID NO: 1707
  chr3:187457038-187457109
  hyper

SEQ ID NO: 36145 - DNA, 2 bp, Homo sapiens
  chr3:187457111-187457113
  hyper
ca

SEQ ID NO: 36146 - DNA, 239 bp, Homo sapiens; identical to SEQ ID NO: 1710
  chr3:187457740-187457979
  hyper

SEQ ID NO: 36147 - DNA, 39 bp, Homo sapiens; identical to SEQ ID NO: 1711
  chr3:187458016-187458055
  hyper

SEQ ID NO: 36148 - DNA, 31 bp, Homo sapiens; identical to SEQ ID NO: 1712
  chr3:187461986-187462017
  hyper

SEQ ID NO: 36149 - DNA, 174 bp, Homo sapiens; identical to SEQ ID NO: 1713
  chr3:187462563-187462737
  hyper

SEQ ID NO: 36150 - DNA, 73 bp, Homo sapiens; identical to SEQ ID NO: 1714
  chr3:187462739-187462812
  hyper

SEQ ID NO: 36151 - DNA, 70 bp, Homo sapiens; identical to SEQ ID NO: 1715
  chr3:187463099-187463169
  hyper

SEQ ID NO: 36152 - DNA, 81 bp, Homo sapiens; identical to SEQ ID NO: 1716
  chr3:192635695-192635776
  hyper

SEQ ID NO: 36153 - DNA, 31 bp, Homo sapiens; identical to SEQ ID NO: 1717
  chr3:192635875-192635906
  hyper

SEQ ID NO: 36154 - DNA, 59 bp, Homo sapiens; identical to SEQ ID NO: 1718
  chr3:192635921-192635980
  hyper

SEQ ID NO: 36155 - DNA, 60 bp, Homo sapiens; identical to SEQ ID NO: 1719
  chr3:192636007-192636067
  hyper

SEQ ID NO: 36156 - DNA, 31 bp, Homo sapiens; identical to SEQ ID NO: 1720
  chr3:193721400-193721431
  hyper

SEQ ID NO: 36157 - DNA, 31 bp, Homo sapiens; identical to SEQ ID NO: 1721
  chr3:193721460-193721491
  hyper

SEQ ID NO: 36158 - DNA, 41 bp, Homo sapiens; identical to SEQ ID NO: 1722
  chr3:193721503-193721544
  hyper

SEQ ID NO: 36159 - DNA, 31 bp, Homo sapiens; identical to SEQ ID NO: 1723
  chr3:193721576-193721607
  hyper

SEQ ID NO: 36160 - DNA, 31 bp, Homo sapiens; identical to SEQ ID NO: 1724
  chr3:193852179-193852210
  hyper

SEQ ID NO: 36161 - DNA, 70 bp, Homo sapiens; identical to SEQ ID NO: 1725
  chr3:193852643-193852713
  hyper

SEQ ID NO: 36162 - DNA, 31 bp, Homo sapiens; identical to SEQ ID NO: 1726
  chr3:193853961-193853992
  hyper

SEQ ID NO: 36163 - DNA, 31 bp, Homo sapiens; identical to SEQ ID NO: 1727
  chr3:193854340-193854371
  hyper

SEQ ID NO: 36164 - DNA, 31 bp, Homo sapiens; identical to SEQ ID NO: 1728
  chr3:193854613-193854644
  hyper

SEQ ID NO: 36165 - DNA, 110 bp, Homo sapiens; identical to SEQ ID NO: 1731
  chr3:194353931-194354041
  hyper

SEQ ID NO: 36166 - DNA, 42 bp, Homo sapiens; identical to SEQ ID NO: 1732
  chr3:194354210-194354252
  hyper

SEQ ID NO: 36167 - DNA, 42 bp, Homo sapiens; identical to SEQ ID NO: 1733
  chr3:194354405-194354447
  hyper

SEQ ID NO: 36168 - DNA, 42 bp, Homo sapiens; identical to SEQ ID NO: 1734
  chr3:194354461-194354503
  hyper

SEQ ID NO: 36169 - DNA, 31 bp, Homo sapiens; identical to SEQ ID NO: 1739
  chr3:194602924-194602955
  hyper

SEQ ID NO: 36170 - DNA, 80 bp, Homo sapiens; identical to SEQ ID NO: 1740
  chr3:194980431-194980511
  hyper

SEQ ID NO: 36171 - DNA, 31 bp, Homo sapiens; identical to SEQ ID NO: 1741
  chr3:195809081-195809112
  hyper

SEQ ID NO: 36172 - DNA, 37 bp, Homo sapiens; identical to SEQ ID NO: 1742
  chr3:197222651-197222688
  hyper

SEQ ID NO: 36173 - DNA, 31 bp, Homo sapiens; identical to SEQ ID NO: 1743
  chr3:197222713-197222744
  hyper

SEQ ID NO: 36174 - DNA, 39 bp, Homo sapiens; identical to SEQ ID NO: 1744
  chr4:667539-667578
  hyper

SEQ ID NO: 36175 - DNA, 55 bp, Homo sapiens; identical to SEQ ID NO: 1745
  chr4:667711-667766
  hyper

SEQ ID NO: 36176 - DNA, 31 bp, Homo sapiens; identical to SEQ ID NO: 1746
  chr4:699369-699400
  hyper

SEQ ID NO: 36177 - DNA, 31 bp, Homo sapiens; identical to SEQ ID NO: 1747
  chr4:781538-781569
  hyper

SEQ ID NO: 36178 - DNA, 134 bp, Homo sapiens; identical to SEQ ID NO: 1748
  chr4:819436-819570
  hyper

SEQ ID NO: 36179 - DNA, 45 bp, Homo sapiens; identical to SEQ ID NO: 1749
  chr4:819689-819734
  hyper

SEQ ID NO: 36180 - DNA, 31 bp, Homo sapiens; identical to SEQ ID NO: 1750
  chr4:966932-966963
  hyper

SEQ ID NO: 36181 - DNA, 31 bp, Homo sapiens; identical to SEQ ID NO: 1751
  chr4:966986-967017
  hyper

SEQ ID NO: 36182 - DNA, 34 bp, Homo sapiens; identical to SEQ ID NO: 1752
  chr4:967208-967242
  hyper

SEQ ID NO: 36183 - DNA, 31 bp, Homo sapiens; identical to SEQ ID NO: 1753
  chr4:1004428-1004459
  hyper

SEQ ID NO: 36184 - DNA, 31 bp, Homo sapiens; identical to SEQ ID NO: 1754
  chr4:1004480-1004511
  hyper

SEQ ID NO: 36185 - DNA, 51 bp, Homo sapiens; identical to SEQ ID NO: 1755
  chr4:1004572-1004623
  hyper

SEQ ID NO: 36186 - DNA, 31 bp, Homo sapiens; identical to SEQ ID NO: 1756
  chr4:1036591-1036622
  hyper

SEQ ID NO: 36187 - DNA, 31 bp, Homo sapiens; identical to SEQ ID NO: 1757
  chr4:1310814-1310845
  hyper

SEQ ID NO: 36188 - DNA, 55 bp, Homo sapiens
  chr4:1332660-1332715
  hyper
tagcttcgttcgaaatggatgaaggggtgggaaggacaggcgaggtggccccggg

SEQ ID NO: 36189 - DNA, 84 bp, Homo sapiens; identical to SEQ ID NO: 1761
  chr4:1794972-1795056
  hyper

SEQ ID NO: 36190 - DNA, 172 bp, Homo sapiens; identical to SEQ ID NO: 1762
  chr4:1795075-1795247
  hyper

SEQ ID NO: 36191 - DNA, 31 bp, Homo sapiens; identical to SEQ ID NO: 1763
  chr4:1795283-1795314
  hyper

SEQ ID NO: 36192 - DNA, 35 bp, Homo sapiens; identical to SEQ ID NO: 1764
  chr4:1795555-1795590
  hyper

SEQ ID NO: 36193 - DNA, 526 bp, Homo sapiens
  chr4:1795964-1796490
  hyper
agctaccctccaagtgcgaggccaccacggggagccaggctgggggttggcgtccgcagccccgatcccctgcgactccctagccctggcctgtcgggagggcgcggggggccccatttccacgattcccgctgttgttattcgggttctgcgcagacggaaagttcccattgttggcgtccccctcccccgggccccagtttgtggccagcttcggccaaggcgagagaccggacttctaagggtgggtgtgcgcgtcagcgaagcccggcccctgcccgcccgaagaggcagcagcctccagcgtccccgctgccgaccctgcccctgcctgggggccgagggcgcttccccgtgggtgcgcgccgagctccaggcaagcgaggggcgcgtgtcccagcgtcgcgggccctagactgggctggcggtccaggtcccgcgggacgtcgagggtctgaagggaggtcccaaggggcgaggggaggggaaggggcgcccggccggacctgcacacgcgccgcggttc

SEQ ID NO: 36194 - DNA, 26 bp, Homo sapiens
  chr4:1796598-1796624
  hyper
aggccttggcccggtgagctcgcgcc

SEQ ID NO: 36195 - DNA, 124 bp, Homo sapiens; identical to SEQ ID NO: 1766
  chr4:1796721-1796845
  hyper

SEQ ID NO: 36196 - DNA, 165 bp, Homo sapiens; identical to SEQ ID NO: 1767
  chr4:1796851-1797016
  hyper

SEQ ID NO: 36197 - DNA, 31 bp, Homo sapiens; identical to SEQ ID NO: 1768
  chr4:1797019-1797050
  hyper

SEQ ID NO: 36198 - DNA, 31 bp, Homo sapiens; identical to SEQ ID NO: 1769
  chr4:1797114-1797145
  hyper

SEQ ID NO: 36199 - DNA, 40 bp, Homo sapiens
  chr4:2418949-2418989
  hyper
ccaagatctcagggcccgggcctccccgctgcgccggccc

SEQ ID NO: 36200 - DNA, 100 bp, Homo sapiens; identical to SEQ ID NO: 1771
  chr4:2419163-2419263
  hyper

SEQ ID NO: 36201 - DNA, 59 bp, Homo sapiens; identical to SEQ ID NO: 1772
  chr4:2419276-2419335
  hyper

SEQ ID NO: 36202 - DNA, 78 bp, Homo sapiens; identical to SEQ ID NO: 1773
  chr4:2419346-2419424
  hyper

SEQ ID NO: 36203 - DNA, 31 bp, Homo sapiens; identical to SEQ ID NO: 1774
  chr4:2419565-2419596
  hyper

SEQ ID NO: 36204 - DNA, 129 bp, Homo sapiens; identical to SEQ ID NO: 1775
  chr4:2419603-2419732
  hyper

SEQ ID NO: 36205 - DNA, 34 bp, Homo sapiens; identical to SEQ ID NO: 1776
  chr4:2419869-2419903
  hyper

SEQ ID NO: 36206 - DNA, 31 bp, Homo sapiens; identical to SEQ ID NO: 1777
  chr4:2760070-2760101
  hyper

SEQ ID NO: 36207 - DNA, 31 bp, Homo sapiens; identical to SEQ ID NO: 1778
  chr4:3573649-3573680
  hyper

SEQ ID NO: 36208 - DNA, 37 bp, Homo sapiens; identical to SEQ ID NO: 1780
  chr4:6271358-6271395
  hyper

SEQ ID NO: 36209 - DNA, 39 bp, Homo sapiens; identical to SEQ ID NO: 1781
  chr4:6271572-6271611
  hyper

SEQ ID NO: 36210 - DNA, 52 bp, Homo sapiens; identical to SEQ ID NO: 1782
  chr4:6271619-6271671
  hyper

SEQ ID NO: 36211 - DNA, 248 bp, Homo sapiens; identical to SEQ ID NO: 1783
  chr4:6271702-6271950
  hyper

SEQ ID NO: 36212 - DNA, 39 bp, Homo sapiens; identical to SEQ ID NO: 1784
  chr4:6271974-6272013
  hyper

SEQ ID NO: 36213 - DNA, 31 bp, Homo sapiens; identical to SEQ ID NO: 1785
  chr4:6272024-6272055
  hyper

SEQ ID NO: 36214 - DNA, 31 bp, Homo sapiens; identical to SEQ ID NO: 1786
  chr4:6272150-6272181
  hyper

SEQ ID NO: 36215 - DNA, 123 bp, Homo sapiens; identical to SEQ ID NO: 1787
  chr4:6717791-6717914
  hyper

SEQ ID NO: 36216 - DNA, 31 bp, Homo sapiens; identical to SEQ ID NO: 1788
  chr4:6989299-6989330
  hyper

SEQ ID NO: 36217 - DNA, 31 bp, Homo sapiens; identical to SEQ ID NO: 1789
  chr4:7940409-7940440
  hyper

SEQ ID NO: 36218 - DNA, 31 bp, Homo sapiens; identical to SEQ ID NO: 1790
  chr4:7940595-7940626
  hyper

SEQ ID NO: 36219 - DNA, 40 bp, Homo sapiens; identical to SEQ ID NO: 1791
  chr4:7940749-7940789
  hyper

SEQ ID NO: 36220 - DNA, 119 bp, Homo sapiens; identical to SEQ ID NO: 1792
  chr4:7941594-7941713
  hyper

SEQ ID NO: 36221 - DNA, 120 bp, Homo sapiens; identical to SEQ ID NO: 1793
  chr4:8159728-8159848
  hyper

SEQ ID NO: 36222 - DNA, 39 bp, Homo sapiens; identical to SEQ ID NO: 1794
  chr4:8160029-8160068
  hyper

SEQ ID NO: 36223 - DNA, 200 bp, Homo sapiens; identical to SEQ ID NO: 1795
  chr4:8160071-8160271
  hyper

SEQ ID NO: 36224 - DNA, 76 bp, Homo sapiens; identical to SEQ ID NO: 1796
  chr4:8160278-8160354
  hyper

SEQ ID NO: 36225 - DNA, 85 bp, Homo sapiens; identical to SEQ ID NO: 1797
  chr4:8160485-8160570
  hyper

SEQ ID NO: 36226 - DNA, 35 bp, Homo sapiens; identical to SEQ ID NO: 1799
  chr4:8594317-8594352
  hyper

SEQ ID NO: 36227 - DNA, 26 bp, Homo sapiens
  chr4:8594372-8594398
  hyper
cctcctcctcccccagcggcatcctc

SEQ ID NO: 36228 - DNA, 106 bp, Homo sapiens; identical to SEQ ID NO: 1801
  chr4:9534313-9534419
  hyper

SEQ ID NO: 36229 - DNA, 57 bp, Homo sapiens; identical to SEQ ID NO: 1802
  chr4:10090132-10090189
  hyper

SEQ ID NO: 36230 - DNA, 47 bp, Homo sapiens; identical to SEQ ID NO: 1803
  chr4:10090202-10090249
  hyper

SEQ ID NO: 36231 - DNA, 31 bp, Homo sapiens; identical to SEQ ID NO: 1804
  chr4:10090276-10090307
  hyper

SEQ ID NO: 36232 - DNA, 31 bp, Homo sapiens; identical to SEQ ID NO: 1805
  chr4:10577054-10577085
  hyper

SEQ ID NO: 36233 - DNA, 31 bp, Homo sapiens; identical to SEQ ID NO: 1811
  chr4:22516749-22516780
  hyper

SEQ ID NO: 36234 - DNA, 118 bp, Homo sapiens; identical to SEQ ID NO: 1812
  chr4:22517213-22517331
  hyper

SEQ ID NO: 36235 - DNA, 94 bp, Homo sapiens; identical to SEQ ID NO: 1813
  chr4:22517554-22517648
  hyper

SEQ ID NO: 36236 - DNA, 40 bp, Homo sapiens; identical to SEQ ID NO: 1814
  chr4:22517719-22517759
  hyper

SEQ ID NO: 36237 - DNA, 2 bp, Homo sapiens
  chr4:26030404-26030406
  hyper
gg

SEQ ID NO: 36238 - DNA, 146 bp, Homo sapiens
  chr4:37455285-37455431
  hyper
ttcccgtgatggcaggcggttggcgcggtcgtttgtgctcagaggccaacaagcgcgtggattttctgcttcagtgcgcccgggactgccaccccggccccggggatgtcggacatcgtactccagggtttcgagccctagccccg

SEQ ID NO: 36239 - DNA, 31 bp, Homo sapiens; identical to SEQ ID NO: 1818
  chr4:37688563-37688594
  hyper

SEQ ID NO: 36240 - DNA, 55 bp, Homo sapiens; identical to SEQ ID NO: 1819
  chr4:37688595-37688650
  hyper

SEQ ID NO: 36241 - DNA, 31 bp, Homo sapiens; identical to SEQ ID NO: 1820
  chr4:38098758-38098789
  hyper

SEQ ID NO: 36242 - DNA, 1 bp, Homo sapiens
  chr4:38732941-38732942
  hyper
a

SEQ ID NO: 36243 - DNA, 31 bp, Homo sapiens; identical to SEQ ID NO: 1822
  chr4:38868923-38868954
  hyper

SEQ ID NO: 36244 - DNA, 31 bp, Homo sapiens; identical to SEQ ID NO: 1823
  chr4:38868972-38869003
  hyper

SEQ ID NO: 36245 - DNA, 57 bp, Homo sapiens; identical to SEQ ID NO: 1824
  chr4:38869019-38869076
  hyper

SEQ ID NO: 36246 - DNA, 31 bp, Homo sapiens; identical to SEQ ID NO: 1825
  chr4:38869082-38869113
  hyper

SEQ ID NO: 36247 - DNA, 31 bp, Homo sapiens; identical to SEQ ID NO: 1826
  chr4:38869203-38869234
  hyper

SEQ ID NO: 36248 - DNA, 53 bp, Homo sapiens; identical to SEQ ID NO: 1827
  chr4:38869245-38869298
  hyper

SEQ ID NO: 36249 - DNA, 43 bp, Homo sapiens; identical to SEQ ID NO: 1828
  chr4:38869437-38869480
  hyper

SEQ ID NO: 36250 - DNA, 51 bp, Homo sapiens; identical to SEQ ID NO: 1829
  chr4:38869487-38869538
  hyper

SEQ ID NO: 36251 - DNA, 62 bp, Homo sapiens; identical to SEQ ID NO: 1832
  chr4:39529829-39529891
  hyper

SEQ ID NO: 36252 - DNA, 51 bp, Homo sapiens; identical to SEQ ID NO: 1833
  chr4:39529893-39529944
  hyper

SEQ ID NO: 36253 - DNA, 54 bp, Homo sapiens; identical to SEQ ID NO: 1834
  chr4:40631724-40631778
  hyper

SEQ ID NO: 36254 - DNA, 31 bp, Homo sapiens; identical to SEQ ID NO: 1835
  chr4:41003481-41003512
  hyper

SEQ ID NO: 36255 - DNA, 31 bp, Homo sapiens; identical to SEQ ID NO: 1836
  chr4:41168397-41168428
  hyper

SEQ ID NO: 36256 - DNA, 37 bp, Homo sapiens; identical to SEQ ID NO: 1837
  chr4:41216264-41216301
  hyper

SEQ ID NO: 36257 - DNA, 69 bp, Homo sapiens; identical to SEQ ID NO: 1838
  chr4:41216334-41216403
  hyper

SEQ ID NO: 36258 - DNA, 119 bp, Homo sapiens; identical to SEQ ID NO: 1839
  chr4:41218382-41218501
  hyper

SEQ ID NO: 36259 - DNA, 31 bp, Homo sapiens; identical to SEQ ID NO: 1840
  chr4:41218544-41218575
  hyper

SEQ ID NO: 36260 - DNA, 31 bp, Homo sapiens; identical to SEQ ID NO: 1843
  chr4:41991960-41991991
  hyper

SEQ ID NO: 36261 - DNA, 31 bp, Homo sapiens; identical to SEQ ID NO: 1849
  chr4:42658119-42658150
  hyper

SEQ ID NO: 36262 - DNA, 92 bp, Homo sapiens; identical to SEQ ID NO: 1850
  chr4:52710792-52710884
  hyper

SEQ ID NO: 36263 - DNA, 176 bp, Homo sapiens; identical to SEQ ID NO: 1851
  chr4:52710910-52711086
  hyper

SEQ ID NO: 36264 - DNA, 35 bp, Homo sapiens; identical to SEQ ID NO: 1852
  chr4:56412389-56412424
  hyper

SEQ ID NO: 36265 - DNA, 31 bp, Homo sapiens; identical to SEQ ID NO: 1866
  chr4:74964664-74964695
  hyper

SEQ ID NO: 36266 - DNA, 2 bp, Homo sapiens
  chr4:75230456-75230458
  hyper
ag

SEQ ID NO: 36267 - DNA, 31 bp, Homo sapiens; identical to SEQ ID NO: 1868
  chr4:77172533-77172564
  hyper

SEQ ID NO: 36268 - DNA, 60 bp, Homo sapiens; identical to SEQ ID NO: 1869
  chr4:77172571-77172631
  hyper

SEQ ID NO: 36269 - DNA, 55 bp, Homo sapiens; identical to SEQ ID NO: 1870
  chr4:77172887-77172942
  hyper

SEQ ID NO: 36270 - DNA, 53 bp, Homo sapiens; identical to SEQ ID NO: 1871
  chr4:77173102-77173155
  hyper

SEQ ID NO: 36271 - DNA, 79 bp, Homo sapiens; identical to SEQ ID NO: 1872
  chr4:77227313-77227392
  hyper

SEQ ID NO: 36272 - DNA, 49 bp, Homo sapiens
  chr4:77227425-77227474
  hyper
agttccaggaagctctcggcctctagctgaccgcgttgctgctgagctt

SEQ ID NO: 36273 - DNA, 31 bp, Homo sapiens
  chr4:77227525-77227556
  hyper
cctcgcgggcagcaggcggaagaaggaaggg

SEQ ID NO: 36274 - DNA, 176 bp, Homo sapiens; identical to SEQ ID NO: 1875
  chr4:77227594-77227770
  hyper

SEQ ID NO: 36275 - DNA, 139 bp, Homo sapiens; identical to SEQ ID NO: 1876
  chr4:77227806-77227945
  hyper

SEQ ID NO: 36276 - DNA, 61 bp, Homo sapiens; identical to SEQ ID NO: 1877
  chr4:77227950-77228011
  hyper

SEQ ID NO: 36277 - DNA, 55 bp, Homo sapiens; identical to SEQ ID NO: 1879
  chr4:77610433-77610488
  hyper

SEQ ID NO: 36278 - DNA, 112 bp, Homo sapiens; identical to SEQ ID NO: 1880
  chr4:77818484-77818596
  hyper

SEQ ID NO: 36279 - DNA, 59 bp, Homo sapiens
  chr4:77818599-77818658
  hyper
ctgctggctcctcctccggctccttctcgcgccgccgccgcctgggctgctgctggggc

SEQ ID NO: 36280 - DNA, 31 bp, Homo sapiens; identical to SEQ ID NO: 1885
  chr4:78979328-78979359
  hyper

SEQ ID NO: 36281 - DNA, 53 bp, Homo sapiens; identical to SEQ ID NO: 1886
  chr4:78979945-78979998
  hyper

SEQ ID NO: 36282 - DNA, 282 bp, Homo sapiens; identical to SEQ ID NO: 1887
  chr4:78980026-78980308
  hyper

SEQ ID NO: 36283 - DNA, 42 bp, Homo sapiens; identical to SEQ ID NO: 1888
  chr4:82965289-82965331
  hyper

SEQ ID NO: 36284 - DNA, 44 bp, Homo sapiens; identical to SEQ ID NO: 1889
  chr4:84292569-84292613
  hyper

SEQ ID NO: 36285 - DNA, 31 bp, Homo sapiens; identical to SEQ ID NO: 1891
  chr4:84456994-84457025
  hyper

SEQ ID NO: 36286 - DNA, 62 bp, Homo sapiens; identical to SEQ ID NO: 1892
  chr4:84457106-84457168
  hyper

SEQ ID NO: 36287 - DNA, 31 bp, Homo sapiens; identical to SEQ ID NO: 1893
  chr4:84457174-84457205
  hyper

SEQ ID NO: 36288 - DNA, 33 bp, Homo sapiens; identical to SEQ ID NO: 1895
  chr4:85503985-85504018
  hyper

SEQ ID NO: 36289 - DNA, 166 bp, Homo sapiens; identical to SEQ ID NO: 1896
  chr4:85504057-85504223
  hyper

SEQ ID NO: 36290 - DNA, 12 bp, Homo sapiens
  chr4:85504224-85504236
  hyper
cctacctgggcc

SEQ ID NO: 36291 - DNA, 150 bp, Homo sapiens; identical to SEQ ID NO: 1898
  chr4:85886792-85886942
  hyper

SEQ ID NO: 36292 - DNA, 117 bp, Homo sapiens
  chr4:85887200-85887317
  hyper
acagcagctgggccgcggcctgtccctagggggagcgggcgcagggccgcgagtgggcagcgcctccgccccgcacgaacaaagcggccaggcgcgccgggccgaggcagcaccgcc

SEQ ID NO: 36293 - DNA, 98 bp, Homo sapiens; identical to SEQ ID NO: 1900
  chr4:85887394-85887492
  hyper

SEQ ID NO: 36294 - DNA, 92 bp, Homo sapiens; identical to SEQ ID NO: 1901
  chr4:85887500-85887592
  hyper

SEQ ID NO: 36295 - DNA, 68 bp, Homo sapiens; identical to SEQ ID NO: 1902
  chr4:85887625-85887693
  hyper

SEQ ID NO: 36296 - DNA, 35 bp, Homo sapiens; identical to SEQ ID NO: 1903
  chr4:85888137-85888172
  hyper

SEQ ID NO: 36297 - DNA, 31 bp, Homo sapiens; identical to SEQ ID NO: 1904
  chr4:85888431-85888462
  hyper

SEQ ID NO: 36298 - DNA, 121 bp, Homo sapiens; identical to SEQ ID NO: 1910
  chr4:87813157-87813278
  hyper

SEQ ID NO: 36299 - DNA, 43 bp, Homo sapiens; identical to SEQ ID NO: 1911
  chr4:87813291-87813334
  hyper

SEQ ID NO: 36300 - DNA, 83 bp, Homo sapiens
  chr4:87813338-87813421
  hyper
ggccccaccctgcctccgactcgccaggaatgcgctgtgtgcgcggggcttccagggtggcgggtccccgcgagccggcgccg

SEQ ID NO: 36301 - DNA, 96 bp, Homo sapiens
  chr4:87813512-87813608
  hyper
acacgcctcggggccgcgccgcaggcacacgcctccttcccgctcgccgcgggcgccgagtctggggctcctcgcgtcacacgggagcctcaacaa

SEQ ID NO: 36302 - DNA, 114 bp, Homo sapiens; identical to SEQ ID NO: 1914
  chr4:87813617-87813731
  hyper

SEQ ID NO: 36303 - DNA, 31 bp, Homo sapiens; identical to SEQ ID NO: 1915
  chr4:87813756-87813787
  hyper

SEQ ID NO: 36304 - DNA, 130 bp, Homo sapiens; identical to SEQ ID NO: 1916
  chr4:87856810-87856940
  hyper

SEQ ID NO: 36305 - DNA, 31 bp, Homo sapiens; identical to SEQ ID NO: 1917
  chr4:87856964-87856995
  hyper

SEQ ID NO: 36306 - DNA, 95 bp, Homo sapiens; identical to SEQ ID NO: 1918
  chr4:87857014-87857109
  hyper

SEQ ID NO: 36307 - DNA, 41 bp, Homo sapiens; identical to SEQ ID NO: 1919
  chr4:87857176-87857217
  hyper

SEQ ID NO: 36308 - DNA, 31 bp, Homo sapiens; identical to SEQ ID NO: 1920
  chr4:87857252-87857283
  hyper

SEQ ID NO: 36309 - DNA, 31 bp, Homo sapiens; identical to SEQ ID NO: 1921
  chr4:88886999-88887030
  hyper

SEQ ID NO: 36310 - DNA, 65 bp, Homo sapiens; identical to SEQ ID NO: 1922
  chr4:88887071-88887136
  hyper

SEQ ID NO: 36311 - DNA, 68 bp, Homo sapiens; identical to SEQ ID NO: 1923
  chr4:89299894-89299962
  hyper

SEQ ID NO: 36312 - DNA, 52 bp, Homo sapiens; identical to SEQ ID NO: 1924
  chr4:89299975-89300027
  hyper

SEQ ID NO: 36313 - DNA, 45 bp, Homo sapiens; identical to SEQ ID NO: 1925
  chr4:89300139-89300184
  hyper

SEQ ID NO: 36314 - DNA, 35 bp, Homo sapiens; identical to SEQ ID NO: 1926
  chr4:89300193-89300228
  hyper

SEQ ID NO: 36315 - DNA, 35 bp, Homo sapiens; identical to SEQ ID NO: 1927
  chr4:91049203-91049238
  hyper

SEQ ID NO: 36316 - DNA, 31 bp, Homo sapiens; identical to SEQ ID NO: 1928
  chr4:91760070-91760101
  hyper

SEQ ID NO: 36317 - DNA, 2 bp, Homo sapiens
  chr4:94749724-94749726
  hyper
ac

SEQ ID NO: 36318 - DNA, 84 bp, Homo sapiens; identical to SEQ ID NO: 1930
  chr4:100867971-100868055
  hyper

SEQ ID NO: 36319 - DNA, 31 bp, Homo sapiens; identical to SEQ ID NO: 1931
  chr4:100868171-100868202
  hyper

SEQ ID NO: 36320 - DNA, 54 bp, Homo sapiens; identical to SEQ ID NO: 1934
  chr4:106067335-106067389
  hyper

SEQ ID NO: 36321 - DNA, 72 bp, Homo sapiens; identical to SEQ ID NO: 1935
  chr4:106067416-106067488
  hyper

SEQ ID NO: 36322 - DNA, 35 bp, Homo sapiens; identical to SEQ ID NO: 1937
  chr4:108745754-108745789
  hyper

SEQ ID NO: 36323 - DNA, 102 bp, Homo sapiens; identical to SEQ ID NO: 1938
  chr4:108745894-108745996
  hyper

SEQ ID NO: 36324 - DNA, 17 bp, Homo sapiens
  chr4:108745998-108746015
  hyper
gaatgatgtcaagagcg

SEQ ID NO: 36325 - DNA, 78 bp, Homo sapiens; identical to SEQ ID NO: 1940
  chr4:108746295-108746373
  hyper

SEQ ID NO: 36326 - DNA, 48 bp, Homo sapiens
  chr4:108746519-108746567
  hyper
gcccccaccctccccgcccagggcatgcttcctcgattttgtggtctg

SEQ ID NO: 36327 - DNA, 49 bp, Homo sapiens; identical to SEQ ID NO: 1942
  chr4:108746616-108746665
  hyper

SEQ ID NO: 36328 - DNA, 31 bp, Homo sapiens; identical to SEQ ID NO: 1943
  chr4:108746679-108746710
  hyper

SEQ ID NO: 36329 - DNA, 101 bp, Homo sapiens; identical to SEQ ID NO: 1944
  chr4:110343713-110343814
  hyper

SEQ ID NO: 36330 - DNA, 31 bp, Homo sapiens; identical to SEQ ID NO: 1946
  chr4:111117164-111117195
  hyper

SEQ ID NO: 36331 - DNA, 31 bp, Homo sapiens; identical to SEQ ID NO: 1948
  chr4:111554319-111554350
  hyper

SEQ ID NO: 36332 - DNA, 31 bp, Homo sapiens; identical to SEQ ID NO: 1949
  chr4:111554368-111554399
  hyper

SEQ ID NO: 36333 - DNA, 31 bp, Homo sapiens; identical to SEQ ID NO: 1950
  chr4:111562880-111562911
  hyper

SEQ ID NO: 36334 - DNA, 2 bp, Homo sapiens
  chr4:113437621-113437623
  hyper
gc

SEQ ID NO: 36335 - DNA, 169 bp, Homo sapiens; identical to SEQ ID NO: 1952
  chr4:114900654-114900823
  hyper

SEQ ID NO: 36336 - DNA, 31 bp, Homo sapiens; identical to SEQ ID NO: 1953
  chr4:114900827-114900858
  hyper

SEQ ID NO: 36337 - DNA, 55 bp, Homo sapiens; identical to SEQ ID NO: 1954
  chr4:114900874-114900929
  hyper

SEQ ID NO: 36338 - DNA, 52 bp, Homo sapiens; identical to SEQ ID NO: 1955
  chr4:114900937-114900989
  hyper

SEQ ID NO: 36339 - DNA, 132 bp, Homo sapiens; identical to SEQ ID NO: 1956
  chr4:120549977-120550109
  hyper

SEQ ID NO: 36340 - DNA, 37 bp, Homo sapiens; identical to SEQ ID NO: 1957
  chr4:120550111-120550148
  hyper

SEQ ID NO: 36341 - DNA, 31 bp, Homo sapiens; identical to SEQ ID NO: 1958
  chr4:120550280-120550311
  hyper

SEQ ID NO: 36342 - DNA, 31 bp, Homo sapiens; identical to SEQ ID NO: 1959
  chr4:120970718-120970749
  hyper

SEQ ID NO: 36343 - DNA, 31 bp, Homo sapiens; identical to SEQ ID NO: 1960
  chr4:123747655-123747686
  hyper

SEQ ID NO: 36344 - DNA, 39 bp, Homo sapiens; identical to SEQ ID NO: 1968
  chr4:123749009-123749048
  hyper

SEQ ID NO: 36345 - DNA, 68 bp, Homo sapiens; identical to SEQ ID NO: 1969
  chr4:124318322-124318390
  hyper

SEQ ID NO: 36346 - DNA, 137 bp, Homo sapiens; identical to SEQ ID NO: 1970
  chr4:124318595-124318732
  hyper

SEQ ID NO: 36347 - DNA, 151 bp, Homo sapiens; identical to SEQ ID NO: 1971
  chr4:124319151-124319302
  hyper

SEQ ID NO: 36348 - DNA, 66 bp, Homo sapiens; identical to SEQ ID NO: 1972
  chr4:124319559-124319625
  hyper

SEQ ID NO: 36349 - DNA, 69 bp, Homo sapiens; identical to SEQ ID NO: 1973
  chr4:124319632-124319701
  hyper

SEQ ID NO: 36350 - DNA, 96 bp, Homo sapiens; identical to SEQ ID NO: 1974
  chr4:125633238-125633334
  hyper

SEQ ID NO: 36351 - DNA, 133 bp, Homo sapiens; identical to SEQ ID NO: 1975
  chr4:125633807-125633940
  hyper

SEQ ID NO: 36352 - DNA, 60 bp, Homo sapiens; identical to SEQ ID NO: 1976
  chr4:125634007-125634067
  hyper

SEQ ID NO: 36353 - DNA, 54 bp, Homo sapiens; identical to SEQ ID NO: 1977
  chr4:128703234-128703288
  hyper

SEQ ID NO: 36354 - DNA, 78 bp, Homo sapiens; identical to SEQ ID NO: 1978
  chr4:128703294-128703372
  hyper

SEQ ID NO: 36355 - DNA, 103 bp, Homo sapiens; identical to SEQ ID NO: 1979
  chr4:140097253-140097356
  hyper

SEQ ID NO: 36356 - DNA, 124 bp, Homo sapiens; identical to SEQ ID NO: 1980
  chr4:141071487-141071611
  hyper

SEQ ID NO: 36357 - DNA, 43 bp, Homo sapiens; identical to SEQ ID NO: 1981
  chr4:141071615-141071658
  hyper

SEQ ID NO: 36358 - DNA, 68 bp, Homo sapiens; identical to SEQ ID NO: 1982
  chr4:141071934-141072002
  hyper

SEQ ID NO: 36359 - DNA, 145 bp, Homo sapiens; identical to SEQ ID NO: 1983
  chr4:141072010-141072155
  hyper

SEQ ID NO: 36360 - DNA, 164 bp, Homo sapiens; identical to SEQ ID NO: 1984
  chr4:141072156-141072320
  hyper

SEQ ID NO: 36361 - DNA, 175 bp, Homo sapiens; identical to SEQ ID NO: 1985
  chr4:141072547-141072722
  hyper

SEQ ID NO: 36362 - DNA, 31 bp, Homo sapiens; identical to SEQ ID NO: 1986
  chr4:141073195-141073226
  hyper

SEQ ID NO: 36363 - DNA, 87 bp, Homo sapiens; identical to SEQ ID NO: 1987
  chr4:141073274-141073361
  hyper

SEQ ID NO: 36364 - DNA, 49 bp, Homo sapiens; identical to SEQ ID NO: 1988
  chr4:141073451-141073500
  hyper

SEQ ID NO: 36365 - DNA, 40 bp, Homo sapiens; identical to SEQ ID NO: 1989
  chr4:141073590-141073630
  hyper

SEQ ID NO: 36366 - DNA, 52 bp, Homo sapiens; identical to SEQ ID NO: 1990
  chr4:141073755-141073807
  hyper

SEQ ID NO: 36367 - DNA, 37 bp, Homo sapiens; identical to SEQ ID NO: 1991
  chr4:141073823-141073860
  hyper

SEQ ID NO: 36368 - DNA, 103 bp, Homo sapiens; identical to SEQ ID NO: 1992
  chr4:141073988-141074091
  hyper

SEQ ID NO: 36369 - DNA, 42 bp, Homo sapiens; identical to SEQ ID NO: 1993
  chr4:141074134-141074176
  hyper

SEQ ID NO: 36370 - DNA, 181 bp, Homo sapiens; identical to SEQ ID NO: 1994
  chr4:141074191-141074372
  hyper

SEQ ID NO: 36371 - DNA, 31 bp, Homo sapiens; identical to SEQ ID NO: 1995
  chr4:141074619-141074650
  hyper

SEQ ID NO: 36372 - DNA, 37 bp, Homo sapiens; identical to SEQ ID NO: 1996
  chr4:141074696-141074733
  hyper

SEQ ID NO: 36373 - DNA, 31 bp, Homo sapiens; identical to SEQ ID NO: 1997
  chr4:141074879-141074910
  hyper

SEQ ID NO: 36374 - DNA, 74 bp, Homo sapiens; identical to SEQ ID NO: 1998
  chr4:141074924-141074998
  hyper

SEQ ID NO: 36375 - DNA, 36 bp, Homo sapiens; identical to SEQ ID NO: 1999
  chr4:141075021-141075057
  hyper

SEQ ID NO: 36376 - DNA, 161 bp, Homo sapiens; identical to SEQ ID NO: 2000
  chr4:141075080-141075241
  hyper

SEQ ID NO: 36377 - DNA, 68 bp, Homo sapiens; identical to SEQ ID NO: 2001
  chr4:141075245-141075313
  hyper

SEQ ID NO: 36378 - DNA, 75 bp, Homo sapiens; identical to SEQ ID NO: 2002
  chr4:141075316-141075391
  hyper

SEQ ID NO: 36379 - DNA, 31 bp, Homo sapiens; identical to SEQ ID NO: 2003
  chr4:142557475-142557506
  hyper

SEQ ID NO: 36380 - DNA, 79 bp, Homo sapiens; identical to SEQ ID NO: 2004
  chr4:142557742-142557821
  hyper

SEQ ID NO: 36381 - DNA, 100 bp, Homo sapiens; identical to SEQ ID NO: 2005
  chr4:142557826-142557926
  hyper

SEQ ID NO: 36382 - DNA, 93 bp, Homo sapiens; identical to SEQ ID NO: 2006
  chr4:142557988-142558081
  hyper

SEQ ID NO: 36383 - DNA, 147 bp, Homo sapiens; identical to SEQ ID NO: 2007
  chr4:144257017-144257164
  hyper

SEQ ID NO: 36384 - DNA, 76 bp, Homo sapiens; identical to SEQ ID NO: 2008
  chr4:144257423-144257499
  hyper

SEQ ID NO: 36385 - DNA, 190 bp, Homo sapiens; identical to SEQ ID NO: 2009
  chr4:144257936-144258126
  hyper

SEQ ID NO: 36386 - DNA, 250 bp, Homo sapiens; identical to SEQ ID NO: 2010
  chr4:144258374-144258624
  hyper

SEQ ID NO: 36387 - DNA, 41 bp, Homo sapiens; identical to SEQ ID NO: 2011
  chr4:144258634-144258675
  hyper

SEQ ID NO: 36388 - DNA, 31 bp, Homo sapiens; identical to SEQ ID NO: 2012
  chr4:146102129-146102160
  hyper

SEQ ID NO: 36389 - DNA, 34 bp, Homo sapiens; identical to SEQ ID NO: 2013
  chr4:146402703-146402737
  hyper

SEQ ID NO: 36390 - DNA, 52 bp, Homo sapiens; identical to SEQ ID NO: 2014
  chr4:146402905-146402957
  hyper

SEQ ID NO: 36391 - DNA, 165 bp, Homo sapiens; identical to SEQ ID NO: 2015
  chr4:146403046-146403211
  hyper

SEQ ID NO: 36392 - DNA, 117 bp, Homo sapiens; identical to SEQ ID NO: 2016
  chr4:146403592-146403709
  hyper

SEQ ID NO: 36393 - DNA, 35 bp, Homo sapiens; identical to SEQ ID NO: 2017
  chr4:146403852-146403887
  hyper

SEQ ID NO: 36394 - DNA, 34 bp, Homo sapiens; identical to SEQ ID NO: 2018
  chr4:148538934-148538968
  hyper

SEQ ID NO: 36395 - DNA, 31 bp, Homo sapiens; identical to SEQ ID NO: 2019
  chr4:149364622-149364653
  hyper

SEQ ID NO: 36396 - DNA, 70 bp, Homo sapiens; identical to SEQ ID NO: 2020
  chr4:149365596-149365666
  hyper

SEQ ID NO: 36397 - DNA, 42 bp, Homo sapiens; identical to SEQ ID NO: 2021
  chr4:149365807-149365849
  hyper

SEQ ID NO: 36398 - DNA, 96 bp, Homo sapiens; identical to SEQ ID NO: 2022
  chr4:149365995-149366091
  hyper

SEQ ID NO: 36399 - DNA, 164 bp, Homo sapiens; identical to SEQ ID NO: 2023
  chr4:149366094-149366258
  hyper

SEQ ID NO: 36400 - DNA, 76 bp, Homo sapiens; identical to SEQ ID NO: 2024
  chr4:150999618-150999694
  hyper

SEQ ID NO: 36401 - DNA, 82 bp, Homo sapiens
  chr4:152246314-152246396
  hyper
gctgtgtggggcaggacccgagcggccccagagcgcgcagctctgggtccccgccgccccgtcccccgcgcctctcacctgc

SEQ ID NO: 36402 - DNA, 91 bp, Homo sapiens; identical to SEQ ID NO: 2026
  chr4:152246862-152246953
  hyper

SEQ ID NO: 36403 - DNA, 49 bp, Homo sapiens; identical to SEQ ID NO: 2027
  chr4:152329808-152329857
  hyper

SEQ ID NO: 36404 - DNA, 41 bp, Homo sapiens; identical to SEQ ID NO: 2028
  chr4:152329871-152329912
  hyper

SEQ ID NO: 36405 - DNA, 31 bp, Homo sapiens; identical to SEQ ID NO: 2029
  chr4:152330027-152330058
  hyper

SEQ ID NO: 36406 - DNA, 120 bp, Homo sapiens; identical to SEQ ID NO: 2030
  chr4:152330090-152330210
  hyper

SEQ ID NO: 36407 - DNA, 38 bp, Homo sapiens; identical to SEQ ID NO: 2031
  chr4:152330252-152330290
  hyper

SEQ ID NO: 36408 - DNA, 226 bp, Homo sapiens; identical to SEQ ID NO: 2032
  chr4:152330321-152330547
  hyper

SEQ ID NO: 36409 - DNA, 31 bp, Homo sapiens; identical to SEQ ID NO: 2033
  chr4:152330794-152330825
  hyper

SEQ ID NO: 36410 - DNA, 31 bp, Homo sapiens; identical to SEQ ID NO: 2034
  chr4:154048774-154048805
  hyper

SEQ ID NO: 36411 - DNA, 133 bp, Homo sapiens; identical to SEQ ID NO: 2035
  chr4:154073407-154073540
  hyper

SEQ ID NO: 36412 - DNA, 38 bp, Homo sapiens; identical to SEQ ID NO: 2036
  chr4:154387225-154387263
  hyper

SEQ ID NO: 36413 - DNA, 123 bp, Homo sapiens; identical to SEQ ID NO: 2037
  chr4:154387494-154387617
  hyper

SEQ ID NO: 36414 - DNA, 67 bp, Homo sapiens; identical to SEQ ID NO: 2038
  chr4:154387667-154387734
  hyper

SEQ ID NO: 36415 - DNA, 83 bp, Homo sapiens; identical to SEQ ID NO: 2039
  chr4:154388113-154388196
  hyper

SEQ ID NO: 36416 - DNA, 151 bp, Homo sapiens; identical to SEQ ID NO: 2041
  chr4:159690016-159690167
  hyper

SEQ ID NO: 36417 - DNA, 195 bp, Homo sapiens; identical to SEQ ID NO: 2042
  chr4:159690191-159690386
  hyper

SEQ ID NO: 36418 - DNA, 48 bp, Homo sapiens; identical to SEQ ID NO: 2043
  chr4:159690395-159690443
  hyper

SEQ ID NO: 36419 - DNA, 109 bp, Homo sapiens; identical to SEQ ID NO: 2044
  chr4:159690446-159690555
  hyper

SEQ ID NO: 36420 - DNA, 125 bp, Homo sapiens; identical to SEQ ID NO: 2045
  chr4:159690556-159690681
  hyper

SEQ ID NO: 36421 - DNA, 39 bp, Homo sapiens; identical to SEQ ID NO: 2046
  chr4:159690715-159690754
  hyper

SEQ ID NO: 36422 - DNA, 31 bp, Homo sapiens; identical to SEQ ID NO: 2047
  chr4:169552966-169552997
  hyper

SEQ ID NO: 36423 - DNA, 74 bp, Homo sapiens; identical to SEQ ID NO: 2048
  chr4:170192273-170192347
  hyper

SEQ ID NO: 36424 - DNA, 41 bp, Homo sapiens; identical to SEQ ID NO: 2049
  chr4:170192664-170192705
  hyper

SEQ ID NO: 36425 - DNA, 31 bp, Homo sapiens
  chr4:170948485-170948516
  hyper
ccggcctttttactcccgtaccgccctcttc

SEQ ID NO: 36426 - DNA, 31 bp, Homo sapiens; identical to SEQ ID NO: 2052
  chr4:176986728-176986759
  hyper

SEQ ID NO: 36427 - DNA, 31 bp, Homo sapiens; identical to SEQ ID NO: 2055
  chr4:178363968-178363999
  hyper

SEQ ID NO: 36428 - DNA, 47 bp, Homo sapiens; identical to SEQ ID NO: 2056
  chr4:178364002-178364049
  hyper

SEQ ID NO: 36429 - DNA, 44 bp, Homo sapiens; identical to SEQ ID NO: 2057
  chr4:178364051-178364095
  hyper

SEQ ID NO: 36430 - DNA, 31 bp, Homo sapiens; identical to SEQ ID NO: 2058
  chr4:184328289-184328320
  hyper

SEQ ID NO: 36431 - DNA, 34 bp, Homo sapiens; identical to SEQ ID NO: 2059
  chr4:184328355-184328389
  hyper

SEQ ID NO: 36432 - DNA, 70 bp, Homo sapiens; identical to SEQ ID NO: 2060
  chr4:185961213-185961283
  hyper

SEQ ID NO: 36433 - DNA, 34 bp, Homo sapiens; identical to SEQ ID NO: 2061
  chr4:186130482-186130516
  hyper

SEQ ID NO: 36434 - DNA, 31 bp, Homo sapiens; identical to SEQ ID NO: 2062
  chr4:186130520-186130551
  hyper

SEQ ID NO: 36435 - DNA, 31 bp, Homo sapiens; identical to SEQ ID NO: 2063
  chr4:187066081-187066112
  hyper

SEQ ID NO: 36436 - DNA, 125 bp, Homo sapiens; identical to SEQ ID NO: 2064
  chr4:187645567-187645692
  hyper

SEQ ID NO: 36437 - DNA, 42 bp, Homo sapiens; identical to SEQ ID NO: 2065
  chr4:187646284-187646326
  hyper

SEQ ID NO: 36438 - DNA, 59 bp, Homo sapiens; identical to SEQ ID NO: 2067
  chr4:187647575-187647634
  hyper

SEQ ID NO: 36439 - DNA, 198 bp, Homo sapiens
  chr4:187647865-187648063
  hyper
ccctcccccttggaggcggtgggggaggggaggtgacgtcagcgccccgcctcgccccccgccccgggcgcggacgggattctccggctgggcgcgccaccccgacagtggcagcagcggccgtggaggctgcgggggtcccggcctctgcggtctctctggccggccgcagctgtggcgcgggtgaaacgcccgccc

SEQ ID NO: 36440 - DNA, 7 bp, Homo sapiens
  chr4:187648119-187648126
  hyper
gcgcctg

SEQ ID NO: 36441 - DNA, 31 bp, Homo sapiens; identical to SEQ ID NO: 2069
  chr4:187855389-187855420
  hyper

SEQ ID NO: 36442 - DNA, 31 bp, Homo sapiens; identical to SEQ ID NO: 2070
  chr5:472704-472735
  hyper

SEQ ID NO: 36443 - DNA, 36 bp, Homo sapiens; identical to SEQ ID NO: 2071
  chr5:693797-693833
  hyper

SEQ ID NO: 36444 - DNA, 101 bp, Homo sapiens; identical to SEQ ID NO: 2072
  chr5:1004891-1004992
  hyper

SEQ ID NO: 36445 - DNA, 154 bp, Homo sapiens; identical to SEQ ID NO: 2073
  chr5:1061581-1061735
  hyper

SEQ ID NO: 36446 - DNA, 37 bp, Homo sapiens; identical to SEQ ID NO: 2074
  chr5:1064051-1064088
  hyper

SEQ ID NO: 36447 - DNA, 143 bp, Homo sapiens; identical to SEQ ID NO: 2075
  chr5:1064116-1064259
  hyper

SEQ ID NO: 36448 - DNA, 220 bp, Homo sapiens; identical to SEQ ID NO: 2076
  chr5:1064261-1064481
  hyper

SEQ ID NO: 36449 - DNA, 31 bp, Homo sapiens; identical to SEQ ID NO: 2077
  chr5:1064568-1064599
  hyper

SEQ ID NO: 36450 - DNA, 270 bp, Homo sapiens; identical to SEQ ID NO: 2078
  chr5:1064616-1064886
  hyper

SEQ ID NO: 36451 - DNA, 97 bp, Homo sapiens; identical to SEQ ID NO: 2079
  chr5:1065012-1065109
  hyper

SEQ ID NO: 36452 - DNA, 138 bp, Homo sapiens; identical to SEQ ID NO: 2080
  chr5:1111380-1111518
  hyper

SEQ ID NO: 36453 - DNA, 132 bp, Homo sapiens; identical to SEQ ID NO: 2081
  chr5:1111655-1111787
  hyper

SEQ ID NO: 36454 - DNA, 31 bp, Homo sapiens; identical to SEQ ID NO: 2082
  chr5:1111873-1111904
  hyper

SEQ ID NO: 36455 - DNA, 31 bp, Homo sapiens; identical to SEQ ID NO: 2083
  chr5:1111996-1112027
  hyper

SEQ ID NO: 36456 - DNA, 68 bp, Homo sapiens; identical to SEQ ID NO: 2084
  chr5:1112174-1112242
  hyper

SEQ ID NO: 36457 - DNA, 35 bp, Homo sapiens; identical to SEQ ID NO: 2085
  chr5:1112256-1112291
  hyper

SEQ ID NO: 36458 - DNA, 98 bp, Homo sapiens; identical to SEQ ID NO: 2086
  chr5:1112303-1112401
  hyper

SEQ ID NO: 36459 - DNA, 31 bp, Homo sapiens; identical to SEQ ID NO: 2088
  chr5:1800854-1800885
  hyper

SEQ ID NO: 36460 - DNA, 31 bp, Homo sapiens; identical to SEQ ID NO: 2089
  chr5:1800896-1800927
  hyper

SEQ ID NO: 36461 - DNA, 81 bp, Homo sapiens; identical to SEQ ID NO: 2090
  chr5:1800933-1801014
  hyper

SEQ ID NO: 36462 - DNA, 31 bp, Homo sapiens; identical to SEQ ID NO: 2092
  chr5:9544613-9544644
  hyper

SEQ ID NO: 36463 - DNA, 34 bp, Homo sapiens; identical to SEQ ID NO: 2093
  chr5:9546284-9546318
  hyper

SEQ ID NO: 36464 - DNA, 31 bp, Homo sapiens; identical to SEQ ID NO: 2094
  chr5:10563415-10563446
  hyper

SEQ ID NO: 36465 - DNA, 41 bp, Homo sapiens
  chr5:10563473-10563514
  hyper
ctgtgggcctggactgcggctgtcgcccgcggccctgctct

SEQ ID NO: 36466 - DNA, 47 bp, Homo sapiens; identical to SEQ ID NO: 2096
  chr5:10564408-10564455
  hyper

SEQ ID NO: 36467 - DNA, 2 bp, Homo sapiens
  chr5:10564470-10564472
  hyper
ac

SEQ ID NO: 36468 - DNA, 31 bp, Homo sapiens; identical to SEQ ID NO: 2103
  chr5:14108524-14108555
  hyper

SEQ ID NO: 36469 - DNA, 132 bp, Homo sapiens; identical to SEQ ID NO: 2104
  chr5:14143001-14143133
  hyper

SEQ ID NO: 36470 - DNA, 45 bp, Homo sapiens; identical to SEQ ID NO: 2105
  chr5:14143190-14143235
  hyper

SEQ ID NO: 36471 - DNA, 166 bp, Homo sapiens; identical to SEQ ID NO: 2106
  chr5:14143456-14143622
  hyper

SEQ ID NO: 36472 - DNA, 49 bp, Homo sapiens; identical to SEQ ID NO: 2107
  chr5:14143766-14143815
  hyper

SEQ ID NO: 36473 - DNA, 166 bp, Homo sapiens; identical to SEQ ID NO: 2108
  chr5:14143872-14144038
  hyper

SEQ ID NO: 36474 - DNA, 113 bp, Homo sapiens; identical to SEQ ID NO: 2109
  chr5:14144296-14144409
  hyper

SEQ ID NO: 36475 - DNA, 46 bp, Homo sapiens; identical to SEQ ID NO: 2110
  chr5:14144999-14145045
  hyper

SEQ ID NO: 36476 - DNA, 129 bp, Homo sapiens; identical to SEQ ID NO: 2111
  chr5:16616954-16617083
  hyper

SEQ ID NO: 36477 - DNA, 10 bp, Homo sapiens
  chr5:16935547-16935557
  hyper
cctgcacccg

SEQ ID NO: 36478 - DNA, 70 bp, Homo sapiens
  chr5:16935617-16935687
  hyper
gggtgtcccagggcgccccgagagccagccacccacgcaaacggaaacgcaccttcgctacctcccggag

SEQ ID NO: 36479 - DNA, 71 bp, Homo sapiens; identical to SEQ ID NO: 29259
  chr5:16936514-16936585
  hyper

SEQ ID NO: 36480 - DNA, 31 bp, Homo sapiens; identical to SEQ ID NO: 2128
  chr5:29296868-29296899
  hyper

SEQ ID NO: 36481 - DNA, 179 bp, Homo sapiens
  chr5:34656173-34656352
  hyper
gccgggacgcgcgggccggggagatgcgccgggggctggagggcggagagcaccccccgcaggtcccggccagagcccggggccgggtcacctgactcgcggaatttggggccgcgaggggtggaatgggaggggaatggttagcgcctcccttcccgctcccactggatccaggtcgg

SEQ ID NO: 36482 - DNA, 222 bp, Homo sapiens; identical to SEQ ID NO: 29278
  chr5:34656421-34656643
  hyper

SEQ ID NO: 36483 - DNA, 20 bp, Homo sapiens
  chr5:34657034-34657054
  hyper
caatccgcctcccggctgaa

SEQ ID NO: 36484 - DNA, 70 bp, Homo sapiens; identical to SEQ ID NO: 2133
  chr5:34657063-34657133
  hyper

SEQ ID NO: 36485 - DNA, 31 bp, Homo sapiens; identical to SEQ ID NO: 2134
  chr5:34657158-34657189
  hyper

SEQ ID NO: 36486 - DNA, 50 bp, Homo sapiens; identical to SEQ ID NO: 2135
  chr5:34657202-34657252
  hyper

SEQ ID NO: 36487 - DNA, 65 bp, Homo sapiens; identical to SEQ ID NO: 2136
  chr5:34657277-34657342
  hyper

SEQ ID NO: 36488 - DNA, 87 bp, Homo sapiens; identical to SEQ ID NO: 2137
  chr5:34657348-34657435
  hyper

SEQ ID NO: 36489 - DNA, 2 bp, Homo sapiens
  chr5:36690191-36690193
  hyper
ag

SEQ ID NO: 36490 - DNA, 2 bp, Homo sapiens
  chr5:40680533-40680535
  hyper
gc

SEQ ID NO: 36491 - DNA, 31 bp, Homo sapiens; identical to SEQ ID NO: 2146
  chr5:42949384-42949415
  hyper

SEQ ID NO: 36492 - DNA, 15 bp, Homo sapiens
  chr5:43008723-43008738
  hyper
ctaggattacaggcg

SEQ ID NO: 36493 - DNA, 40 bp, Homo sapiens; identical to SEQ ID NO: 2170
  chr5:43019485-43019525
  hyper

SEQ ID NO: 36494 - DNA, 31 bp, Homo sapiens; identical to SEQ ID NO: 2171
  chr5:43019593-43019624
  hyper

SEQ ID NO: 36495 - DNA, 16 bp, Homo sapiens
  chr5:43019635-43019651
  hyper
acattctctcaggatc

SEQ ID NO: 36496 - DNA, 2 bp, Homo sapiens
  chr5:43040829-43040831
  hyper
gt

SEQ ID NO: 36497 - DNA, 31 bp, Homo sapiens; identical to SEQ ID NO: 2177
  chr5:43603562-43603593
  hyper

SEQ ID NO: 36498 - DNA, 58 bp, Homo sapiens; identical to SEQ ID NO: 2182
  chr5:52083829-52083887
  hyper

SEQ ID NO: 36499 - DNA, 36 bp, Homo sapiens
  chr5:52084038-52084074
  hyper
ctctcccgctcctgggcgccgctgccactggggcag

SEQ ID NO: 36500 - DNA, 115 bp, Homo sapiens; identical to SEQ ID NO: 2185
  chr5:52284794-52284909
  hyper

SEQ ID NO: 36501 - DNA, 31 bp, Homo sapiens; identical to SEQ ID NO: 2186
  chr5:52285095-52285126
  hyper

SEQ ID NO: 36502 - DNA, 35 bp, Homo sapiens; identical to SEQ ID NO: 2187
  chr5:52285155-52285190
  hyper

SEQ ID NO: 36503 - DNA, 40 bp, Homo sapiens; identical to SEQ ID NO: 2188
  chr5:52285205-52285245
  hyper

SEQ ID NO: 36504 - DNA, 19 bp, Homo sapiens
  chr5:52285808-52285827
  hyper
atggcggcctgcagctccc

SEQ ID NO: 36505 - DNA, 2 bp, Homo sapiens
  chr5:52778601-52778603
  hyper
ac

SEQ ID NO: 36506 - DNA, 44 bp, Homo sapiens; identical to SEQ ID NO: 2192
  chr5:52778785-52778829
  hyper

SEQ ID NO: 36507 - DNA, 108 bp, Homo sapiens; identical to SEQ ID NO: 2193
  chr5:54469035-54469143
  hyper

SEQ ID NO: 36508 - DNA, 54 bp, Homo sapiens; identical to SEQ ID NO: 2194
  chr5:54529890-54529944
  hyper

SEQ ID NO: 36509 - DNA, 42 bp, Homo sapiens; identical to SEQ ID NO: 2195
  chr5:54530055-54530097
  hyper

SEQ ID NO: 36510 - DNA, 31 bp, Homo sapiens; identical to SEQ ID NO: 2196
  chr5:57755374-57755405
  hyper

SEQ ID NO: 36511 - DNA, 31 bp, Homo sapiens; identical to SEQ ID NO: 2197
  chr5:57755425-57755456
  hyper

SEQ ID NO: 36512 - DNA, 51 bp, Homo sapiens; identical to SEQ ID NO: 2198
  chr5:57755844-57755895
  hyper

SEQ ID NO: 36513 - DNA, 111 bp, Homo sapiens; identical to SEQ ID NO: 2199
  chr5:57755954-57756065
  hyper

SEQ ID NO: 36514 - DNA, 38 bp, Homo sapiens; identical to SEQ ID NO: 2200
  chr5:57756488-57756526
  hyper

SEQ ID NO: 36515 - DNA, 31 bp, Homo sapiens; identical to SEQ ID NO: 2201
  chr5:57756573-57756604
  hyper

SEQ ID NO: 36516 - DNA, 31 bp, Homo sapiens; identical to SEQ ID NO: 2202
  chr5:59506983-59507014
  hyper

SEQ ID NO: 36517 - DNA, 31 bp, Homo sapiens; identical to SEQ ID NO: 2203
  chr5:60626140-60626171
  hyper

SEQ ID NO: 36518 - DNA, 31 bp, Homo sapiens; identical to SEQ ID NO: 2204
  chr5:60840110-60840141
  hyper

SEQ ID NO: 36519 - DNA, 31 bp, Homo sapiens; identical to SEQ ID NO: 2205
  chr5:68485209-68485240
  hyper

SEQ ID NO: 36520 - DNA, 31 bp, Homo sapiens; identical to SEQ ID NO: 2206
  chr5:72113362-72113393
  hyper

SEQ ID NO: 36521 - DNA, 31 bp, Homo sapiens; identical to SEQ ID NO: 2207
  chr5:72921422-72921453
  hyper

SEQ ID NO: 36522 - DNA, 48 bp, Homo sapiens; identical to SEQ ID NO: 2208
  chr5:72921497-72921545
  hyper

SEQ ID NO: 36523 - DNA, 220 bp, Homo sapiens; identical to SEQ ID NO: 2209
  chr5:72921556-72921776
  hyper

SEQ ID NO: 36524 - DNA, 54 bp, Homo sapiens; identical to SEQ ID NO: 2210
  chr5:72921779-72921833
  hyper

SEQ ID NO: 36525 - DNA, 142 bp, Homo sapiens; identical to SEQ ID NO: 2211
  chr5:72921840-72921982
  hyper

SEQ ID NO: 36526 - DNA, 258 bp, Homo sapiens; identical to SEQ ID NO: 2212
  chr5:72921983-72922241
  hyper

SEQ ID NO: 36527 - DNA, 153 bp, Homo sapiens; identical to SEQ ID NO: 2213
  chr5:72922244-72922397
  hyper

SEQ ID NO: 36528 - DNA, 158 bp, Homo sapiens; identical to SEQ ID NO: 2214
  chr5:72922408-72922566
  hyper

SEQ ID NO: 36529 - DNA, 41 bp, Homo sapiens; identical to SEQ ID NO: 2215
  chr5:73843884-73843925
  hyper

SEQ ID NO: 36530 - DNA, 40 bp, Homo sapiens; identical to SEQ ID NO: 2216
  chr5:73844038-73844078
  hyper

SEQ ID NO: 36531 - DNA, 118 bp, Homo sapiens; identical to SEQ ID NO: 2217
  chr5:73935723-73935841
  hyper

SEQ ID NO: 36532 - DNA, 144 bp, Homo sapiens; identical to SEQ ID NO: 2218
  chr5:73935843-73935987
  hyper

SEQ ID NO: 36533 - DNA, 516 bp, Homo sapiens; identical to SEQ ID NO: 2219
  chr5:73936032-73936548
  hyper

SEQ ID NO: 36534 - DNA, 95 bp, Homo sapiens; identical to SEQ ID NO: 2220
  chr5:73936773-73936868
  hyper

SEQ ID NO: 36535 - DNA, 42 bp, Homo sapiens; identical to SEQ ID NO: 2221
  chr5:73937017-73937059
  hyper

SEQ ID NO: 36536 - DNA, 185 bp, Homo sapiens; identical to SEQ ID NO: 2222
  chr5:74161899-74162084
  hyper

SEQ ID NO: 36537 - DNA, 25 bp, Homo sapiens
  chr5:74162237-74162262
  hyper
cttccgctccgcgcccgcgcccacc

SEQ ID NO: 36538 - DNA, 34 bp, Homo sapiens; identical to SEQ ID NO: 2226
  chr5:74348705-74348739
  hyper

SEQ ID NO: 36539 - DNA, 53 bp, Homo sapiens; identical to SEQ ID NO: 2227
  chr5:74348751-74348804
  hyper

SEQ ID NO: 36540 - DNA, 75 bp, Homo sapiens; identical to SEQ ID NO: 2228
  chr5:74348819-74348894
  hyper

SEQ ID NO: 36541 - DNA, 104 bp, Homo sapiens; identical to SEQ ID NO: 2229
  chr5:74348906-74349010
  hyper

SEQ ID NO: 36542 - DNA, 97 bp, Homo sapiens; identical to SEQ ID NO: 2230
  chr5:74349197-74349294
  hyper

SEQ ID NO: 36543 - DNA, 31 bp, Homo sapiens; identical to SEQ ID NO: 2234
  chr5:75566956-75566987
  hyper

SEQ ID NO: 36544 - DNA, 39 bp, Homo sapiens; identical to SEQ ID NO: 2235
  chr5:76114546-76114585
  hyper

SEQ ID NO: 36545 - DNA, 69 bp, Homo sapiens; identical to SEQ ID NO: 2236
  chr5:76114591-76114660
  hyper

SEQ ID NO: 36546 - DNA, 184 bp, Homo sapiens
  chr5:76114667-76114851
  hyper
aagcagacacctcatgcgctcaaccccgcccgcaggcggctcccgcagtctaagggacctggcgcgagtccgggaagcggagggcgcagctgcgcagggaagggggccgggggcgggaccagggcgcgcgttccggtcccggggcgtggcctcccgcaggtgagtacgctgctccttcggtttc

SEQ ID NO: 36547 - DNA, 177 bp, Homo sapiens
  chr5:76114880-76115057
  hyper
cgcagcagaggctccgattcggggcaggtgagaggctgactttctctcggtgcgtccagtggagctctgagtttcgaatcggcggcggcggattccccgcgcgcccggcgtcggggcttccaggaggatgcggagccccagcgcggcgtggctgctgggggccgccatcctgctagc

SEQ ID NO: 36548 - DNA, 31 bp, Homo sapiens; identical to SEQ ID NO: 2238
  chr5:76383183-76383214
  hyper

SEQ ID NO: 36549 - DNA, 31 bp, Homo sapiens; identical to SEQ ID NO: 2239
  chr5:77148201-77148232
  hyper

SEQ ID NO: 36550 - DNA, 45 bp, Homo sapiens; identical to SEQ ID NO: 2243
  chr5:77591515-77591560
  hyper

SEQ ID NO: 36551 - DNA, 31 bp, Homo sapiens; identical to SEQ ID NO: 2244
  chr5:77944026-77944057
  hyper

SEQ ID NO: 36552 - DNA, 31 bp, Homo sapiens; identical to SEQ ID NO: 2245
  chr5:78807882-78807913
  hyper

SEQ ID NO: 36553 - DNA, 47 bp, Homo sapiens; identical to SEQ ID NO: 2246
  chr5:79551151-79551198
  hyper

SEQ ID NO: 36554 - DNA, 51 bp, Homo sapiens; identical to SEQ ID NO: 2247
  chr5:79551392-79551443
  hyper

SEQ ID NO: 36555 - DNA, 178 bp, Homo sapiens; identical to SEQ ID NO: 2248
  chr5:79784026-79784204
  hyper

SEQ ID NO: 36556 - DNA, 41 bp, Homo sapiens; identical to SEQ ID NO: 2249
  chr5:87437222-87437263
  hyper

SEQ ID NO: 36557 - DNA, 2 bp, Homo sapiens
  chr5:87955349-87955351
  hyper
aa

SEQ ID NO: 36558 - DNA, 31 bp, Homo sapiens; identical to SEQ ID NO: 2251
  chr5:87955398-87955429
  hyper

SEQ ID NO: 36559 - DNA, 2 bp, Homo sapiens
  chr5:87955459-87955461
  hyper
tg

SEQ ID NO: 36560 - DNA, 31 bp, Homo sapiens; identical to SEQ ID NO: 2255
  chr5:87963057-87963088
  hyper

SEQ ID NO: 36561 - DNA, 44 bp, Homo sapiens; identical to SEQ ID NO: 2256
  chr5:87963148-87963192
  hyper

SEQ ID NO: 36562 - DNA, 18 bp, Homo sapiens
  chr5:88179111-88179129
  hyper
gctcggaagaggaggagg

SEQ ID NO: 36563 - DNA, 31 bp, Homo sapiens; identical to SEQ ID NO: 2264
  chr5:92917347-92917378
  hyper

SEQ ID NO: 36564 - DNA, 46 bp, Homo sapiens; identical to SEQ ID NO: 2265
  chr5:94619387-94619433
  hyper

SEQ ID NO: 36565 - DNA, 96 bp, Homo sapiens; identical to SEQ ID NO: 2266
  chr5:98107031-98107127
  hyper

SEQ ID NO: 36566 - DNA, 43 bp, Homo sapiens; identical to SEQ ID NO: 2267
  chr5:98108683-98108726
  hyper

SEQ ID NO: 36567 - DNA, 82 bp, Homo sapiens; identical to SEQ ID NO: 2268
  chr5:98108759-98108841
  hyper

SEQ ID NO: 36568 - DNA, 49 bp, Homo sapiens; identical to SEQ ID NO: 2269
  chr5:98108843-98108892
  hyper

SEQ ID NO: 36569 - DNA, 43 bp, Homo sapiens; identical to SEQ ID NO: 2270
  chr5:98109212-98109255
  hyper

SEQ ID NO: 36570 - DNA, 34 bp, Homo sapiens; identical to SEQ ID NO: 2271
  chr5:98109257-98109291
  hyper

SEQ ID NO: 36571 - DNA, 80 bp, Homo sapiens; identical to SEQ ID NO: 2272
  chr5:98109331-98109411
  hyper

SEQ ID NO: 36572 - DNA, 83 bp, Homo sapiens; identical to SEQ ID NO: 2273
  chr5:98109412-98109495
  hyper

SEQ ID NO: 36573 - DNA, 59 bp, Homo sapiens; identical to SEQ ID NO: 2274
  chr5:98109601-98109660
  hyper

SEQ ID NO: 36574 - DNA, 31 bp, Homo sapiens; identical to SEQ ID NO: 2275
  chr5:98109926-98109957
  hyper

SEQ ID NO: 36575 - DNA, 131 bp, Homo sapiens; identical to SEQ ID NO: 2276
  chr5:98110030-98110161
  hyper

SEQ ID NO: 36576 - DNA, 39 bp, Homo sapiens; identical to SEQ ID NO: 2277
  chr5:98110337-98110376
  hyper

SEQ ID NO: 36577 - DNA, 119 bp, Homo sapiens; identical to SEQ ID NO: 2278
  chr5:98110406-98110525
  hyper

SEQ ID NO: 36578 - DNA, 53 bp, Homo sapiens; identical to SEQ ID NO: 2301
  chr5:100239746-100239799
  hyper

SEQ ID NO: 36579 - DNA, 31 bp, Homo sapiens; identical to SEQ ID NO: 2302
  chr5:100239902-100239933
  hyper

SEQ ID NO: 36580 - DNA, 31 bp, Homo sapiens; identical to SEQ ID NO: 2303
  chr5:100239948-100239979
  hyper

SEQ ID NO: 36581 - DNA, 31 bp, Homo sapiens; identical to SEQ ID NO: 2304
  chr5:100239987-100240018
  hyper

SEQ ID NO: 36582 - DNA, 38 bp, Homo sapiens
  chr5:100240031-100240069
  hyper
tactctgctagtaccacgccttggttccggtctttact

SEQ ID NO: 36583 - DNA, 50 bp, Homo sapiens; identical to SEQ ID NO: 2307
  chr5:102090423-102090473
  hyper

SEQ ID NO: 36584 - DNA, 31 bp, Homo sapiens; identical to SEQ ID NO: 2308
  chr5:107006663-107006694
  hyper

SEQ ID NO: 36585 - DNA, 31 bp, Homo sapiens; identical to SEQ ID NO: 2310
  chr5:107007962-107007993
  hyper

SEQ ID NO: 36586 - DNA, 50 bp, Homo sapiens; identical to SEQ ID NO: 2311
  chr5:107008015-107008065
  hyper

SEQ ID NO: 36587 - DNA, 55 bp, Homo sapiens; identical to SEQ ID NO: 2312
  chr5:107008368-107008423
  hyper

SEQ ID NO: 36588 - DNA, 74 bp, Homo sapiens; identical to SEQ ID NO: 2313
  chr5:108064126-108064200
  hyper

SEQ ID NO: 36589 - DNA, 31 bp, Homo sapiens; identical to SEQ ID NO: 2314
  chr5:108313516-108313547
  hyper

SEQ ID NO: 36590 - DNA, 31 bp, Homo sapiens; identical to SEQ ID NO: 2320
  chr5:112629938-112629969
  hyper

SEQ ID NO: 36591 - DNA, 31 bp, Homo sapiens; identical to SEQ ID NO: 2322
  chr5:114879309-114879340
  hyper

SEQ ID NO: 36592 - DNA, 90 bp, Homo sapiens; identical to SEQ ID NO: 2324
  chr5:118604722-118604812
  hyper

SEQ ID NO: 36593 - DNA, 135 bp, Homo sapiens; identical to SEQ ID NO: 2325
  chr5:122371730-122371865
  hyper

SEQ ID NO: 36594 - DNA, 49 bp, Homo sapiens; identical to SEQ ID NO: 2326
  chr5:122372131-122372180
  hyper

SEQ ID NO: 36595 - DNA, 31 bp, Homo sapiens; identical to SEQ ID NO: 2327
  chr5:122372774-122372805
  hyper

SEQ ID NO: 36596 - DNA, 31 bp, Homo sapiens; identical to SEQ ID NO: 2328
  chr5:124084142-124084173
  hyper

SEQ ID NO: 36597 - DNA, 25 bp, Homo sapiens
  chr5:127537230-127537255
  hyper
ggtagtgatgcgaataacatgcttt

SEQ ID NO: 36598 - DNA, 52 bp, Homo sapiens; identical to SEQ ID NO: 2333
  chr5:127537257-127537309
  hyper

SEQ ID NO: 36599 - DNA, 31 bp, Homo sapiens; identical to SEQ ID NO: 2334
  chr5:131133197-131133228
  hyper

SEQ ID NO: 36600 - DNA, 81 bp, Homo sapiens; identical to SEQ ID NO: 2335
  chr5:131133234-131133315
  hyper

SEQ ID NO: 36601 - DNA, 73 bp, Homo sapiens; identical to SEQ ID NO: 2336
  chr5:131133322-131133395
  hyper

SEQ ID NO: 36602 - DNA, 31 bp, Homo sapiens; identical to SEQ ID NO: 2337
  chr5:131563040-131563071
  hyper

SEQ ID NO: 36603 - DNA, 312 bp, Homo sapiens; identical to SEQ ID NO: 2338
  chr5:131563078-131563390
  hyper

SEQ ID NO: 36604 - DNA, 43 bp, Homo sapiens; identical to SEQ ID NO: 2339
  chr5:131563475-131563518
  hyper

SEQ ID NO: 36605 - DNA, 40 bp, Homo sapiens; identical to SEQ ID NO: 2340
  chr5:131563665-131563705
  hyper

SEQ ID NO: 36606 - DNA, 129 bp, Homo sapiens; identical to SEQ ID NO: 2341
  chr5:131563707-131563836
  hyper

SEQ ID NO: 36607 - DNA, 45 bp, Homo sapiens; identical to SEQ ID NO: 2342
  chr5:132072697-132072742
  hyper

SEQ ID NO: 36608 - DNA, 81 bp, Homo sapiens; identical to SEQ ID NO: 2343
  chr5:132072753-132072834
  hyper

SEQ ID NO: 36609 - DNA, 45 bp, Homo sapiens; identical to SEQ ID NO: 2344
  chr5:132072835-132072880
  hyper

SEQ ID NO: 36610 - DNA, 80 bp, Homo sapiens; identical to SEQ ID NO: 2345
  chr5:135468431-135468511
  hyper

SEQ ID NO: 36611 - DNA, 31 bp, Homo sapiens; identical to SEQ ID NO: 2346
  chr5:135468535-135468566
  hyper

SEQ ID NO: 36612 - DNA, 40 bp, Homo sapiens; identical to SEQ ID NO: 2347
  chr5:137801266-137801306
  hyper

SEQ ID NO: 36613 - DNA, 55 bp, Homo sapiens; identical to SEQ ID NO: 2348
  chr5:137801307-137801362
  hyper

SEQ ID NO: 36614 - DNA, 80 bp, Homo sapiens; identical to SEQ ID NO: 2349
  chr5:138088595-138088675
  hyper

SEQ ID NO: 36615 - DNA, 52 bp, Homo sapiens; identical to SEQ ID NO: 2350
  chr5:138089783-138089835
  hyper

SEQ ID NO: 36616 - DNA, 31 bp, Homo sapiens; identical to SEQ ID NO: 2351
  chr5:138089858-138089889
  hyper

SEQ ID NO: 36617 - DNA, 31 bp, Homo sapiens; identical to SEQ ID NO: 2352
  chr5:138299453-138299484
  hyper

SEQ ID NO: 36618 - DNA, 78 bp, Homo sapiens; identical to SEQ ID NO: 2353
  chr5:139017027-139017105
  hyper

SEQ ID NO: 36619 - DNA, 167 bp, Homo sapiens; identical to SEQ ID NO: 2354
  chr5:139017117-139017284
  hyper

SEQ ID NO: 36620 - DNA, 31 bp, Homo sapiens; identical to SEQ ID NO: 2355
  chr5:139017454-139017485
  hyper

SEQ ID NO: 36621 - DNA, 31 bp, Homo sapiens; identical to SEQ ID NO: 2356
  chr5:139017554-139017585
  hyper

SEQ ID NO: 36622 - DNA, 31 bp, Homo sapiens; identical to SEQ ID NO: 2357
  chr5:139017711-139017742
  hyper

SEQ ID NO: 36623 - DNA, 31 bp, Homo sapiens; identical to SEQ ID NO: 2358
  chr5:139039950-139039981
  hyper

SEQ ID NO: 36624 - DNA, 31 bp, Homo sapiens; identical to SEQ ID NO: 2359
  chr5:139039984-139040015
  hyper

SEQ ID NO: 36625 - DNA, 73 bp, Homo sapiens; identical to SEQ ID NO: 2360
  chr5:139089042-139089115
  hyper

SEQ ID NO: 36626 - DNA, 37 bp, Homo sapiens; identical to SEQ ID NO: 2361
  chr5:139175355-139175392
  hyper

SEQ ID NO: 36627 - DNA, 31 bp, Homo sapiens; identical to SEQ ID NO: 2362
  chr5:139175996-139176027
  hyper

SEQ ID NO: 36628 - DNA, 31 bp, Homo sapiens; identical to SEQ ID NO: 2363
  chr5:139537078-139537109
  hyper

SEQ ID NO: 36629 - DNA, 92 bp, Homo sapiens; identical to SEQ ID NO: 2364
  chr5:139725996-139726088
  hyper

SEQ ID NO: 36630 - DNA, 55 bp, Homo sapiens; identical to SEQ ID NO: 2365
  chr5:139726093-139726148
  hyper

SEQ ID NO: 36631 - DNA, 31 bp, Homo sapiens; identical to SEQ ID NO: 2366
  chr5:140613723-140613754
  hyper

SEQ ID NO: 36632 - DNA, 103 bp, Homo sapiens; identical to SEQ ID NO: 2368
  chr5:140904507-140904610
  hyper

SEQ ID NO: 36633 - DNA, 31 bp, Homo sapiens; identical to SEQ ID NO: 2369
  chr5:141255433-141255464
  hyper

SEQ ID NO: 36634 - DNA, 78 bp, Homo sapiens; identical to SEQ ID NO: 2370
  chr5:141255468-141255546
  hyper

SEQ ID NO: 36635 - DNA, 61 bp, Homo sapiens; identical to SEQ ID NO: 2371
  chr5:141255565-141255626
  hyper

SEQ ID NO: 36636 - DNA, 78 bp, Homo sapiens; identical to SEQ ID NO: 2372
  chr5:141255705-141255783
  hyper

SEQ ID NO: 36637 - DNA, 326 bp, Homo sapiens; identical to SEQ ID NO: 2373
  chr5:141255788-141256114
  hyper

SEQ ID NO: 36638 - DNA, 31 bp, Homo sapiens; identical to SEQ ID NO: 2374
  chr5:141256118-141256149
  hyper

SEQ ID NO: 36639 - DNA, 102 bp, Homo sapiens; identical to SEQ ID NO: 2375
  chr5:141256184-141256286
  hyper

SEQ ID NO: 36640 - DNA, 60 bp, Homo sapiens; identical to SEQ ID NO: 2376
  chr5:141256295-141256355
  hyper

SEQ ID NO: 36641 - DNA, 75 bp, Homo sapiens; identical to SEQ ID NO: 2377
  chr5:141256530-141256605
  hyper

SEQ ID NO: 36642 - DNA, 31 bp, Homo sapiens; identical to SEQ ID NO: 2378
  chr5:141257327-141257358
  hyper

SEQ ID NO: 36643 - DNA, 31 bp, Homo sapiens; identical to SEQ ID NO: 2379
  chr5:141257407-141257438
  hyper

SEQ ID NO: 36644 - DNA, 45 bp, Homo sapiens; identical to SEQ ID NO: 2380
  chr5:141257587-141257632
  hyper

SEQ ID NO: 36645 - DNA, 35 bp, Homo sapiens; identical to SEQ ID NO: 2381
  chr5:141257648-141257683
  hyper

SEQ ID NO: 36646 - DNA, 43 bp, Homo sapiens; identical to SEQ ID NO: 2382
  chr5:141257815-141257858
  hyper

SEQ ID NO: 36647 - DNA, 66 bp, Homo sapiens; identical to SEQ ID NO: 2383
  chr5:141257915-141257981
  hyper

SEQ ID NO: 36648 - DNA, 34 bp, Homo sapiens; identical to SEQ ID NO: 2384
  chr5:141257996-141258030
  hyper

SEQ ID NO: 36649 - DNA, 52 bp, Homo sapiens; identical to SEQ ID NO: 2385
  chr5:141703953-141704005
  hyper

SEQ ID NO: 36650 - DNA, 113 bp, Homo sapiens; identical to SEQ ID NO: 2386
  chr5:141704447-141704560
  hyper

SEQ ID NO: 36651 - DNA, 55 bp, Homo sapiens; identical to SEQ ID NO: 2387
  chr5:141704618-141704673
  hyper

SEQ ID NO: 36652 - DNA, 39 bp, Homo sapiens; identical to SEQ ID NO: 2388
  chr5:141736298-141736337
  hyper

SEQ ID NO: 36653 - DNA, 148 bp, Homo sapiens; identical to SEQ ID NO: 2389
  chr5:141736379-141736527
  hyper

SEQ ID NO: 36654 - DNA, 41 bp, Homo sapiens; identical to SEQ ID NO: 2390
  chr5:141736531-141736572
  hyper

SEQ ID NO: 36655 - DNA, 36 bp, Homo sapiens; identical to SEQ ID NO: 2391
  chr5:141736579-141736615
  hyper

SEQ ID NO: 36656 - DNA, 31 bp, Homo sapiens; identical to SEQ ID NO: 2392
  chr5:142092798-142092829
  hyper

SEQ ID NO: 36657 - DNA, 73 bp, Homo sapiens; identical to SEQ ID NO: 2394
  chr5:142781965-142782038
  hyper

SEQ ID NO: 36658 - DNA, 72 bp, Homo sapiens; identical to SEQ ID NO: 2395
  chr5:142782056-142782128
  hyper

SEQ ID NO: 36659 - DNA, 31 bp, Homo sapiens; identical to SEQ ID NO: 2396
  chr5:142782141-142782172
  hyper

SEQ ID NO: 36660 - DNA, 212 bp, Homo sapiens; identical to SEQ ID NO: 2397
  chr5:142782221-142782433
  hyper

SEQ ID NO: 36661 - DNA, 31 bp, Homo sapiens; identical to SEQ ID NO: 2398
  chr5:142784013-142784044
  hyper

SEQ ID NO: 36662 - DNA, 108 bp, Homo sapiens
  chr5:142784568-142784676
  hyper
caaggggaagggaactcgtggtccgtcctgagaaaggagagggccgtggggcgaggggtgcccgtgcgggaagcccccgccccagctcccttccccagctcgccgcgt

SEQ ID NO: 36663 - DNA, 31 bp, Homo sapiens; identical to SEQ ID NO: 2403
  chr5:145208545-145208576
  hyper

SEQ ID NO: 36664 - DNA, 144 bp, Homo sapiens; identical to SEQ ID NO: 2404
  chr5:145214534-145214678
  hyper

SEQ ID NO: 36665 - DNA, 102 bp, Homo sapiens; identical to SEQ ID NO: 2405
  chr5:145214681-145214783
  hyper

SEQ ID NO: 36666 - DNA, 2 bp, Homo sapiens
  chr5:145214862-145214864
  hyper
ga

SEQ ID NO: 36667 - DNA, 31 bp, Homo sapiens; identical to SEQ ID NO: 2407
  chr5:145215369-145215400
  hyper

SEQ ID NO: 36668 - DNA, 31 bp, Homo sapiens; identical to SEQ ID NO: 2408
  chr5:148724796-148724827
  hyper

SEQ ID NO: 36669 - DNA, 31 bp, Homo sapiens; identical to SEQ ID NO: 2409
  chr5:148724872-148724903
  hyper

SEQ ID NO: 36670 - DNA, 135 bp, Homo sapiens
  chr5:151150429-151150564
  hyper
ccgccagtgcctgaaacgccaggaggaggggacgagttgccttttaaaggcgtagcgacgagaataagcccccacccgcggcaattcgaggctgaacaatagtggtgcagctcgggacgtggtgcgagggcccac

SEQ ID NO: 36671 - DNA, 59 bp, Homo sapiens
  chr5:151150681-151150740
  hyper
tcaggccttccaccggcgaccttccggcgggagcctgcgggcggcgcaggaacgaccct

SEQ ID NO: 36672 - DNA, 84 bp, Homo sapiens; identical to SEQ ID NO: 2411
  chr5:152871129-152871213
  hyper

SEQ ID NO: 36673 - DNA, 39 bp, Homo sapiens; identical to SEQ ID NO: 2414
  chr5:157002028-157002067
  hyper

SEQ ID NO: 36674 - DNA, 1 bp, Homo sapiens
  chr5:157002098-157002099
  hyper
g

SEQ ID NO: 36675 - DNA, 106 bp, Homo sapiens
  chr5:157002342-157002448
  hyper
cagaggaaggagaaggcgagaagggaaggctagccagtgagcggaccggctgttttctggctgcgccgggtttccccgacctctgccacctcccagggcgcagaac

SEQ ID NO: 36676 - DNA, 31 bp, Homo sapiens; identical to SEQ ID NO: 2418
  chr5:157002977-157003008
  hyper

SEQ ID NO: 36677 - DNA, 55 bp, Homo sapiens; identical to SEQ ID NO: 2419
  chr5:157003010-157003065
  hyper

SEQ ID NO: 36678 - DNA, 38 bp, Homo sapiens; identical to SEQ ID NO: 2420
  chr5:157003066-157003104
  hyper

SEQ ID NO: 36679 - DNA, 25 bp, Homo sapiens
  chr5:158478417-158478442
  hyper
ccctcccccccgctcccgcagcccc

SEQ ID NO: 36680 - DNA, 31 bp, Homo sapiens; identical to SEQ ID NO: 2426
  chr5:159228213-159228244
  hyper

SEQ ID NO: 36681 - DNA, 35 bp, Homo sapiens; identical to SEQ ID NO: 2427
  chr5:159546856-159546891
  hyper

SEQ ID NO: 36682 - DNA, 52 bp, Homo sapiens; identical to SEQ ID NO: 2428
  chr5:159826415-159826467
  hyper

SEQ ID NO: 36683 - DNA, 56 bp, Homo sapiens; identical to SEQ ID NO: 2429
  chr5:159826533-159826589
  hyper

SEQ ID NO: 36684 - DNA, 149 bp, Homo sapiens; identical to SEQ ID NO: 2434
  chr5:167718507-167718656
  hyper

SEQ ID NO: 36685 - DNA, 66 bp, Homo sapiens; identical to SEQ ID NO: 2435
  chr5:167718665-167718731
  hyper

SEQ ID NO: 36686 - DNA, 31 bp, Homo sapiens; identical to SEQ ID NO: 2436
  chr5:167718951-167718982
  hyper

SEQ ID NO: 36687 - DNA, 72 bp, Homo sapiens; identical to SEQ ID NO: 2437
  chr5:167719031-167719103
  hyper

SEQ ID NO: 36688 - DNA, 35 bp, Homo sapiens; identical to SEQ ID NO: 2438
  chr5:167719147-167719182
  hyper

SEQ ID NO: 36689 - DNA, 31 bp, Homo sapiens; identical to SEQ ID NO: 2439
  chr5:167719298-167719329
  hyper

SEQ ID NO: 36690 - DNA, 29 bp, Homo sapiens
  chr5:169063980-169064009
  hyper
gttcagtccctaggcacggcaatcaggaa

SEQ ID NO: 36691 - DNA, 31 bp, Homo sapiens; identical to SEQ ID NO: 2447
  chr5:171533959-171533990
  hyper

SEQ ID NO: 36692 - DNA, 31 bp, Homo sapiens; identical to SEQ ID NO: 2448
  chr5:172043001-172043032
  hyper

SEQ ID NO: 36693 - DNA, 31 bp, Homo sapiens; identical to SEQ ID NO: 2449
  chr5:172068482-172068513
  hyper

SEQ ID NO: 36694 - DNA, 75 bp, Homo sapiens; identical to SEQ ID NO: 2450
  chr5:172197240-172197315
  hyper

SEQ ID NO: 36695 - DNA, 31 bp, Homo sapiens; identical to SEQ ID NO: 2451
  chr5:172359606-172359637
  hyper

SEQ ID NO: 36696 - DNA, 65 bp, Homo sapiens; identical to SEQ ID NO: 2452
  chr5:172385727-172385792
  hyper

SEQ ID NO: 36697 - DNA, 50 bp, Homo sapiens; identical to SEQ ID NO: 2453
  chr5:172385794-172385844
  hyper

SEQ ID NO: 36698 - DNA, 72 bp, Homo sapiens; identical to SEQ ID NO: 2454
  chr5:172385853-172385925
  hyper

SEQ ID NO: 36699 - DNA, 45 bp, Homo sapiens; identical to SEQ ID NO: 2455
  chr5:172386282-172386327
  hyper

SEQ ID NO: 36700 - DNA, 51 bp, Homo sapiens; identical to SEQ ID NO: 2456
  chr5:172386395-172386446
  hyper

SEQ ID NO: 36701 - DNA, 31 bp, Homo sapiens; identical to SEQ ID NO: 2457
  chr5:172721108-172721139
  hyper

SEQ ID NO: 36702 - DNA, 31 bp, Homo sapiens; identical to SEQ ID NO: 2459
  chr5:176008080-176008111
  hyper

SEQ ID NO: 36703 - DNA, 45 bp, Homo sapiens; identical to SEQ ID NO: 2460
  chr5:176074861-176074906
  hyper

SEQ ID NO: 36704 - DNA, 31 bp, Homo sapiens; identical to SEQ ID NO: 2461
  chr5:176813625-176813656
  hyper

SEQ ID NO: 36705 - DNA, 31 bp, Homo sapiens; identical to SEQ ID NO: 2462
  chr5:177804050-177804081
  hyper

SEQ ID NO: 36706 - DNA, 31 bp, Homo sapiens; identical to SEQ ID NO: 2463
  chr5:178287035-178287066
  hyper

SEQ ID NO: 36707 - DNA, 152 bp, Homo sapiens; identical to SEQ ID NO: 2464
  chr5:178287096-178287248
  hyper

SEQ ID NO: 36708 - DNA, 31 bp, Homo sapiens; identical to SEQ ID NO: 2465
  chr5:178287336-178287367
  hyper

SEQ ID NO: 36709 - DNA, 199 bp, Homo sapiens; identical to SEQ ID NO: 2466
  chr5:178287401-178287600
  hyper

SEQ ID NO: 36710 - DNA, 31 bp, Homo sapiens; identical to SEQ ID NO: 2467
  chr5:178423618-178423649
  hyper

SEQ ID NO: 36711 - DNA, 31 bp, Homo sapiens; identical to SEQ ID NO: 2468
  chr5:178423673-178423704
  hyper

SEQ ID NO: 36712 - DNA, 31 bp, Homo sapiens; identical to SEQ ID NO: 2469
  chr5:178423764-178423795
  hyper

SEQ ID NO: 36713 - DNA, 34 bp, Homo sapiens; identical to SEQ ID NO: 2470
  chr5:178423799-178423833
  hyper

SEQ ID NO: 36714 - DNA, 55 bp, Homo sapiens; identical to SEQ ID NO: 2471
  chr5:179234472-179234527
  hyper

SEQ ID NO: 36715 - DNA, 95 bp, Homo sapiens; identical to SEQ ID NO: 2472
  chr5:179246494-179246589
  hyper

SEQ ID NO: 36716 - DNA, 50 bp, Homo sapiens; identical to SEQ ID NO: 2473
  chr5:180257864-180257914
  hyper

SEQ ID NO: 36717 - DNA, 31 bp, Homo sapiens; identical to SEQ ID NO: 2474
  chr5:180258943-180258974
  hyper

SEQ ID NO: 36718 - DNA, 38 bp, Homo sapiens; identical to SEQ ID NO: 2475
  chr5:180480351-180480389
  hyper

SEQ ID NO: 36719 - DNA, 42 bp, Homo sapiens; identical to SEQ ID NO: 2476
  chr5:180673931-180673973
  hyper

SEQ ID NO: 36720 - DNA, 83 bp, Homo sapiens; identical to SEQ ID NO: 2477
  chr5:180674032-180674115
  hyper

SEQ ID NO: 36721 - DNA, 47 bp, Homo sapiens; identical to SEQ ID NO: 2478
  chr5:180674116-180674163
  hyper

SEQ ID NO: 36722 - DNA, 31 bp, Homo sapiens; identical to SEQ ID NO: 2479
  chr5:180674175-180674206
  hyper

SEQ ID NO: 36723 - DNA, 44 bp, Homo sapiens; identical to SEQ ID NO: 2480
  chr5:180674226-180674270
  hyper

SEQ ID NO: 36724 - DNA, 31 bp, Homo sapiens; identical to SEQ ID NO: 2481
  chr6:391097-391128
  hyper

SEQ ID NO: 36725 - DNA, 2 bp, Homo sapiens
  chr6:391172-391174
  hyper
tt

SEQ ID NO: 36726 - DNA, 55 bp, Homo sapiens; identical to SEQ ID NO: 2491
  chr6:710878-710933
  hyper

SEQ ID NO: 36727 - DNA, 25 bp, Homo sapiens
  chr6:711029-711054
  hyper
cggcctggtgcagggacgctcactt

SEQ ID NO: 36728 - DNA, 73 bp, Homo sapiens; identical to SEQ ID NO: 2494
  chr6:1312177-1312250
  hyper

SEQ ID NO: 36729 - DNA, 20 bp, Homo sapiens
  chr6:1314062-1314082
  hyper
ccctgcggctgcccgcagcc

SEQ ID NO: 36730 - DNA, 31 bp, Homo sapiens; identical to SEQ ID NO: 2497
  chr6:1317074-1317105
  hyper

SEQ ID NO: 36731 - DNA, 53 bp, Homo sapiens; identical to SEQ ID NO: 2498
  chr6:1317109-1317162
  hyper

SEQ ID NO: 36732 - DNA, 46 bp, Homo sapiens; identical to SEQ ID NO: 2499
  chr6:1439137-1439183
  hyper

SEQ ID NO: 36733 - DNA, 31 bp, Homo sapiens; identical to SEQ ID NO: 2500
  chr6:1439254-1439285
  hyper

SEQ ID NO: 36734 - DNA, 45 bp, Homo sapiens; identical to SEQ ID NO: 2501
  chr6:1439294-1439339
  hyper

SEQ ID NO: 36735 - DNA, 31 bp, Homo sapiens; identical to SEQ ID NO: 2502
  chr6:2999296-2999327
  hyper

SEQ ID NO: 36736 - DNA, 58 bp, Homo sapiens; identical to SEQ ID NO: 2503
  chr6:3162904-3162962
  hyper

SEQ ID NO: 36737 - DNA, 56 bp, Homo sapiens; identical to SEQ ID NO: 2504
  chr6:3456149-3456205
  hyper

SEQ ID NO: 36738 - DNA, 94 bp, Homo sapiens; identical to SEQ ID NO: 2505
  chr6:3456210-3456304
  hyper

SEQ ID NO: 36739 - DNA, 36 bp, Homo sapiens; identical to SEQ ID NO: 2506
  chr6:3456338-3456374
  hyper

SEQ ID NO: 36740 - DNA, 206 bp, Homo sapiens; identical to SEQ ID NO: 2507
  chr6:3456446-3456652
  hyper

SEQ ID NO: 36741 - DNA, 277 bp, Homo sapiens; identical to SEQ ID NO: 2508
  chr6:3456740-3457017
  hyper

SEQ ID NO: 36742 - DNA, 188 bp, Homo sapiens; identical to SEQ ID NO: 2509
  chr6:3457076-3457264
  hyper

SEQ ID NO: 36743 - DNA, 67 bp, Homo sapiens; identical to SEQ ID NO: 2510
  chr6:3457536-3457603
  hyper

SEQ ID NO: 36744 - DNA, 31 bp, Homo sapiens; identical to SEQ ID NO: 2511
  chr6:3457811-3457842
  hyper

SEQ ID NO: 36745 - DNA, 77 bp, Homo sapiens; identical to SEQ ID NO: 2512
  chr6:4776193-4776270
  hyper

SEQ ID NO: 36746 - DNA, 232 bp, Homo sapiens; identical to SEQ ID NO: 2513
  chr6:7541474-7541706
  hyper

SEQ ID NO: 36747 - DNA, 90 bp, Homo sapiens; identical to SEQ ID NO: 2514
  chr6:7541771-7541861
  hyper

SEQ ID NO: 36748 - DNA, 463 bp, Homo sapiens; identical to SEQ ID NO: 2515
  chr6:7541958-7542421
  hyper

SEQ ID NO: 36749 - DNA, 267 bp, Homo sapiens; identical to SEQ ID NO: 2516
  chr6:7542422-7542689
  hyper

SEQ ID NO: 36750 - DNA, 39 bp, Homo sapiens; identical to SEQ ID NO: 2517
  chr6:7542711-7542750
  hyper

SEQ ID NO: 36751 - DNA, 107 bp, Homo sapiens; identical to SEQ ID NO: 2518
  chr6:7542946-7543053
  hyper

SEQ ID NO: 36752 - DNA, 74 bp, Homo sapiens; identical to SEQ ID NO: 2519
  chr6:7543074-7543148
  hyper

SEQ ID NO: 36753 - DNA, 64 bp, Homo sapiens; identical to SEQ ID NO: 2520
  chr6:7543174-7543238
  hyper

SEQ ID NO: 36754 - DNA, 31 bp, Homo sapiens; identical to SEQ ID NO: 2521
  chr6:10412627-10412658
  hyper

SEQ ID NO: 36755 - DNA, 16 bp, Homo sapiens
  chr6:10413314-10413330
  hyper
gcgtgctgcctttgcc

SEQ ID NO: 36756 - DNA, 31 bp, Homo sapiens; identical to SEQ ID NO: 2523
  chr6:10723050-10723081
  hyper

SEQ ID NO: 36757 - DNA, 113 bp, Homo sapiens; identical to SEQ ID NO: 2524
  chr6:13574017-13574130
  hyper

SEQ ID NO: 36758 - DNA, 31 bp, Homo sapiens; identical to SEQ ID NO: 2525
  chr6:13574133-13574164
  hyper

SEQ ID NO: 36759 - DNA, 52 bp, Homo sapiens; identical to SEQ ID NO: 2526
  chr6:14117385-14117437
  hyper

SEQ ID NO: 36760 - DNA, 31 bp, Homo sapiens; identical to SEQ ID NO: 2527
  chr6:14117462-14117493
  hyper

SEQ ID NO: 36761 - DNA, 45 bp, Homo sapiens; identical to SEQ ID NO: 2528
  chr6:14117633-14117678
  hyper

SEQ ID NO: 36762 - DNA, 74 bp, Homo sapiens; identical to SEQ ID NO: 2529
  chr6:14211102-14211176
  hyper

SEQ ID NO: 36763 - DNA, 53 bp, Homo sapiens; identical to SEQ ID NO: 2530
  chr6:14211178-14211231
  hyper

SEQ ID NO: 36764 - DNA, 45 bp, Homo sapiens; identical to SEQ ID NO: 2531
  chr6:16763512-16763557
  hyper

SEQ ID NO: 36765 - DNA, 58 bp, Homo sapiens; identical to SEQ ID NO: 2532
  chr6:16763561-16763619
  hyper

SEQ ID NO: 36766 - DNA, 31 bp, Homo sapiens; identical to SEQ ID NO: 2533
  chr6:16763634-16763665
  hyper

SEQ ID NO: 36767 - DNA, 91 bp, Homo sapiens; identical to SEQ ID NO: 2535
  chr6:17393973-17394064
  hyper

SEQ ID NO: 36768 - DNA, 45 bp, Homo sapiens; identical to SEQ ID NO: 2536
  chr6:17394074-17394119
  hyper

SEQ ID NO: 36769 - DNA, 31 bp, Homo sapiens; identical to SEQ ID NO: 2537
  chr6:17394159-17394190
  hyper

SEQ ID NO: 36770 - DNA, 165 bp, Homo sapiens; identical to SEQ ID NO: 2538
  chr6:17394196-17394361
  hyper

SEQ ID NO: 36771 - DNA, 31 bp, Homo sapiens; identical to SEQ ID NO: 2539
  chr6:17987164-17987195
  hyper

SEQ ID NO: 36772 - DNA, 76 bp, Homo sapiens; identical to SEQ ID NO: 2540
  chr6:17987215-17987291
  hyper

SEQ ID NO: 36773 - DNA, 57 bp, Homo sapiens; identical to SEQ ID NO: 2541
  chr6:17987309-17987366
  hyper

SEQ ID NO: 36774 - DNA, 31 bp, Homo sapiens; identical to SEQ ID NO: 2542
  chr6:17987686-17987717
  hyper

SEQ ID NO: 36775 - DNA, 155 bp, Homo sapiens; identical to SEQ ID NO: 2543
  chr6:18263770-18263925
  hyper

SEQ ID NO: 36776 - DNA, 54 bp, Homo sapiens; identical to SEQ ID NO: 2544
  chr6:18263932-18263986
  hyper

SEQ ID NO: 36777 - DNA, 59 bp, Homo sapiens; identical to SEQ ID NO: 2545
  chr6:18264016-18264075
  hyper

SEQ ID NO: 36778 - DNA, 249 bp, Homo sapiens; identical to SEQ ID NO: 2546
  chr6:18264081-18264330
  hyper

SEQ ID NO: 36779 - DNA, 418 bp, Homo sapiens; identical to SEQ ID NO: 2547
  chr6:18264337-18264755
  hyper

SEQ ID NO: 36780 - DNA, 482 bp, Homo sapiens; identical to SEQ ID NO: 2548
  chr6:18264758-18265240
  hyper

SEQ ID NO: 36781 - DNA, 49 bp, Homo sapiens; identical to SEQ ID NO: 2549
  chr6:19805001-19805050
  hyper

SEQ ID NO: 36782 - DNA, 484 bp, Homo sapiens; identical to SEQ ID NO: 2550
  chr6:20212303-20212787
  hyper

SEQ ID NO: 36783 - DNA, 89 bp, Homo sapiens; identical to SEQ ID NO: 2551
  chr6:20212792-20212881
  hyper

SEQ ID NO: 36784 - DNA, 66 bp, Homo sapiens; identical to SEQ ID NO: 2552
  chr6:20213040-20213106
  hyper

SEQ ID NO: 36785 - DNA, 31 bp, Homo sapiens; identical to SEQ ID NO: 2553
  chr6:20401054-20401085
  hyper

SEQ ID NO: 36786 - DNA, 112 bp, Homo sapiens; identical to SEQ ID NO: 2554
  chr6:20401120-20401232
  hyper

SEQ ID NO: 36787 - DNA, 31 bp, Homo sapiens; identical to SEQ ID NO: 2555
  chr6:20401287-20401318
  hyper

SEQ ID NO: 36788 - DNA, 31 bp, Homo sapiens; identical to SEQ ID NO: 2556
  chr6:20401348-20401379
  hyper

SEQ ID NO: 36789 - DNA, 31 bp, Homo sapiens; identical to SEQ ID NO: 2557
  chr6:21332629-21332660
  hyper

SEQ ID NO: 36790 - DNA, 31 bp, Homo sapiens; identical to SEQ ID NO: 2558
  chr6:21588775-21588806
  hyper

SEQ ID NO: 36791 - DNA, 31 bp, Homo sapiens; identical to SEQ ID NO: 2559
  chr6:21594474-21594505
  hyper

SEQ ID NO: 36792 - DNA, 38 bp, Homo sapiens; identical to SEQ ID NO: 2560
  chr6:21594537-21594575
  hyper

SEQ ID NO: 36793 - DNA, 567 bp, Homo sapiens; identical to SEQ ID NO: 2561
  chr6:21594597-21595164
  hyper

SEQ ID NO: 36794 - DNA, 31 bp, Homo sapiens; identical to SEQ ID NO: 2562
  chr6:21595200-21595231
  hyper

SEQ ID NO: 36795 - DNA, 372 bp, Homo sapiens; identical to SEQ ID NO: 2563
  chr6:21595234-21595606
  hyper

SEQ ID NO: 36796 - DNA, 37 bp, Homo sapiens; identical to SEQ ID NO: 2564
  chr6:21595890-21595927
  hyper

SEQ ID NO: 36797 - DNA, 136 bp, Homo sapiens; identical to SEQ ID NO: 2565
  chr6:21596019-21596155
  hyper

SEQ ID NO: 36798 - DNA, 31 bp, Homo sapiens; identical to SEQ ID NO: 2566
  chr6:22146871-22146902
  hyper

SEQ ID NO: 36799 - DNA, 38 bp, Homo sapiens; identical to SEQ ID NO: 2567
  chr6:22146906-22146944
  hyper

SEQ ID NO: 36800 - DNA, 100 bp, Homo sapiens; identical to SEQ ID NO: 2568
  chr6:22146954-22147054
  hyper

SEQ ID NO: 36801 - DNA, 31 bp, Homo sapiens; identical to SEQ ID NO: 2571
  chr6:24911397-24911428
  hyper

SEQ ID NO: 36802 - DNA, 46 bp, Homo sapiens; identical to SEQ ID NO: 2572
  chr6:25280012-25280058
  hyper

SEQ ID NO: 36803 - DNA, 53 bp, Homo sapiens; identical to SEQ ID NO: 2573
  chr6:25280127-25280180
  hyper

SEQ ID NO: 36804 - DNA, 31 bp, Homo sapiens; identical to SEQ ID NO: 2587
  chr6:26322240-26322271
  hyper

SEQ ID NO: 36805 - DNA, 39 bp, Homo sapiens; identical to SEQ ID NO: 2589
  chr6:26322362-26322401
  hyper

SEQ ID NO: 36806 - DNA, 157 bp, Homo sapiens
  chr6:26322412-26322569
  hyper
agtgggagcactcttgcgagaggcttttgtagccagttgcttcccgggtgctttgccaccggtcgatttgccggtcgatttgcgggcagtcggctttctacgagccgtggtatagagacctccttacttaccccgcttctcctttggctggagctcg

SEQ ID NO: 36807 - DNA, 2 bp, Homo sapiens
  chr6:26327805-26327807
  hyper
tt

SEQ ID NO: 36808 - DNA, 87 bp, Homo sapiens
  chr6:26331617-26331704
  hyper
tatgtaatgtactccccgccatacagttatctgagccagcgagctaaaaactgttgaccccgacgtgatttgaacacgcaaccttct

SEQ ID NO: 36809 - DNA, 47 bp, Homo sapiens; identical to SEQ ID NO: 2595
  chr6:26331843-26331890
  hyper

SEQ ID NO: 36810 - DNA, 2 bp, Homo sapiens
  chr6:26332133-26332135
  hyper
ag

SEQ ID NO: 36811 - DNA, 53 bp, Homo sapiens; identical to SEQ ID NO: 2598
  chr6:26332287-26332340
  hyper

SEQ ID NO: 36812 - DNA, 2 bp, Homo sapiens
  chr6:26555187-26555189
  hyper
ga

SEQ ID NO: 36813 - DNA, 38 bp, Homo sapiens
  chr6:27100412-27100450
  hyper
ggaatagctctccttgcggctgcgcttgcgcttcttgc

SEQ ID NO: 36814 - DNA, 61 bp, Homo sapiens
  chr6:27101049-27101110
  hyper
cgggcaacgcggcccgcgacaacaagaagacccgcatcatcccgcgtcatctccaactggc

SEQ ID NO: 36815 - DNA, 30 bp, Homo sapiens; identical to SEQ ID NO: 2608
  chr6:27107238-27107268
  hyper

SEQ ID NO: 36816 - DNA, 46 bp, Homo sapiens; identical to SEQ ID NO: 2609
  chr6:27440465-27440511
  hyper

SEQ ID NO: 36817 - DNA, 30 bp, Homo sapiens
  chr6:27471333-27471363
  hyper
tcgacaccaccacaatcgaaagaccaggct

SEQ ID NO: 36818 - DNA, 49 bp, Homo sapiens; identical to SEQ ID NO: 2614
  chr6:35464207-35464256
  hyper

SEQ ID NO: 36819 - DNA, 31 bp, Homo sapiens; identical to SEQ ID NO: 2615
  chr6:35464287-35464318
  hyper

SEQ ID NO: 36820 - DNA, 38 bp, Homo sapiens; identical to SEQ ID NO: 2616
  chr6:35464330-35464368
  hyper

SEQ ID NO: 36821 - DNA, 31 bp, Homo sapiens; identical to SEQ ID NO: 2617
  chr6:35465519-35465550
  hyper

SEQ ID NO: 36822 - DNA, 31 bp, Homo sapiens; identical to SEQ ID NO: 2618
  chr6:35523457-35523488
  hyper

SEQ ID NO: 36823 - DNA, 31 bp, Homo sapiens; identical to SEQ ID NO: 2619
  chr6:37446156-37446187
  hyper

SEQ ID NO: 36824 - DNA, 2 bp, Homo sapiens
  chr6:41337023-41337025
  hyper
aa

SEQ ID NO: 36825 - DNA, 52 bp, Homo sapiens; identical to SEQ ID NO: 2622
  chr6:42109901-42109953
  hyper

SEQ ID NO: 36826 - DNA, 31 bp, Homo sapiens; identical to SEQ ID NO: 2623
  chr6:42989813-42989844
  hyper

SEQ ID NO: 36827 - DNA, 31 bp, Homo sapiens; identical to SEQ ID NO: 2624
  chr6:43081635-43081666
  hyper

SEQ ID NO: 36828 - DNA, 44 bp, Homo sapiens; identical to SEQ ID NO: 2625
  chr6:43081717-43081761
  hyper

SEQ ID NO: 36829 - DNA, 70 bp, Homo sapiens; identical to SEQ ID NO: 2626
  chr6:43138367-43138437
  hyper

SEQ ID NO: 36830 - DNA, 71 bp, Homo sapiens; identical to SEQ ID NO: 2627
  chr6:43138465-43138536
  hyper

SEQ ID NO: 36831 - DNA, 39 bp, Homo sapiens; identical to SEQ ID NO: 2629
  chr6:43478198-43478237
  hyper

SEQ ID NO: 36832 - DNA, 46 bp, Homo sapiens; identical to SEQ ID NO: 2630
  chr6:43969982-43970028
  hyper

SEQ ID NO: 36833 - DNA, 67 bp, Homo sapiens; identical to SEQ ID NO: 2631
  chr6:44094339-44094406
  hyper

SEQ ID NO: 36834 - DNA, 58 bp, Homo sapiens; identical to SEQ ID NO: 2632
  chr6:44095870-44095928
  hyper

SEQ ID NO: 36835 - DNA, 41 bp, Homo sapiens; identical to SEQ ID NO: 2633
  chr6:44096003-44096044
  hyper

SEQ ID NO: 36836 - DNA, 61 bp, Homo sapiens; identical to SEQ ID NO: 2634
  chr6:46816791-46816852
  hyper

SEQ ID NO: 36837 - DNA, 39 bp, Homo sapiens; identical to SEQ ID NO: 2635
  chr6:47276364-47276403
  hyper

SEQ ID NO: 36838 - DNA, 124 bp, Homo sapiens; identical to SEQ ID NO: 2636
  chr6:47276439-47276563
  hyper

SEQ ID NO: 36839 - DNA, 328 bp, Homo sapiens; identical to SEQ ID NO: 2637
  chr6:47276576-47276904
  hyper

SEQ ID NO: 36840 - DNA, 36 bp, Homo sapiens; identical to SEQ ID NO: 2638
  chr6:47277325-47277361
  hyper

SEQ ID NO: 36841 - DNA, 31 bp, Homo sapiens; identical to SEQ ID NO: 2639
  chr6:50691162-50691193
  hyper

SEQ ID NO: 36842 - DNA, 31 bp, Homo sapiens; identical to SEQ ID NO: 2640
  chr6:50814235-50814266
  hyper

SEQ ID NO: 36843 - DNA, 30 bp, Homo sapiens
  chr6:52227722-52227752
  hyper
gcagctggctaatgggcggatgctggggct

SEQ ID NO: 36844 - DNA, 41 bp, Homo sapiens; identical to SEQ ID NO: 2643
  chr6:52535727-52535768
  hyper

SEQ ID NO: 36845 - DNA, 31 bp, Homo sapiens; identical to SEQ ID NO: 2649
  chr6:56820670-56820701
  hyper

SEQ ID NO: 36846 - DNA, 14 bp, Homo sapiens
  chr6:56820743-56820757
  hyper
tgatgcaatgccag

SEQ ID NO: 36847 - DNA, 31 bp, Homo sapiens; identical to SEQ ID NO: 2651
  chr6:64283109-64283140
  hyper

SEQ ID NO: 36848 - DNA, 2 bp, Homo sapiens
  chr6:73329783-73329785
  hyper
aa

SEQ ID NO: 36849 - DNA, 22 bp, Homo sapiens
  chr6:73333099-73333121
  hyper
ttgtggcgcggagtcaaagagt

SEQ ID NO: 36850 - DNA, 31 bp, Homo sapiens; identical to SEQ ID NO: 2676
  chr6:74019357-74019388
  hyper

SEQ ID NO: 36851 - DNA, 60 bp, Homo sapiens; identical to SEQ ID NO: 2680
  chr6:74020105-74020165
  hyper

SEQ ID NO: 36852 - DNA, 37 bp, Homo sapiens; identical to SEQ ID NO: 2682
  chr6:74161339-74161376
  hyper

SEQ ID NO: 36853 - DNA, 111 bp, Homo sapiens; identical to SEQ ID NO: 2683
  chr6:74161387-74161498
  hyper

SEQ ID NO: 36854 - DNA, 2 bp, Homo sapiens
  chr6:75918552-75918554
  hyper
ct

SEQ ID NO: 36855 - DNA, 87 bp, Homo sapiens; identical to SEQ ID NO: 2687
  chr6:76458863-76458950
  hyper

SEQ ID NO: 36856 - DNA, 34 bp, Homo sapiens; identical to SEQ ID NO: 2688
  chr6:76459158-76459192
  hyper

SEQ ID NO: 36857 - DNA, 31 bp, Homo sapiens; identical to SEQ ID NO: 2689
  chr6:80246695-80246726
  hyper

SEQ ID NO: 36858 - DNA, 79 bp, Homo sapiens; identical to SEQ ID NO: 2690
  chr6:80246771-80246850
  hyper

SEQ ID NO: 36859 - DNA, 44 bp, Homo sapiens; identical to SEQ ID NO: 2691
  chr6:80246893-80246937
  hyper

SEQ ID NO: 36860 - DNA, 47 bp, Homo sapiens; identical to SEQ ID NO: 2692
  chr6:80247011-80247058
  hyper

SEQ ID NO: 36861 - DNA, 118 bp, Homo sapiens; identical to SEQ ID NO: 2693
  chr6:80247059-80247177
  hyper

SEQ ID NO: 36862 - DNA, 42 bp, Homo sapiens; identical to SEQ ID NO: 2694
  chr6:80340980-80341022
  hyper

SEQ ID NO: 36863 - DNA, 93 bp, Homo sapiens
  chr6:80341182-80341275
  hyper
tcatccgcgtgttcatcgcctcttcctcgggcttcgtggcggtgagcgcggtgggggcgggcagtaggttggggtcgcggggcgcgggtcctg

SEQ ID NO: 36864 - DNA, 58 bp, Homo sapiens; identical to SEQ ID NO: 2696
  chr6:80341368-80341426
  hyper

SEQ ID NO: 36865 - DNA, 31 bp, Homo sapiens; identical to SEQ ID NO: 2697
  chr6:80341526-80341557
  hyper

SEQ ID NO: 36866 - DNA, 31 bp, Homo sapiens; identical to SEQ ID NO: 2698
  chr6:82461817-82461848
  hyper

SEQ ID NO: 36867 - DNA, 104 bp, Homo sapiens; identical to SEQ ID NO: 2699
  chr6:82461998-82462102
  hyper

SEQ ID NO: 36868 - DNA, 138 bp, Homo sapiens; identical to SEQ ID NO: 2700
  chr6:82462104-82462242
  hyper

SEQ ID NO: 36869 - DNA, 89 bp, Homo sapiens; identical to SEQ ID NO: 2701
  chr6:82462323-82462412
  hyper

SEQ ID NO: 36870 - DNA, 257 bp, Homo sapiens; identical to SEQ ID NO: 2702
  chr6:82462413-82462670
  hyper

SEQ ID NO: 36871 - DNA, 35 bp, Homo sapiens; identical to SEQ ID NO: 2703
  chr6:82462926-82462961
  hyper

SEQ ID NO: 36872 - DNA, 209 bp, Homo sapiens; identical to SEQ ID NO: 2704
  chr6:82462965-82463174
  hyper

SEQ ID NO: 36873 - DNA, 44 bp, Homo sapiens; identical to SEQ ID NO: 2705
  chr6:82463433-82463477
  hyper

SEQ ID NO: 36874 - DNA, 31 bp, Homo sapiens; identical to SEQ ID NO: 2706
  chr6:82463480-82463511
  hyper

SEQ ID NO: 36875 - DNA, 62 bp, Homo sapiens; identical to SEQ ID NO: 2707
  chr6:82463517-82463579
  hyper

SEQ ID NO: 36876 - DNA, 31 bp, Homo sapiens; identical to SEQ ID NO: 2708
  chr6:82463621-82463652
  hyper

SEQ ID NO: 36877 - DNA, 42 bp, Homo sapiens; identical to SEQ ID NO: 2709
  chr6:82463769-82463811
  hyper

SEQ ID NO: 36878 - DNA, 34 bp, Homo sapiens; identical to SEQ ID NO: 2710
  chr6:83903707-83903741
  hyper

SEQ ID NO: 36879 - DNA, 31 bp, Homo sapiens; identical to SEQ ID NO: 2711
  chr6:84743240-84743271
  hyper

SEQ ID NO: 36880 - DNA, 50 bp, Homo sapiens; identical to SEQ ID NO: 2712
  chr6:84744191-84744241
  hyper

SEQ ID NO: 36881 - DNA, 42 bp, Homo sapiens
  chr6:90121293-90121335
  hyper
cagaagcgcgcgctcctccagcccagacgcttactccctcct

SEQ ID NO: 36882 - DNA, 42 bp, Homo sapiens; identical to SEQ ID NO: 2724
  chr6:90121390-90121432
  hyper

SEQ ID NO: 36883 - DNA, 2 bp, Homo sapiens
  chr6:91004760-91004762
  hyper
ct

SEQ ID NO: 36884 - DNA, 34 bp, Homo sapiens; identical to SEQ ID NO: 2731
  chr6:99962858-99962892
  hyper

SEQ ID NO: 36885 - DNA, 31 bp, Homo sapiens; identical to SEQ ID NO: 2732
  chr6:99962894-99962925
  hyper

SEQ ID NO: 36886 - DNA, 35 bp, Homo sapiens
  chr6:106959905-106959940
  hyper
ccgcgggaggactaggcgaggcccctaacggagcc

SEQ ID NO: 36887 - DNA, 45 bp, Homo sapiens; identical to SEQ ID NO: 2734
  chr6:106960068-106960113
  hyper

SEQ ID NO: 36888 - DNA, 40 bp, Homo sapiens; identical to SEQ ID NO: 2735
  chr6:106960148-106960188
  hyper

SEQ ID NO: 36889 - DNA, 31 bp, Homo sapiens; identical to SEQ ID NO: 2739
  chr6:108435948-108435979
  hyper

SEQ ID NO: 36890 - DNA, 96 bp, Homo sapiens; identical to SEQ ID NO: 2740
  chr6:108882163-108882259
  hyper

SEQ ID NO: 36891 - DNA, 74 bp, Homo sapiens; identical to SEQ ID NO: 2741
  chr6:108882273-108882347
  hyper

SEQ ID NO: 36892 - DNA, 112 bp, Homo sapiens; identical to SEQ ID NO: 2742
  chr6:109777315-109777427
  hyper

SEQ ID NO: 36893 - DNA, 40 bp, Homo sapiens; identical to SEQ ID NO: 2743
  chr6:109777566-109777606
  hyper

SEQ ID NO: 36894 - DNA, 31 bp, Homo sapiens; identical to SEQ ID NO: 2744
  chr6:114180217-114180248
  hyper

SEQ ID NO: 36895 - DNA, 95 bp, Homo sapiens; identical to SEQ ID NO: 2745
  chr6:116691811-116691906
  hyper

SEQ ID NO: 36896 - DNA, 151 bp, Homo sapiens; identical to SEQ ID NO: 2746
  chr6:117803612-117803763
  hyper

SEQ ID NO: 36897 - DNA, 31 bp, Homo sapiens; identical to SEQ ID NO: 2747
  chr6:117803795-117803826
  hyper

SEQ ID NO: 36898 - DNA, 108 bp, Homo sapiens; identical to SEQ ID NO: 2748
  chr6:117804001-117804109
  hyper

SEQ ID NO: 36899 - DNA, 113 bp, Homo sapiens; identical to SEQ ID NO: 2749
  chr6:117804130-117804243
  hyper

SEQ ID NO: 36900 - DNA, 31 bp, Homo sapiens; identical to SEQ ID NO: 2750
  chr6:117804250-117804281
  hyper

SEQ ID NO: 36901 - DNA, 222 bp, Homo sapiens; identical to SEQ ID NO: 2751
  chr6:117804487-117804709
  hyper

SEQ ID NO: 36902 - DNA, 31 bp, Homo sapiens; identical to SEQ ID NO: 2752
  chr6:117804754-117804785
  hyper

SEQ ID NO: 36903 - DNA, 68 bp, Homo sapiens; identical to SEQ ID NO: 2753
  chr6:123110666-123110734
  hyper

SEQ ID NO: 36904 - DNA, 31 bp, Homo sapiens; identical to SEQ ID NO: 2755
  chr6:128840107-128840138
  hyper

SEQ ID NO: 36905 - DNA, 51 bp, Homo sapiens; identical to SEQ ID NO: 2756
  chr6:128840643-128840694
  hyper

SEQ ID NO: 36906 - DNA, 40 bp, Homo sapiens; identical to SEQ ID NO: 2757
  chr6:128840870-128840910
  hyper

SEQ ID NO: 36907 - DNA, 31 bp, Homo sapiens; identical to SEQ ID NO: 2758
  chr6:128841154-128841185
  hyper

SEQ ID NO: 36908 - DNA, 31 bp, Homo sapiens; identical to SEQ ID NO: 2759
  chr6:128841229-128841260
  hyper

SEQ ID NO: 36909 - DNA, 93 bp, Homo sapiens; identical to SEQ ID NO: 2760
  chr6:128841274-128841367
  hyper

SEQ ID NO: 36910 - DNA, 50 bp, Homo sapiens; identical to SEQ ID NO: 2761
  chr6:128841390-128841440
  hyper

SEQ ID NO: 36911 - DNA, 34 bp, Homo sapiens
  chr6:128841544-128841578
  hyper
gccggggggatcgccgcgaaatccacgacggagg

SEQ ID NO: 36912 - DNA, 31 bp, Homo sapiens; identical to SEQ ID NO: 2763
  chr6:128842219-128842250
  hyper

SEQ ID NO: 36913 - DNA, 31 bp, Homo sapiens; identical to SEQ ID NO: 2764
  chr6:128842301-128842332
  hyper

SEQ ID NO: 36914 - DNA, 31 bp, Homo sapiens; identical to SEQ ID NO: 2765
  chr6:130342613-130342644
  hyper

SEQ ID NO: 36915 - DNA, 31 bp, Homo sapiens; identical to SEQ ID NO: 2767
  chr6:132271776-132271807
  hyper

SEQ ID NO: 36916 - DNA, 63 bp, Homo sapiens; identical to SEQ ID NO: 2768
  chr6:132271810-132271873
  hyper

SEQ ID NO: 36917 - DNA, 31 bp, Homo sapiens; identical to SEQ ID NO: 2769
  chr6:133146627-133146658
  hyper

SEQ ID NO: 36918 - DNA, 31 bp, Homo sapiens; identical to SEQ ID NO: 2770
  chr6:133146679-133146710
  hyper

SEQ ID NO: 36919 - DNA, 31 bp, Homo sapiens; identical to SEQ ID NO: 2771
  chr6:133146717-133146748
  hyper

SEQ ID NO: 36920 - DNA, 49 bp, Homo sapiens; identical to SEQ ID NO: 2772
  chr6:133146772-133146821
  hyper

SEQ ID NO: 36921 - DNA, 31 bp, Homo sapiens; identical to SEQ ID NO: 2775
  chr6:136870741-136870772
  hyper

SEQ ID NO: 36922 - DNA, 204 bp, Homo sapiens; identical to SEQ ID NO: 2776
  chr6:136870810-136871014
  hyper

SEQ ID NO: 36923 - DNA, 56 bp, Homo sapiens; identical to SEQ ID NO: 2777
  chr6:136871047-136871103
  hyper

SEQ ID NO: 36924 - DNA, 199 bp, Homo sapiens; identical to SEQ ID NO: 2778
  chr6:136871106-136871305
  hyper

SEQ ID NO: 36925 - DNA, 128 bp, Homo sapiens; identical to SEQ ID NO: 2779
  chr6:136871798-136871926
  hyper

SEQ ID NO: 36926 - DNA, 66 bp, Homo sapiens; identical to SEQ ID NO: 2780
  chr6:138428362-138428428
  hyper

SEQ ID NO: 36927 - DNA, 44 bp, Homo sapiens; identical to SEQ ID NO: 2781
  chr6:138428546-138428590
  hyper

SEQ ID NO: 36928 - DNA, 31 bp, Homo sapiens; identical to SEQ ID NO: 2782
  chr6:138428797-138428828
  hyper

SEQ ID NO: 36929 - DNA, 43 bp, Homo sapiens; identical to SEQ ID NO: 2783
  chr6:138428877-138428920
  hyper

SEQ ID NO: 36930 - DNA, 31 bp, Homo sapiens; identical to SEQ ID NO: 2784
  chr6:138482424-138482455
  hyper

SEQ ID NO: 36931 - DNA, 43 bp, Homo sapiens; identical to SEQ ID NO: 2785
  chr6:138482591-138482634
  hyper

SEQ ID NO: 36932 - DNA, 44 bp, Homo sapiens; identical to SEQ ID NO: 2786
  chr6:138482649-138482693
  hyper

SEQ ID NO: 36933 - DNA, 133 bp, Homo sapiens; identical to SEQ ID NO: 2787
  chr6:138482735-138482868
  hyper

SEQ ID NO: 36934 - DNA, 187 bp, Homo sapiens; identical to SEQ ID NO: 2788
  chr6:138482902-138483089
  hyper

SEQ ID NO: 36935 - DNA, 43 bp, Homo sapiens; identical to SEQ ID NO: 2789
  chr6:138483409-138483452
  hyper

SEQ ID NO: 36936 - DNA, 31 bp, Homo sapiens; identical to SEQ ID NO: 2790
  chr6:138483455-138483486
  hyper

SEQ ID NO: 36937 - DNA, 48 bp, Homo sapiens; identical to SEQ ID NO: 2791
  chr6:138483675-138483723
  hyper

SEQ ID NO: 36938 - DNA, 175 bp, Homo sapiens; identical to SEQ ID NO: 2792
  chr6:139013360-139013535
  hyper

SEQ ID NO: 36939 - DNA, 71 bp, Homo sapiens; identical to SEQ ID NO: 2793
  chr6:139013607-139013678
  hyper

SEQ ID NO: 36940 - DNA, 122 bp, Homo sapiens; identical to SEQ ID NO: 2794
  chr6:139013722-139013844
  hyper

SEQ ID NO: 36941 - DNA, 31 bp, Homo sapiens; identical to SEQ ID NO: 2795
  chr6:143266116-143266147
  hyper

SEQ ID NO: 36942 - DNA, 86 bp, Homo sapiens; identical to SEQ ID NO: 2796
  chr6:143999273-143999359
  hyper

SEQ ID NO: 36943 - DNA, 69 bp, Homo sapiens; identical to SEQ ID NO: 2797
  chr6:144606892-144606961
  hyper

SEQ ID NO: 36944 - DNA, 31 bp, Homo sapiens; identical to SEQ ID NO: 2798
  chr6:144606966-144606997
  hyper

SEQ ID NO: 36945 - DNA, 38 bp, Homo sapiens; identical to SEQ ID NO: 2799
  chr6:144607005-144607043
  hyper

SEQ ID NO: 36946 - DNA, 31 bp, Homo sapiens; identical to SEQ ID NO: 2800
  chr6:144607217-144607248
  hyper

SEQ ID NO: 36947 - DNA, 104 bp, Homo sapiens; identical to SEQ ID NO: 2801
  chr6:144607276-144607380
  hyper

SEQ ID NO: 36948 - DNA, 31 bp, Homo sapiens; identical to SEQ ID NO: 2802
  chr6:146136665-146136696
  hyper

SEQ ID NO: 36949 - DNA, 224 bp, Homo sapiens
  chr6:146864539-146864763
  hyper
gcccccagtgaacctccggggcccataaaggctccaggccggctccccggaggcccaccagcgggcgtctgggcctccctccgcgccgcgaccgccaggaggcgccgcccgggagaggaagtccagctgggcccggccgggcttcggaggcgccgcccgggagaggaagtccagttgggcccggccgggcttcagaggcgcagggcgggagccgcctcgcgcag

SEQ ID NO: 36950 - DNA, 56 bp, Homo sapiens
  chr6:146864878-146864934
  hyper
agcgggcgcggcggagggctggccggcctcgggggagtttccgcggccgccggggg

SEQ ID NO: 36951 - DNA, 31 bp, Homo sapiens; identical to SEQ ID NO: 2804
  chr6:147828940-147828971
  hyper

SEQ ID NO: 36952 - DNA, 51 bp, Homo sapiens; identical to SEQ ID NO: 2805
  chr6:150039629-150039680
  hyper

SEQ ID NO: 36953 - DNA, 74 bp, Homo sapiens; identical to SEQ ID NO: 2806
  chr6:150039682-150039756
  hyper

SEQ ID NO: 36954 - DNA, 62 bp, Homo sapiens; identical to SEQ ID NO: 2807
  chr6:150071939-150072001
  hyper

SEQ ID NO: 36955 - DNA, 31 bp, Homo sapiens; identical to SEQ ID NO: 2808
  chr6:150072014-150072045
  hyper

SEQ ID NO: 36956 - DNA, 31 bp, Homo sapiens; identical to SEQ ID NO: 2809
  chr6:150072105-150072136
  hyper

SEQ ID NO: 36957 - DNA, 88 bp, Homo sapiens; identical to SEQ ID NO: 2810
  chr6:150185521-150185609
  hyper

SEQ ID NO: 36958 - DNA, 31 bp, Homo sapiens; identical to SEQ ID NO: 2811
  chr6:150185610-150185641
  hyper

SEQ ID NO: 36959 - DNA, 38 bp, Homo sapiens; identical to SEQ ID NO: 2813
  chr6:150463671-150463709
  hyper

SEQ ID NO: 36960 - DNA, 28 bp, Homo sapiens
  chr6:152622887-152622915
  hyper
tctgaatctgcaagatcgaaggctggtc

SEQ ID NO: 36961 - DNA, 30 bp, Homo sapiens
  chr6:152623493-152623523
  hyper
ggaatcatgaacttccgcaacattaggaac

SEQ ID NO: 36962 - DNA, 42 bp, Homo sapiens
  chr6:154830765-154830807
  hyper
ctgggcaggcggcatggacgaggtcccgcgggagtcacccac

SEQ ID NO: 36963 - DNA, 130 bp, Homo sapiens; identical to SEQ ID NO: 2820
  chr6:154830817-154830947
  hyper

SEQ ID NO: 36964 - DNA, 153 bp, Homo sapiens; identical to SEQ ID NO: 2821
  chr6:154830966-154831119
  hyper

SEQ ID NO: 36965 - DNA, 80 bp, Homo sapiens; identical to SEQ ID NO: 2822
  chr6:154831125-154831205
  hyper

SEQ ID NO: 36966 - DNA, 132 bp, Homo sapiens; identical to SEQ ID NO: 2823
  chr6:154831222-154831354
  hyper

SEQ ID NO: 36967 - DNA, 48 bp, Homo sapiens; identical to SEQ ID NO: 2824
  chr6:154831462-154831510
  hyper

SEQ ID NO: 36968 - DNA, 91 bp, Homo sapiens; identical to SEQ ID NO: 2825
  chr6:154831530-154831621
  hyper

SEQ ID NO: 36969 - DNA, 163 bp, Homo sapiens; identical to SEQ ID NO: 2826
  chr6:154831742-154831905
  hyper

SEQ ID NO: 36970 - DNA, 43 bp, Homo sapiens; identical to SEQ ID NO: 2827
  chr6:154831918-154831961
  hyper

SEQ ID NO: 36971 - DNA, 59 bp, Homo sapiens; identical to SEQ ID NO: 2828
  chr6:157802883-157802942
  hyper

SEQ ID NO: 36972 - DNA, 36 bp, Homo sapiens; identical to SEQ ID NO: 2829
  chr6:158244129-158244165
  hyper

SEQ ID NO: 36973 - DNA, 71 bp, Homo sapiens; identical to SEQ ID NO: 2830
  chr6:158244316-158244387
  hyper

SEQ ID NO: 36974 - DNA, 31 bp, Homo sapiens; identical to SEQ ID NO: 2831
  chr6:158244423-158244454
  hyper

SEQ ID NO: 36975 - DNA, 51 bp, Homo sapiens; identical to SEQ ID NO: 2832
  chr6:158244503-158244554
  hyper

SEQ ID NO: 36976 - DNA, 45 bp, Homo sapiens; identical to SEQ ID NO: 2835
  chr6:160389821-160389866
  hyper

SEQ ID NO: 36977 - DNA, 31 bp, Homo sapiens; identical to SEQ ID NO: 2841
  chr6:163837419-163837450
  hyper

SEQ ID NO: 36978 - DNA, 31 bp, Homo sapiens; identical to SEQ ID NO: 2842
  chr6:166822698-166822729
  hyper

SEQ ID NO: 36979 - DNA, 31 bp, Homo sapiens; identical to SEQ ID NO: 2843
  chr6:167764747-167764778
  hyper

SEQ ID NO: 36980 - DNA, 31 bp, Homo sapiens; identical to SEQ ID NO: 2844
  chr6:167764844-167764875
  hyper

SEQ ID NO: 36981 - DNA, 1 bp, Homo sapiens
  chr6:167764951-167764952
  hyper
a

SEQ ID NO: 36982 - DNA, 7 bp, Homo sapiens
  chr6:167765145-167765152
  hyper
tgcgcct

SEQ ID NO: 36983 - DNA, 31 bp, Homo sapiens; identical to SEQ ID NO: 2846
  chr6:168226996-168227027
  hyper

SEQ ID NO: 36984 - DNA, 58 bp, Homo sapiens; identical to SEQ ID NO: 2847
  chr6:168227058-168227116
  hyper

SEQ ID NO: 36985 - DNA, 44 bp, Homo sapiens; identical to SEQ ID NO: 2848
  chr6:168227132-168227176
  hyper

SEQ ID NO: 36986 - DNA, 31 bp, Homo sapiens; identical to SEQ ID NO: 2849
  chr6:168227196-168227227
  hyper

SEQ ID NO: 36987 - DNA, 70 bp, Homo sapiens; identical to SEQ ID NO: 2850
  chr6:168227398-168227468
  hyper

SEQ ID NO: 36988 - DNA, 34 bp, Homo sapiens; identical to SEQ ID NO: 2851
  chr6:168227909-168227943
  hyper

SEQ ID NO: 36989 - DNA, 85 bp, Homo sapiens; identical to SEQ ID NO: 2852
  chr6:168228221-168228306
  hyper

SEQ ID NO: 36990 - DNA, 34 bp, Homo sapiens; identical to SEQ ID NO: 2853
  chr6:168228538-168228572
  hyper

SEQ ID NO: 36991 - DNA, 31 bp, Homo sapiens; identical to SEQ ID NO: 2854
  chr6:170605113-170605144
  hyper

SEQ ID NO: 36992 - DNA, 102 bp, Homo sapiens; identical to SEQ ID NO: 2855
  chr7:362169-362271
  hyper

SEQ ID NO: 36993 - DNA, 104 bp, Homo sapiens; identical to SEQ ID NO: 2856
  chr7:557734-557838
  hyper

SEQ ID NO: 36994 - DNA, 55 bp, Homo sapiens; identical to SEQ ID NO: 2857
  chr7:557848-557903
  hyper

SEQ ID NO: 36995 - DNA, 31 bp, Homo sapiens; identical to SEQ ID NO: 2858
  chr7:557943-557974
  hyper

SEQ ID NO: 36996 - DNA, 37 bp, Homo sapiens; identical to SEQ ID NO: 2860
  chr7:558726-558763
  hyper

SEQ ID NO: 36997 - DNA, 43 bp, Homo sapiens; identical to SEQ ID NO: 2861
  chr7:559053-559096
  hyper

SEQ ID NO: 36998 - DNA, 31 bp, Homo sapiens; identical to SEQ ID NO: 2862
  chr7:559250-559281
  hyper

SEQ ID NO: 36999 - DNA, 57 bp, Homo sapiens; identical to SEQ ID NO: 2863
  chr7:559287-559344
  hyper

SEQ ID NO: 37000 - DNA, 73 bp, Homo sapiens; identical to SEQ ID NO: 2864
  chr7:559418-559491
  hyper

SEQ ID NO: 37001 - DNA, 37 bp, Homo sapiens; identical to SEQ ID NO: 2865
  chr7:822391-822428
  hyper

SEQ ID NO: 37002 - DNA, 31 bp, Homo sapiens; identical to SEQ ID NO: 2866
  chr7:932818-932849
  hyper

SEQ ID NO: 37003 - DNA, 37 bp, Homo sapiens; identical to SEQ ID NO: 2867
  chr7:932916-932953
  hyper

SEQ ID NO: 37004 - DNA, 57 bp, Homo sapiens; identical to SEQ ID NO: 2868
  chr7:932991-933048
  hyper

SEQ ID NO: 37005 - DNA, 62 bp, Homo sapiens; identical to SEQ ID NO: 2869
  chr7:1007912-1007974
  hyper

SEQ ID NO: 37006 - DNA, 65 bp, Homo sapiens; identical to SEQ ID NO: 2870
  chr7:1007997-1008062
  hyper

SEQ ID NO: 37007 - DNA, 31 bp, Homo sapiens; identical to SEQ ID NO: 2871
  chr7:1069676-1069707
  hyper

SEQ ID NO: 37008 - DNA, 37 bp, Homo sapiens; identical to SEQ ID NO: 2872
  chr7:1083967-1084004
  hyper

SEQ ID NO: 37009 - DNA, 71 bp, Homo sapiens; identical to SEQ ID NO: 2873
  chr7:1084018-1084089
  hyper

SEQ ID NO: 37010 - DNA, 47 bp, Homo sapiens; identical to SEQ ID NO: 2874
  chr7:1084187-1084234
  hyper

SEQ ID NO: 37011 - DNA, 38 bp, Homo sapiens; identical to SEQ ID NO: 2876
  chr7:1498584-1498622
  hyper

SEQ ID NO: 37012 - DNA, 269 bp, Homo sapiens; identical to SEQ ID NO: 2877
  chr7:1498624-1498893
  hyper

SEQ ID NO: 37013 - DNA, 329 bp, Homo sapiens; identical to SEQ ID NO: 2878
  chr7:1498940-1499269
  hyper

SEQ ID NO: 37014 - DNA, 31 bp, Homo sapiens; identical to SEQ ID NO: 2879
  chr7:1499562-1499593
  hyper

SEQ ID NO: 37015 - DNA, 109 bp, Homo sapiens; identical to SEQ ID NO: 2880
  chr7:2195817-2195926
  hyper

SEQ ID NO: 37016 - DNA, 31 bp, Homo sapiens; identical to SEQ ID NO: 2881
  chr7:2250419-2250450
  hyper

SEQ ID NO: 37017 - DNA, 51 bp, Homo sapiens; identical to SEQ ID NO: 2882
  chr7:2517233-2517284
  hyper

SEQ ID NO: 37018 - DNA, 31 bp, Homo sapiens; identical to SEQ ID NO: 2883
  chr7:2517507-2517538
  hyper

SEQ ID NO: 37019 - DNA, 67 bp, Homo sapiens; identical to SEQ ID NO: 2884
  chr7:2524319-2524386
  hyper

SEQ ID NO: 37020 - DNA, 31 bp, Homo sapiens; identical to SEQ ID NO: 2886
  chr7:2555343-2555374
  hyper

SEQ ID NO: 37021 - DNA, 31 bp, Homo sapiens; identical to SEQ ID NO: 2887
  chr7:2555390-2555421
  hyper

SEQ ID NO: 37022 - DNA, 31 bp, Homo sapiens; identical to SEQ ID NO: 2888
  chr7:2671600-2671631
  hyper

SEQ ID NO: 37023 - DNA, 31 bp, Homo sapiens; identical to SEQ ID NO: 2889
  chr7:2728271-2728302
  hyper

SEQ ID NO: 37024 - DNA, 1 bp, Homo sapiens
  chr7:3083126-3083127
  hyper
g

SEQ ID NO: 37025 - DNA, 37 bp, Homo sapiens; identical to SEQ ID NO: 2894
  chr7:3083609-3083646
  hyper

SEQ ID NO: 37026 - DNA, 51 bp, Homo sapiens; identical to SEQ ID NO: 2895
  chr7:4770078-4770129
  hyper

SEQ ID NO: 37027 - DNA, 31 bp, Homo sapiens; identical to SEQ ID NO: 2896
  chr7:4814425-4814456
  hyper

SEQ ID NO: 37028 - DNA, 31 bp, Homo sapiens; identical to SEQ ID NO: 2897
  chr7:5125290-5125321
  hyper

SEQ ID NO: 37029 - DNA, 55 bp, Homo sapiens; identical to SEQ ID NO: 2898
  chr7:5461074-5461129
  hyper

SEQ ID NO: 37030 - DNA, 31 bp, Homo sapiens; identical to SEQ ID NO: 2899
  chr7:5461384-5461415
  hyper

SEQ ID NO: 37031 - DNA, 74 bp, Homo sapiens; identical to SEQ ID NO: 2900
  chr7:5462237-5462311
  hyper

SEQ ID NO: 37032 - DNA, 31 bp, Homo sapiens; identical to SEQ ID NO: 2901
  chr7:5464743-5464774
  hyper

SEQ ID NO: 37033 - DNA, 154 bp, Homo sapiens; identical to SEQ ID NO: 2902
  chr7:5464777-5464931
  hyper

SEQ ID NO: 37034 - DNA, 31 bp, Homo sapiens; identical to SEQ ID NO: 2903
  chr7:5465101-5465132
  hyper

SEQ ID NO: 37035 - DNA, 31 bp, Homo sapiens; identical to SEQ ID NO: 2904
  chr7:5465309-5465340
  hyper

SEQ ID NO: 37036 - DNA, 157 bp, Homo sapiens; identical to SEQ ID NO: 2905
  chr7:5465358-5465515
  hyper

SEQ ID NO: 37037 - DNA, 123 bp, Homo sapiens; identical to SEQ ID NO: 2906
  chr7:5465558-5465681
  hyper

SEQ ID NO: 37038 - DNA, 46 bp, Homo sapiens; identical to SEQ ID NO: 2907
  chr7:5465687-5465733
  hyper

SEQ ID NO: 37039 - DNA, 41 bp, Homo sapiens; identical to SEQ ID NO: 2908
  chr7:5465761-5465802
  hyper

SEQ ID NO: 37040 - DNA, 31 bp, Homo sapiens; identical to SEQ ID NO: 2909
  chr7:5465827-5465858
  hyper

SEQ ID NO: 37041 - DNA, 60 bp, Homo sapiens; identical to SEQ ID NO: 2910
  chr7:5465933-5465993
  hyper

SEQ ID NO: 37042 - DNA, 248 bp, Homo sapiens; identical to SEQ ID NO: 2911
  chr7:5466027-5466275
  hyper

SEQ ID NO: 37043 - DNA, 49 bp, Homo sapiens; identical to SEQ ID NO: 2912
  chr7:5466775-5466824
  hyper

SEQ ID NO: 37044 - DNA, 71 bp, Homo sapiens; identical to SEQ ID NO: 2913
  chr7:5594637-5594708
  hyper

SEQ ID NO: 37045 - DNA, 35 bp, Homo sapiens; identical to SEQ ID NO: 2914
  chr7:5594774-5594809
  hyper

SEQ ID NO: 37046 - DNA, 45 bp, Homo sapiens; identical to SEQ ID NO: 2915
  chr7:5594849-5594894
  hyper

SEQ ID NO: 37047 - DNA, 68 bp, Homo sapiens; identical to SEQ ID NO: 2918
  chr7:6966987-6967055
  hyper

SEQ ID NO: 37048 - DNA, 78 bp, Homo sapiens; identical to SEQ ID NO: 2919
  chr7:7464015-7464093
  hyper

SEQ ID NO: 37049 - DNA, 77 bp, Homo sapiens; identical to SEQ ID NO: 2922
  chr7:8301293-8301370
  hyper

SEQ ID NO: 37050 - DNA, 57 bp, Homo sapiens; identical to SEQ ID NO: 2924
  chr7:8301667-8301724
  hyper

SEQ ID NO: 37051 - DNA, 149 bp, Homo sapiens; identical to SEQ ID NO: 2925
  chr7:8301735-8301884
  hyper

SEQ ID NO: 37052 - DNA, 163 bp, Homo sapiens; identical to SEQ ID NO: 2927
  chr7:12726347-12726510
  hyper

SEQ ID NO: 37053 - DNA, 31 bp, Homo sapiens; identical to SEQ ID NO: 2928
  chr7:12726536-12726567
  hyper

SEQ ID NO: 37054 - DNA, 85 bp, Homo sapiens; identical to SEQ ID NO: 2929
  chr7:12726641-12726726
  hyper

SEQ ID NO: 37055 - DNA, 253 bp, Homo sapiens; identical to SEQ ID NO: 2930
  chr7:12726796-12727049
  hyper

SEQ ID NO: 37056 - DNA, 129 bp, Homo sapiens; identical to SEQ ID NO: 2931
  chr7:12727051-12727180
  hyper

SEQ ID NO: 37057 - DNA, 77 bp, Homo sapiens; identical to SEQ ID NO: 2932
  chr7:12727184-12727261
  hyper

SEQ ID NO: 37058 - DNA, 39 bp, Homo sapiens; identical to SEQ ID NO: 2933
  chr7:12727283-12727322
  hyper

SEQ ID NO: 37059 - DNA, 44 bp, Homo sapiens; identical to SEQ ID NO: 2934
  chr7:12727331-12727375
  hyper

SEQ ID NO: 37060 - DNA, 31 bp, Homo sapiens; identical to SEQ ID NO: 2935
  chr7:12727416-12727447
  hyper

SEQ ID NO: 37061 - DNA, 94 bp, Homo sapiens; identical to SEQ ID NO: 2936
  chr7:17338150-17338244
  hyper

SEQ ID NO: 37062 - DNA, 136 bp, Homo sapiens; identical to SEQ ID NO: 2937
  chr7:17338602-17338738
  hyper

SEQ ID NO: 37063 - DNA, 31 bp, Homo sapiens; identical to SEQ ID NO: 2938
  chr7:17339051-17339082
  hyper

SEQ ID NO: 37064 - DNA, 70 bp, Homo sapiens; identical to SEQ ID NO: 2939
  chr7:20837556-20837626
  hyper

SEQ ID NO: 37065 - DNA, 101 bp, Homo sapiens; identical to SEQ ID NO: 2940
  chr7:20837650-20837751
  hyper

SEQ ID NO: 37066 - DNA, 31 bp, Homo sapiens; identical to SEQ ID NO: 2941
  chr7:20837801-20837832
  hyper

SEQ ID NO: 37067 - DNA, 116 bp, Homo sapiens; identical to SEQ ID NO: 2942
  chr7:20838168-20838284
  hyper

SEQ ID NO: 37068 - DNA, 31 bp, Homo sapiens; identical to SEQ ID NO: 2943
  chr7:22396516-22396547
  hyper

SEQ ID NO: 37069 - DNA, 31 bp, Homo sapiens; identical to SEQ ID NO: 2944
  chr7:22894198-22894229
  hyper

SEQ ID NO: 37070 - DNA, 57 bp, Homo sapiens; identical to SEQ ID NO: 2945
  chr7:22894264-22894321
  hyper

SEQ ID NO: 37071 - DNA, 95 bp, Homo sapiens
  chr7:23052933-23053028
  hyper
gctgtctgaacctctccgccctgcaggggaccaaagaccgactcgggccaacgctgctctccagggggcgagggcggggggtcgacagtgaccat

SEQ ID NO: 37072 - DNA, 13 bp, Homo sapiens
  chr7:23053080-23053093
  hyper
gagtgggagagga

SEQ ID NO: 37073 - DNA, 210 bp, Homo sapiens; identical to SEQ ID NO: 2947
  chr7:23053095-23053305
  hyper

SEQ ID NO: 37074 - DNA, 31 bp, Homo sapiens; identical to SEQ ID NO: 2948
  chr7:23053448-23053479
  hyper

SEQ ID NO: 37075 - DNA, 72 bp, Homo sapiens; identical to SEQ ID NO: 2949
  chr7:23053720-23053792
  hyper

SEQ ID NO: 37076 - DNA, 81 bp, Homo sapiens; identical to SEQ ID NO: 2951
  chr7:23053957-23054038
  hyper

SEQ ID NO: 37077 - DNA, 31 bp, Homo sapiens; identical to SEQ ID NO: 2952
  chr7:23054048-23054079
  hyper

SEQ ID NO: 37078 - DNA, 20 bp, Homo sapiens
  chr7:26192666-26192686
  hyper
cgctggcggatgtgcgagcg

SEQ ID NO: 37079 - DNA, 2 bp, Homo sapiens
  chr7:26415773-26415775
  hyper
gg

SEQ ID NO: 37080 - DNA, 2 bp, Homo sapiens
  chr7:27135265-27135267
  hyper
ga

SEQ ID NO: 37081 - DNA, 31 bp, Homo sapiens; identical to SEQ ID NO: 2982
  chr7:27136834-27136865
  hyper

SEQ ID NO: 37082 - DNA, 31 bp, Homo sapiens; identical to SEQ ID NO: 2986
  chr7:27288912-27288943
  hyper

SEQ ID NO: 37083 - DNA, 2 bp, Homo sapiens
  chr7:27289788-27289790
  hyper
ca

SEQ ID NO: 37084 - DNA, 51 bp, Homo sapiens; identical to SEQ ID NO: 2988
  chr7:29234146-29234197
  hyper

SEQ ID NO: 37085 - DNA, 31 bp, Homo sapiens; identical to SEQ ID NO: 2989
  chr7:29724331-29724362
  hyper

SEQ ID NO: 37086 - DNA, 115 bp, Homo sapiens; identical to SEQ ID NO: 2990
  chr7:29724384-29724499
  hyper

SEQ ID NO: 37087 - DNA, 120 bp, Homo sapiens; identical to SEQ ID NO: 2991
  chr7:29724581-29724701
  hyper

SEQ ID NO: 37088 - DNA, 55 bp, Homo sapiens; identical to SEQ ID NO: 2992
  chr7:29725076-29725131
  hyper

SEQ ID NO: 37089 - DNA, 40 bp, Homo sapiens; identical to SEQ ID NO: 2993
  chr7:30067984-30068024
  hyper

SEQ ID NO: 37090 - DNA, 117 bp, Homo sapiens; identical to SEQ ID NO: 2994
  chr7:32767519-32767636
  hyper

SEQ ID NO: 37091 - DNA, 58 bp, Homo sapiens; identical to SEQ ID NO: 2995
  chr7:32767753-32767811
  hyper

SEQ ID NO: 37092 - DNA, 109 bp, Homo sapiens; identical to SEQ ID NO: 2996
  chr7:32768219-32768328
  hyper

SEQ ID NO: 37093 - DNA, 46 bp, Homo sapiens; identical to SEQ ID NO: 2997
  chr7:32768342-32768388
  hyper

SEQ ID NO: 37094 - DNA, 43 bp, Homo sapiens; identical to SEQ ID NO: 2998
  chr7:32768552-32768595
  hyper

SEQ ID NO: 37095 - DNA, 60 bp, Homo sapiens; identical to SEQ ID NO: 2999
  chr7:32982309-32982369
  hyper

SEQ ID NO: 37096 - DNA, 107 bp, Homo sapiens; identical to SEQ ID NO: 3000
  chr7:32982429-32982536
  hyper

SEQ ID NO: 37097 - DNA, 150 bp, Homo sapiens; identical to SEQ ID NO: 3001
  chr7:32982554-32982704
  hyper

SEQ ID NO: 37098 - DNA, 31 bp, Homo sapiens; identical to SEQ ID NO: 3002
  chr7:32982897-32982928
  hyper

SEQ ID NO: 37099 - DNA, 35 bp, Homo sapiens; identical to SEQ ID NO: 3003
  chr7:32982936-32982971
  hyper

SEQ ID NO: 37100 - DNA, 93 bp, Homo sapiens; identical to SEQ ID NO: 3004
  chr7:32996716-32996809
  hyper

SEQ ID NO: 37101 - DNA, 83 bp, Homo sapiens; identical to SEQ ID NO: 3005
  chr7:32996812-32996895
  hyper

SEQ ID NO: 37102 - DNA, 28 bp, Homo sapiens
  chr7:32996917-32996945
  hyper
tcccagcccccctccccgctgcggcacg

SEQ ID NO: 37103 - DNA, 90 bp, Homo sapiens
  chr7:32997454-32997544
  hyper
ctctccggacaggcctttccctcctgccggacctcccctagctccgccccgtgcagccgcgctcctcccttcttccgctgcccagatcct

SEQ ID NO: 37104 - DNA, 2 bp, Homo sapiens
  chr7:35839939-35839941
  hyper
gc

SEQ ID NO: 37105 - DNA, 31 bp, Homo sapiens; identical to SEQ ID NO: 3012
  chr7:36192381-36192412
  hyper

SEQ ID NO: 37106 - DNA, 67 bp, Homo sapiens; identical to SEQ ID NO: 3013
  chr7:36192422-36192489
  hyper

SEQ ID NO: 37107 - DNA, 85 bp, Homo sapiens; identical to SEQ ID NO: 3014
  chr7:36192637-36192722
  hyper

SEQ ID NO: 37108 - DNA, 411 bp, Homo sapiens; identical to SEQ ID NO: 3015
  chr7:36192725-36193136
  hyper

SEQ ID NO: 37109 - DNA, 132 bp, Homo sapiens; identical to SEQ ID NO: 3016
  chr7:36193160-36193292
  hyper

SEQ ID NO: 37110 - DNA, 31 bp, Homo sapiens; identical to SEQ ID NO: 3017
  chr7:36406484-36406515
  hyper

SEQ ID NO: 37111 - DNA, 37 bp, Homo sapiens
  chr7:37487335-37487372
  hyper
cacacacacacacacacgccgcctcgcgcgcgctcgc

SEQ ID NO: 37112 - DNA, 96 bp, Homo sapiens; identical to SEQ ID NO: 3033
  chr7:47294095-47294191
  hyper

SEQ ID NO: 37113 - DNA, 68 bp, Homo sapiens; identical to SEQ ID NO: 3034
  chr7:47621698-47621766
  hyper

SEQ ID NO: 37114 - DNA, 134 bp, Homo sapiens; identical to SEQ ID NO: 3035
  chr7:48128031-48128165
  hyper

SEQ ID NO: 37115 - DNA, 31 bp, Homo sapiens; identical to SEQ ID NO: 3036
  chr7:48128168-48128199
  hyper

SEQ ID NO: 37116 - DNA, 14 bp, Homo sapiens
  chr7:50343195-50343209
  hyper
acttttcccacccc

SEQ ID NO: 37117 - DNA, 75 bp, Homo sapiens; identical to SEQ ID NO: 3049
  chr7:51384164-51384239
  hyper

SEQ ID NO: 37118 - DNA, 40 bp, Homo sapiens; identical to SEQ ID NO: 3052
  chr7:55593335-55593375
  hyper

SEQ ID NO: 37119 - DNA, 31 bp, Homo sapiens; identical to SEQ ID NO: 3053
  chr7:55593380-55593411
  hyper

SEQ ID NO: 37120 - DNA, 31 bp, Homo sapiens; identical to SEQ ID NO: 3054
  chr7:55593420-55593451
  hyper

SEQ ID NO: 37121 - DNA, 39 bp, Homo sapiens; identical to SEQ ID NO: 3058
  chr7:65541036-65541075
  hyper

SEQ ID NO: 37122 - DNA, 138 bp, Homo sapiens; identical to SEQ ID NO: 3059
  chr7:66094048-66094186
  hyper

SEQ ID NO: 37123 - DNA, 31 bp, Homo sapiens; identical to SEQ ID NO: 3060
  chr7:68161974-68162005
  hyper

SEQ ID NO: 37124 - DNA, 31 bp, Homo sapiens; identical to SEQ ID NO: 3061
  chr7:75924332-75924363
  hyper

SEQ ID NO: 37125 - DNA, 60 bp, Homo sapiens; identical to SEQ ID NO: 3065
  chr7:80548576-80548636
  hyper

SEQ ID NO: 37126 - DNA, 61 bp, Homo sapiens; identical to SEQ ID NO: 3066
  chr7:89783801-89783862
  hyper

SEQ ID NO: 37127 - DNA, 36 bp, Homo sapiens; identical to SEQ ID NO: 3067
  chr7:89783891-89783927
  hyper

SEQ ID NO: 37128 - DNA, 43 bp, Homo sapiens; identical to SEQ ID NO: 3068
  chr7:89874390-89874433
  hyper

SEQ ID NO: 37129 - DNA, 71 bp, Homo sapiens; identical to SEQ ID NO: 3069
  chr7:89874463-89874534
  hyper

SEQ ID NO: 37130 - DNA, 41 bp, Homo sapiens; identical to SEQ ID NO: 3070
  chr7:89874660-89874701
  hyper

SEQ ID NO: 37131 - DNA, 89 bp, Homo sapiens; identical to SEQ ID NO: 3071
  chr7:89874708-89874797
  hyper

SEQ ID NO: 37132 - DNA, 64 bp, Homo sapiens; identical to SEQ ID NO: 3072
  chr7:89874804-89874868
  hyper

SEQ ID NO: 37133 - DNA, 36 bp, Homo sapiens; identical to SEQ ID NO: 3073
  chr7:89874894-89874930
  hyper

SEQ ID NO: 37134 - DNA, 50 bp, Homo sapiens; identical to SEQ ID NO: 3074
  chr7:89874962-89875012
  hyper

SEQ ID NO: 37135 - DNA, 31 bp, Homo sapiens; identical to SEQ ID NO: 3075
  chr7:90893323-90893354
  hyper

SEQ ID NO: 37136 - DNA, 40 bp, Homo sapiens; identical to SEQ ID NO: 3076
  chr7:90893373-90893413
  hyper

SEQ ID NO: 37137 - DNA, 39 bp, Homo sapiens; identical to SEQ ID NO: 3077
  chr7:90893437-90893476
  hyper

SEQ ID NO: 37138 - DNA, 31 bp, Homo sapiens; identical to SEQ ID NO: 3078
  chr7:90893487-90893518
  hyper

SEQ ID NO: 37139 - DNA, 144 bp, Homo sapiens; identical to SEQ ID NO: 3079
  chr7:92219763-92219907
  hyper

SEQ ID NO: 37140 - DNA, 385 bp, Homo sapiens; identical to SEQ ID NO: 3080
  chr7:92462331-92462716
  hyper

SEQ ID NO: 37141 - DNA, 140 bp, Homo sapiens; identical to SEQ ID NO: 3081
  chr7:92462810-92462950
  hyper

SEQ ID NO: 37142 - DNA, 31 bp, Homo sapiens; identical to SEQ ID NO: 3082
  chr7:92462963-92462994
  hyper

SEQ ID NO: 37143 - DNA, 31 bp, Homo sapiens; identical to SEQ ID NO: 3083
  chr7:92463001-92463032
  hyper

SEQ ID NO: 37144 - DNA, 31 bp, Homo sapiens; identical to SEQ ID NO: 3084
  chr7:92463048-92463079
  hyper

SEQ ID NO: 37145 - DNA, 78 bp, Homo sapiens; identical to SEQ ID NO: 3085
  chr7:92463082-92463160
  hyper

SEQ ID NO: 37146 - DNA, 31 bp, Homo sapiens; identical to SEQ ID NO: 3086
  chr7:92463161-92463192
  hyper

SEQ ID NO: 37147 - DNA, 138 bp, Homo sapiens; identical to SEQ ID NO: 3087
  chr7:92463195-92463333
  hyper

SEQ ID NO: 37148 - DNA, 46 bp, Homo sapiens; identical to SEQ ID NO: 3088
  chr7:95064140-95064186
  hyper

SEQ ID NO: 37149 - DNA, 48 bp, Homo sapiens; identical to SEQ ID NO: 3089
  chr7:95064192-95064240
  hyper

SEQ ID NO: 37150 - DNA, 97 bp, Homo sapiens; identical to SEQ ID NO: 3090
  chr7:95064295-95064392
  hyper

SEQ ID NO: 37151 - DNA, 31 bp, Homo sapiens; identical to SEQ ID NO: 3091
  chr7:95064547-95064578
  hyper

SEQ ID NO: 37152 - DNA, 74 bp, Homo sapiens; identical to SEQ ID NO: 3094
  chr7:96639370-96639444
  hyper

SEQ ID NO: 37153 - DNA, 31 bp, Homo sapiens; identical to SEQ ID NO: 3095
  chr7:96639467-96639498
  hyper

SEQ ID NO: 37154 - DNA, 2 bp, Homo sapiens
  chr7:96642747-96642749
  hyper
tg

SEQ ID NO: 37155 - DNA, 52 bp, Homo sapiens; identical to SEQ ID NO: 3098
  chr7:98030098-98030150
  hyper

SEQ ID NO: 37156 - DNA, 35 bp, Homo sapiens; identical to SEQ ID NO: 3099
  chr7:98030419-98030454
  hyper

SEQ ID NO: 37157 - DNA, 74 bp, Homo sapiens; identical to SEQ ID NO: 3100
  chr7:98030480-98030554
  hyper

SEQ ID NO: 37158 - DNA, 39 bp, Homo sapiens; identical to SEQ ID NO: 3101
  chr7:98030571-98030610
  hyper

SEQ ID NO: 37159 - DNA, 31 bp, Homo sapiens; identical to SEQ ID NO: 3104
  chr7:98990958-98990989
  hyper

SEQ ID NO: 37160 - DNA, 31 bp, Homo sapiens; identical to SEQ ID NO: 3105
  chr7:99070937-99070968
  hyper

SEQ ID NO: 37161 - DNA, 2 bp, Homo sapiens
  chr7:99155750-99155752
  hyper
gg

SEQ ID NO: 37162 - DNA, 48 bp, Homo sapiens
  chr7:99156600-99156648
  hyper
ccgccgtcaggagccggcgaccgtgccctggtgcgagctggtctgtat

SEQ ID NO: 37163 - DNA, 124 bp, Homo sapiens
  chr7:99156692-99156816
  hyper
agtgggaggagggcagcgccgggcaaggccttctgaggaccgagctgggagccgggcaggggcccagggcgagggtggtgggagggggacggcaccctcatgcgtccttgggcctgaaggacgc

SEQ ID NO: 37164 - DNA, 31 bp, Homo sapiens; identical to SEQ ID NO: 3115
  chr7:99869133-99869164
  hyper

SEQ ID NO: 37165 - DNA, 31 bp, Homo sapiens; identical to SEQ ID NO: 3116
  chr7:100064074-100064105
  hyper

SEQ ID NO: 37166 - DNA, 45 bp, Homo sapiens; identical to SEQ ID NO: 3117
  chr7:100424501-100424546
  hyper

SEQ ID NO: 37167 - DNA, 326 bp, Homo sapiens; identical to SEQ ID NO: 3118
  chr7:100424625-100424951
  hyper

SEQ ID NO: 37168 - DNA, 89 bp, Homo sapiens; identical to SEQ ID NO: 3119
  chr7:100424995-100425084
  hyper

SEQ ID NO: 37169 - DNA, 148 bp, Homo sapiens; identical to SEQ ID NO: 3120
  chr7:100425173-100425321
  hyper

SEQ ID NO: 37170 - DNA, 31 bp, Homo sapiens; identical to SEQ ID NO: 3121
  chr7:100425327-100425358
  hyper

SEQ ID NO: 37171 - DNA, 31 bp, Homo sapiens; identical to SEQ ID NO: 3122
  chr7:100609077-100609108
  hyper

SEQ ID NO: 37172 - DNA, 17 bp, Homo sapiens
  chr7:100816655-100816672
  hyper
cccgggtgctgtctctt

SEQ ID NO: 37173 - DNA, 31 bp, Homo sapiens; identical to SEQ ID NO: 3124
  chr7:101447356-101447387
  hyper

SEQ ID NO: 37174 - DNA, 61 bp, Homo sapiens; identical to SEQ ID NO: 3125
  chr7:101447435-101447496
  hyper

SEQ ID NO: 37175 - DNA, 40 bp, Homo sapiens; identical to SEQ ID NO: 3126
  chr7:101447515-101447555
  hyper

SEQ ID NO: 37176 - DNA, 31 bp, Homo sapiens; identical to SEQ ID NO: 3129
  chr7:105162871-105162902
  hyper

SEQ ID NO: 37177 - DNA, 31 bp, Homo sapiens; identical to SEQ ID NO: 3130
  chr7:105162924-105162955
  hyper

SEQ ID NO: 37178 - DNA, 45 bp, Homo sapiens; identical to SEQ ID NO: 3131
  chr7:105162984-105163029
  hyper

SEQ ID NO: 37179 - DNA, 63 bp, Homo sapiens; identical to SEQ ID NO: 3132
  chr7:105516544-105516607
  hyper

SEQ ID NO: 37180 - DNA, 31 bp, Homo sapiens; identical to SEQ ID NO: 3133
  chr7:105516703-105516734
  hyper

SEQ ID NO: 37181 - DNA, 31 bp, Homo sapiens; identical to SEQ ID NO: 3134
  chr7:105752146-105752177
  hyper

SEQ ID NO: 37182 - DNA, 31 bp, Homo sapiens; identical to SEQ ID NO: 3135
  chr7:106684934-106684965
  hyper

SEQ ID NO: 37183 - DNA, 2 bp, Homo sapiens
  chr7:107300981-107300983
  hyper
cc

SEQ ID NO: 37184 - DNA, 74 bp, Homo sapiens; identical to SEQ ID NO: 3138
  chr7:107531846-107531920
  hyper

SEQ ID NO: 37185 - DNA, 125 bp, Homo sapiens; identical to SEQ ID NO: 3139
  chr7:107643453-107643578
  hyper

SEQ ID NO: 37186 - DNA, 71 bp, Homo sapiens; identical to SEQ ID NO: 3146
  chr7:116592939-116593010
  hyper

SEQ ID NO: 37187 - DNA, 31 bp, Homo sapiens; identical to SEQ ID NO: 3147
  chr7:116593040-116593071
  hyper

SEQ ID NO: 37188 - DNA, 31 bp, Homo sapiens; identical to SEQ ID NO: 3148
  chr7:116593096-116593127
  hyper

SEQ ID NO: 37189 - DNA, 31 bp, Homo sapiens; identical to SEQ ID NO: 3149
  chr7:120497419-120497450
  hyper

SEQ ID NO: 37190 - DNA, 120 bp, Homo sapiens; identical to SEQ ID NO: 3150
  chr7:120497835-120497955
  hyper

SEQ ID NO: 37191 - DNA, 54 bp, Homo sapiens; identical to SEQ ID NO: 3151
  chr7:120498179-120498233
  hyper

SEQ ID NO: 37192 - DNA, 31 bp, Homo sapiens; identical to SEQ ID NO: 3152
  chr7:120498245-120498276
  hyper

SEQ ID NO: 37193 - DNA, 31 bp, Homo sapiens
  chr7:121950008-121950039
  hyper
aaccatattcaagacacggttcgactgtttc

SEQ ID NO: 37194 - DNA, 69 bp, Homo sapiens; identical to SEQ ID NO: 3156
  chr7:122525942-122526011
  hyper

SEQ ID NO: 37195 - DNA, 74 bp, Homo sapiens; identical to SEQ ID NO: 3157
  chr7:122526016-122526090
  hyper

SEQ ID NO: 37196 - DNA, 130 bp, Homo sapiens; identical to SEQ ID NO: 3158
  chr7:122526342-122526472
  hyper

SEQ ID NO: 37197 - DNA, 137 bp, Homo sapiens; identical to SEQ ID NO: 3159
  chr7:122526609-122526746
  hyper

SEQ ID NO: 37198 - DNA, 62 bp, Homo sapiens; identical to SEQ ID NO: 3160
  chr7:123174505-123174567
  hyper

SEQ ID NO: 37199 - DNA, 66 bp, Homo sapiens; identical to SEQ ID NO: 3161
  chr7:123174597-123174663
  hyper

SEQ ID NO: 37200 - DNA, 97 bp, Homo sapiens; identical to SEQ ID NO: 3167
  chr7:134001928-134002025
  hyper

SEQ ID NO: 37201 - DNA, 38 bp, Homo sapiens; identical to SEQ ID NO: 3175
  chr7:139478236-139478274
  hyper

SEQ ID NO: 37202 - DNA, 77 bp, Homo sapiens; identical to SEQ ID NO: 3176
  chr7:139478356-139478433
  hyper

SEQ ID NO: 37203 - DNA, 31 bp, Homo sapiens; identical to SEQ ID NO: 3177
  chr7:140098302-140098333
  hyper

SEQ ID NO: 37204 - DNA, 69 bp, Homo sapiens; identical to SEQ ID NO: 3178
  chr7:140098372-140098441
  hyper

SEQ ID NO: 37205 - DNA, 31 bp, Homo sapiens; identical to SEQ ID NO: 3179
  chr7:140098443-140098474
  hyper

SEQ ID NO: 37206 - DNA, 31 bp, Homo sapiens; identical to SEQ ID NO: 3180
  chr7:148936685-148936716
  hyper

SEQ ID NO: 37207 - DNA, 43 bp, Homo sapiens; identical to SEQ ID NO: 3185
  chr7:150102885-150102928
  hyper

SEQ ID NO: 37208 - DNA, 134 bp, Homo sapiens; identical to SEQ ID NO: 3186
  chr7:150784072-150784206
  hyper

SEQ ID NO: 37209 - DNA, 31 bp, Homo sapiens; identical to SEQ ID NO: 3187
  chr7:150784460-150784491
  hyper

SEQ ID NO: 37210 - DNA, 148 bp, Homo sapiens; identical to SEQ ID NO: 3188
  chr7:150784689-150784837
  hyper

SEQ ID NO: 37211 - DNA, 34 bp, Homo sapiens; identical to SEQ ID NO: 3189
  chr7:150869803-150869837
  hyper

SEQ ID NO: 37212 - DNA, 48 bp, Homo sapiens; identical to SEQ ID NO: 3190
  chr7:150948762-150948810
  hyper

SEQ ID NO: 37213 - DNA, 35 bp, Homo sapiens; identical to SEQ ID NO: 3191
  chr7:151038573-151038608
  hyper

SEQ ID NO: 37214 - DNA, 65 bp, Homo sapiens; identical to SEQ ID NO: 3192
  chr7:151038609-151038674
  hyper

SEQ ID NO: 37215 - DNA, 282 bp, Homo sapiens; identical to SEQ ID NO: 3193
  chr7:151038681-151038963
  hyper

SEQ ID NO: 37216 - DNA, 65 bp, Homo sapiens; identical to SEQ ID NO: 3194
  chr7:151217152-151217217
  hyper

SEQ ID NO: 37217 - DNA, 60 bp, Homo sapiens; identical to SEQ ID NO: 3195
  chr7:151572768-151572828
  hyper

SEQ ID NO: 37218 - DNA, 121 bp, Homo sapiens; identical to SEQ ID NO: 3196
  chr7:151573023-151573144
  hyper

SEQ ID NO: 37219 - DNA, 57 bp, Homo sapiens; identical to SEQ ID NO: 3197
  chr7:151722644-151722701
  hyper

SEQ ID NO: 37220 - DNA, 211 bp, Homo sapiens; identical to SEQ ID NO: 3198
  chr7:151722792-151723003
  hyper

SEQ ID NO: 37221 - DNA, 40 bp, Homo sapiens; identical to SEQ ID NO: 3199
  chr7:151723103-151723143
  hyper

SEQ ID NO: 37222 - DNA, 4 bp, Homo sapiens
  chr7:151723167-151723171
  hyper
cgtc

SEQ ID NO: 37223 - DNA, 31 bp, Homo sapiens; identical to SEQ ID NO: 3201
  chr7:152160442-152160473
  hyper

SEQ ID NO: 37224 - DNA, 31 bp, Homo sapiens; identical to SEQ ID NO: 3202
  chr7:155244946-155244977
  hyper

SEQ ID NO: 37225 - DNA, 13 bp, Homo sapiens
  chr7:155580714-155580727
  hyper
ctgtttcccccac

SEQ ID NO: 37226 - DNA, 44 bp, Homo sapiens
  chr7:155580882-155580926
  hyper
agctaaaaatccaaccaaggccgggcgcggtggttcacgcctgt

SEQ ID NO: 37227 - DNA, 31 bp, Homo sapiens; identical to SEQ ID NO: 3205
  chr7:155602345-155602376
  hyper

SEQ ID NO: 37228 - DNA, 43 bp, Homo sapiens; identical to SEQ ID NO: 3206
  chr7:155602473-155602516
  hyper

SEQ ID NO: 37229 - DNA, 41 bp, Homo sapiens; identical to SEQ ID NO: 3207
  chr7:156792491-156792532
  hyper

SEQ ID NO: 37230 - DNA, 71 bp, Homo sapiens; identical to SEQ ID NO: 3208
  chr7:156792594-156792665
  hyper

SEQ ID NO: 37231 - DNA, 67 bp, Homo sapiens; identical to SEQ ID NO: 3209
  chr7:156792763-156792830
  hyper

SEQ ID NO: 37232 - DNA, 10 bp, Homo sapiens
  chr7:156794450-156794460
  hyper
attacaggcg

SEQ ID NO: 37233 - DNA, 190 bp, Homo sapiens
  chr7:156802164-156802354
  hyper
ataattcgctgcccgtctcatgcctgggggtccgggcgagtcctcgcaggccccgggcagagccgaggcggcttcgcagctcttcccccgctcgctgggagccaagcgcagagaggggcaggcggtgccggtggaggatgcgcgaggccctcccgccacgcgcatccacgggggccgcagggtactcaca

SEQ ID NO: 37234 - DNA, 48 bp, Homo sapiens; identical to SEQ ID NO: 3212
  chr7:156803445-156803493
  hyper

SEQ ID NO: 37235 - DNA, 44 bp, Homo sapiens; identical to SEQ ID NO: 3213
  chr7:156803889-156803933
  hyper

SEQ ID NO: 37236 - DNA, 2 bp, Homo sapiens
  chr7:156808857-156808859
  hyper
gt

SEQ ID NO: 37237 - DNA, 31 bp, Homo sapiens; identical to SEQ ID NO: 3217
  chr7:157156193-157156224
  hyper

SEQ ID NO: 37238 - DNA, 69 bp, Homo sapiens; identical to SEQ ID NO: 3218
  chr7:157156240-157156309
  hyper

SEQ ID NO: 37239 - DNA, 77 bp, Homo sapiens; identical to SEQ ID NO: 3219
  chr8:356767-356844
  hyper

SEQ ID NO: 37240 - DNA, 31 bp, Homo sapiens; identical to SEQ ID NO: 3220
  chr8:6638106-6638137
  hyper

SEQ ID NO: 37241 - DNA, 31 bp, Homo sapiens; identical to SEQ ID NO: 3221
  chr8:8313040-8313071
  hyper

SEQ ID NO: 37242 - DNA, 80 bp, Homo sapiens; identical to SEQ ID NO: 3222
  chr8:8750283-8750363
  hyper

SEQ ID NO: 37243 - DNA, 73 bp, Homo sapiens; identical to SEQ ID NO: 3223
  chr8:8750475-8750548
  hyper

SEQ ID NO: 37244 - DNA, 105 bp, Homo sapiens; identical to SEQ ID NO: 3224
  chr8:8750554-8750659
  hyper

SEQ ID NO: 37245 - DNA, 31 bp, Homo sapiens; identical to SEQ ID NO: 3225
  chr8:8820809-8820840
  hyper

SEQ ID NO: 37246 - DNA, 31 bp, Homo sapiens; identical to SEQ ID NO: 3226
  chr8:10058671-10058702
  hyper

SEQ ID NO: 37247 - DNA, 58 bp, Homo sapiens; identical to SEQ ID NO: 3227
  chr8:10058735-10058793
  hyper

SEQ ID NO: 37248 - DNA, 56 bp, Homo sapiens; identical to SEQ ID NO: 3228
  chr8:10058801-10058857
  hyper

SEQ ID NO: 37249 - DNA, 56 bp, Homo sapiens; identical to SEQ ID NO: 3229
  chr8:10873286-10873342
  hyper

SEQ ID NO: 37250 - DNA, 87 bp, Homo sapiens
  chr8:10873649-10873736
  hyper
gggtgcagctcccctggcacagcccgacggtgggagagggcggccagctggactaaaagccccgtccccgggcgggaccttcctccc

SEQ ID NO: 37251 - DNA, 92 bp, Homo sapiens
  chr8:10873798-10873890
  hyper
ggagggtctgggctccgcgccgcgaggcagcgcgacggctgcgggcgacttggcgtgcggtgctgaggaccctgggggagtgtgcgccgcgg

SEQ ID NO: 37252 - DNA, 114 bp, Homo sapiens; identical to SEQ ID NO: 3234
  chr8:10874047-10874161
  hyper

SEQ ID NO: 37253 - DNA, 56 bp, Homo sapiens; identical to SEQ ID NO: 3235
  chr8:10874172-10874228
  hyper

SEQ ID NO: 37254 - DNA, 35 bp, Homo sapiens; identical to SEQ ID NO: 3236
  chr8:11058961-11058996
  hyper

SEQ ID NO: 37255 - DNA, 56 bp, Homo sapiens; identical to SEQ ID NO: 3237
  chr8:11665927-11665983
  hyper

SEQ ID NO: 37256 - DNA, 31 bp, Homo sapiens; identical to SEQ ID NO: 3238
  chr8:11665992-11666023
  hyper

SEQ ID NO: 37257 - DNA, 31 bp, Homo sapiens; identical to SEQ ID NO: 3239
  chr8:11726003-11726034
  hyper

SEQ ID NO: 37258 - DNA, 31 bp, Homo sapiens; identical to SEQ ID NO: 3240
  chr8:11726134-11726165
  hyper

SEQ ID NO: 37259 - DNA, 31 bp, Homo sapiens; identical to SEQ ID NO: 3243
  chr8:17354605-17354636
  hyper

SEQ ID NO: 37260 - DNA, 38 bp, Homo sapiens; identical to SEQ ID NO: 3244
  chr8:17434663-17434701
  hyper

SEQ ID NO: 37261 - DNA, 225 bp, Homo sapiens; identical to SEQ ID NO: 3245
  chr8:17658206-17658431
  hyper

SEQ ID NO: 37262 - DNA, 65 bp, Homo sapiens; identical to SEQ ID NO: 3246
  chr8:17658492-17658557
  hyper

SEQ ID NO: 37263 - DNA, 229 bp, Homo sapiens; identical to SEQ ID NO: 3247
  chr8:17658569-17658798
  hyper

SEQ ID NO: 37264 - DNA, 76 bp, Homo sapiens; identical to SEQ ID NO: 3248
  chr8:17658915-17658991
  hyper

SEQ ID NO: 37265 - DNA, 247 bp, Homo sapiens; identical to SEQ ID NO: 3249
  chr8:17659016-17659263
  hyper

SEQ ID NO: 37266 - DNA, 2 bp, Homo sapiens
  chr8:17659281-17659283
  hyper
ct

SEQ ID NO: 37267 - DNA, 5 bp, Homo sapiens
  chr8:17659329-17659334
  hyper
gtggg

SEQ ID NO: 37268 - DNA, 80 bp, Homo sapiens; identical to SEQ ID NO: 3251
  chr8:17659339-17659419
  hyper

SEQ ID NO: 37269 - DNA, 31 bp, Homo sapiens; identical to SEQ ID NO: 3252
  chr8:18870815-18870846
  hyper

SEQ ID NO: 37270 - DNA, 31 bp, Homo sapiens; identical to SEQ ID NO: 3253
  chr8:19125227-19125258
  hyper

SEQ ID NO: 37271 - DNA, 37 bp, Homo sapiens; identical to SEQ ID NO: 3254
  chr8:19125261-19125298
  hyper

SEQ ID NO: 37272 - DNA, 31 bp, Homo sapiens; identical to SEQ ID NO: 3255
  chr8:19171306-19171337
  hyper

SEQ ID NO: 37273 - DNA, 113 bp, Homo sapiens; identical to SEQ ID NO: 3256
  chr8:19171391-19171504
  hyper

SEQ ID NO: 37274 - DNA, 31 bp, Homo sapiens; identical to SEQ ID NO: 3257
  chr8:19171537-19171568
  hyper

SEQ ID NO: 37275 - DNA, 31 bp, Homo sapiens; identical to SEQ ID NO: 3258
  chr8:19171660-19171691
  hyper

SEQ ID NO: 37276 - DNA, 31 bp, Homo sapiens; identical to SEQ ID NO: 3259
  chr8:19266668-19266699
  hyper

SEQ ID NO: 37277 - DNA, 29 bp, Homo sapiens
  chr8:19797405-19797434
  hyper
gcagtcacctctctgccggaggggccctg

SEQ ID NO: 37278 - DNA, 125 bp, Homo sapiens; identical to SEQ ID NO: 3261
  chr8:21906318-21906443
  hyper

SEQ ID NO: 37279 - DNA, 64 bp, Homo sapiens; identical to SEQ ID NO: 3262
  chr8:21988227-21988291
  hyper

SEQ ID NO: 37280 - DNA, 122 bp, Homo sapiens; identical to SEQ ID NO: 3263
  chr8:21988552-21988674
  hyper

SEQ ID NO: 37281 - DNA, 2 bp, Homo sapiens
  chr8:22613836-22613838
  hyper
ca

SEQ ID NO: 37282 - DNA, 31 bp, Homo sapiens; identical to SEQ ID NO: 3265
  chr8:22857229-22857260
  hyper

SEQ ID NO: 37283 - DNA, 53 bp, Homo sapiens; identical to SEQ ID NO: 3267
  chr8:23386070-23386123
  hyper

SEQ ID NO: 37284 - DNA, 31 bp, Homo sapiens; identical to SEQ ID NO: 3268
  chr8:23386137-23386168
  hyper

SEQ ID NO: 37285 - DNA, 31 bp, Homo sapiens; identical to SEQ ID NO: 3269
  chr8:23386169-23386200
  hyper

SEQ ID NO: 37286 - DNA, 154 bp, Homo sapiens; identical to SEQ ID NO: 3270
  chr8:25041969-25042123
  hyper

SEQ ID NO: 37287 - DNA, 22 bp, Homo sapiens
  chr8:25042567-25042589
  hyper
gggggctcggcccggctgcgca

SEQ ID NO: 37288 - DNA, 36 bp, Homo sapiens; identical to SEQ ID NO: 3273
  chr8:25042834-25042870
  hyper

SEQ ID NO: 37289 - DNA, 54 bp, Homo sapiens; identical to SEQ ID NO: 3274
  chr8:25042883-25042937
  hyper

SEQ ID NO: 37290 - DNA, 31 bp, Homo sapiens; identical to SEQ ID NO: 3275
  chr8:25042939-25042970
  hyper

SEQ ID NO: 37291 - DNA, 44 bp, Homo sapiens; identical to SEQ ID NO: 3277
  chr8:26372258-26372302
  hyper

SEQ ID NO: 37292 - DNA, 65 bp, Homo sapiens; identical to SEQ ID NO: 3278
  chr8:26435019-26435084
  hyper

SEQ ID NO: 37293 - DNA, 62 bp, Homo sapiens; identical to SEQ ID NO: 3279
  chr8:26435403-26435465
  hyper

SEQ ID NO: 37294 - DNA, 31 bp, Homo sapiens; identical to SEQ ID NO: 3280
  chr8:27348567-27348598
  hyper

SEQ ID NO: 37295 - DNA, 31 bp, Homo sapiens; identical to SEQ ID NO: 3281
  chr8:27348741-27348772
  hyper

SEQ ID NO: 37296 - DNA, 29 bp, Homo sapiens
  chr8:27491096-27491125
  hyper
gatcaaggagctctcccggtgagcccccc

SEQ ID NO: 37297 - DNA, 31 bp, Homo sapiens; identical to SEQ ID NO: 3284
  chr8:27694968-27694999
  hyper

SEQ ID NO: 37298 - DNA, 31 bp, Homo sapiens; identical to SEQ ID NO: 3285
  chr8:28242820-28242851
  hyper

SEQ ID NO: 37299 - DNA, 31 bp, Homo sapiens; identical to SEQ ID NO: 3286
  chr8:28242854-28242885
  hyper

SEQ ID NO: 37300 - DNA, 41 bp, Homo sapiens; identical to SEQ ID NO: 3287
  chr8:28560084-28560125
  hyper

SEQ ID NO: 37301 - DNA, 55 bp, Homo sapiens; identical to SEQ ID NO: 3288
  chr8:28560156-28560211
  hyper

SEQ ID NO: 37302 - DNA, 31 bp, Homo sapiens; identical to SEQ ID NO: 3289
  chr8:30241644-30241675
  hyper

SEQ ID NO: 37303 - DNA, 134 bp, Homo sapiens; identical to SEQ ID NO: 3290
  chr8:30241764-30241898
  hyper

SEQ ID NO: 37304 - DNA, 60 bp, Homo sapiens; identical to SEQ ID NO: 3291
  chr8:30241907-30241967
  hyper

SEQ ID NO: 37305 - DNA, 31 bp, Homo sapiens; identical to SEQ ID NO: 3292
  chr8:30241968-30241999
  hyper

SEQ ID NO: 37306 - DNA, 57 bp, Homo sapiens; identical to SEQ ID NO: 3293
  chr8:30242004-30242061
  hyper

SEQ ID NO: 37307 - DNA, 31 bp, Homo sapiens; identical to SEQ ID NO: 3294
  chr8:30242177-30242208
  hyper

SEQ ID NO: 37308 - DNA, 254 bp, Homo sapiens; identical to SEQ ID NO: 3295
  chr8:30242285-30242539
  hyper

SEQ ID NO: 37309 - DNA, 81 bp, Homo sapiens
  chr8:30242550-30242631
  hyper
gccctcgcccagccccgcgccccagccctgcccggcccggcgaggaaggaccgggaagatgaacaacggcggcaaagccga

SEQ ID NO: 37310 - DNA, 130 bp, Homo sapiens
  chr8:30242697-30242827
  hyper
gcgggggcgacgcgggacccagtgcgggcggccggcggggcgcgggcccggggcgcggcggtggaagaaggttcaggcatggcccgtgccccggacgcagccccacagtgtggcccggggagggtggatc

SEQ ID NO: 37311 - DNA, 309 bp, Homo sapiens; identical to SEQ ID NO: 3298
  chr8:37553217-37553526
  hyper

SEQ ID NO: 37312 - DNA, 43 bp, Homo sapiens; identical to SEQ ID NO: 3299
  chr8:37553607-37553650
  hyper

SEQ ID NO: 37313 - DNA, 223 bp, Homo sapiens; identical to SEQ ID NO: 3300
  chr8:37553677-37553900
  hyper

SEQ ID NO: 37314 - DNA, 31 bp, Homo sapiens; identical to SEQ ID NO: 3301
  chr8:37553908-37553939
  hyper

SEQ ID NO: 37315 - DNA, 130 bp, Homo sapiens; identical to SEQ ID NO: 3302
  chr8:37554054-37554184
  hyper

SEQ ID NO: 37316 - DNA, 50 bp, Homo sapiens; identical to SEQ ID NO: 3303
  chr8:37888915-37888965
  hyper

SEQ ID NO: 37317 - DNA, 44 bp, Homo sapiens; identical to SEQ ID NO: 3304
  chr8:38089776-38089820
  hyper

SEQ ID NO: 37318 - DNA, 12 bp, Homo sapiens
  chr8:38324295-38324307
  hyper
ctgctacatctg

SEQ ID NO: 37319 - DNA, 37 bp, Homo sapiens
  chr8:38326240-38326277
  hyper
ttgtagttccccagccgcggccccaaaggacggggag

SEQ ID NO: 37320 - DNA, 125 bp, Homo sapiens; identical to SEQ ID NO: 3310
  chr8:38645088-38645213
  hyper

SEQ ID NO: 37321 - DNA, 31 bp, Homo sapiens; identical to SEQ ID NO: 3311
  chr8:41686094-41686125
  hyper

SEQ ID NO: 37322 - DNA, 95 bp, Homo sapiens; identical to SEQ ID NO: 3312
  chr8:41686169-41686264
  hyper

SEQ ID NO: 37323 - DNA, 31 bp, Homo sapiens; identical to SEQ ID NO: 3313
  chr8:41686271-41686302
  hyper

SEQ ID NO: 37324 - DNA, 1 bp, Homo sapiens
  chr8:41686308-41686309
  hyper
c

SEQ ID NO: 37325 - DNA, 34 bp, Homo sapiens; identical to SEQ ID NO: 3318
  chr8:42807055-42807089
  hyper

SEQ ID NO: 37326 - DNA, 292 bp, Homo sapiens; identical to SEQ ID NO: 3319
  chr8:48649724-48650016
  hyper

SEQ ID NO: 37327 - DNA, 37 bp, Homo sapiens; identical to SEQ ID NO: 3320
  chr8:48650189-48650226
  hyper

SEQ ID NO: 37328 - DNA, 48 bp, Homo sapiens; identical to SEQ ID NO: 3321
  chr8:48650239-48650287
  hyper

SEQ ID NO: 37329 - DNA, 31 bp, Homo sapiens; identical to SEQ ID NO: 3322
  chr8:48650303-48650334
  hyper

SEQ ID NO: 37330 - DNA, 107 bp, Homo sapiens; identical to SEQ ID NO: 3323
  chr8:48650382-48650489
  hyper

SEQ ID NO: 37331 - DNA, 205 bp, Homo sapiens; identical to SEQ ID NO: 3324
  chr8:48650554-48650759
  hyper

SEQ ID NO: 37332 - DNA, 71 bp, Homo sapiens; identical to SEQ ID NO: 3325
  chr8:48650937-48651008
  hyper

SEQ ID NO: 37333 - DNA, 38 bp, Homo sapiens; identical to SEQ ID NO: 3326
  chr8:48651054-48651092
  hyper

SEQ ID NO: 37334 - DNA, 144 bp, Homo sapiens; identical to SEQ ID NO: 3327
  chr8:48651107-48651251
  hyper

SEQ ID NO: 37335 - DNA, 194 bp, Homo sapiens; identical to SEQ ID NO: 3328
  chr8:48651254-48651448
  hyper

SEQ ID NO: 37336 - DNA, 31 bp, Homo sapiens; identical to SEQ ID NO: 3330
  chr8:54754897-54754928
  hyper

SEQ ID NO: 37337 - DNA, 31 bp, Homo sapiens; identical to SEQ ID NO: 3331
  chr8:54754959-54754990
  hyper

SEQ ID NO: 37338 - DNA, 59 bp, Homo sapiens; identical to SEQ ID NO: 3332
  chr8:56791950-56792009
  hyper

SEQ ID NO: 37339 - DNA, 31 bp, Homo sapiens; identical to SEQ ID NO: 3333
  chr8:57906851-57906882
  hyper

SEQ ID NO: 37340 - DNA, 31 bp, Homo sapiens; identical to SEQ ID NO: 3334
  chr8:57906901-57906932
  hyper

SEQ ID NO: 37341 - DNA, 31 bp, Homo sapiens; identical to SEQ ID NO: 3337
  chr8:60032428-60032459
  hyper

SEQ ID NO: 37342 - DNA, 31 bp, Homo sapiens; identical to SEQ ID NO: 3338
  chr8:62626392-62626423
  hyper

SEQ ID NO: 37343 - DNA, 31 bp, Homo sapiens; identical to SEQ ID NO: 3339
  chr8:62626692-62626723
  hyper

SEQ ID NO: 37344 - DNA, 70 bp, Homo sapiens; identical to SEQ ID NO: 3340
  chr8:62627198-62627268
  hyper

SEQ ID NO: 37345 - DNA, 40 bp, Homo sapiens; identical to SEQ ID NO: 3341
  chr8:62627303-62627343
  hyper

SEQ ID NO: 37346 - DNA, 39 bp, Homo sapiens; identical to SEQ ID NO: 3342
  chr8:63998843-63998882
  hyper

SEQ ID NO: 37347 - DNA, 2 bp, Homo sapiens
  chr8:67024904-67024906
  hyper
ga

SEQ ID NO: 37348 - DNA, 31 bp, Homo sapiens; identical to SEQ ID NO: 3346
  chr8:67417700-67417731
  hyper

SEQ ID NO: 37349 - DNA, 31 bp, Homo sapiens; identical to SEQ ID NO: 3347
  chr8:67417787-67417818
  hyper

SEQ ID NO: 37350 - DNA, 31 bp, Homo sapiens; identical to SEQ ID NO: 3348
  chr8:67417831-67417862
  hyper

SEQ ID NO: 37351 - DNA, 69 bp, Homo sapiens; identical to SEQ ID NO: 3349
  chr8:75233657-75233726
  hyper

SEQ ID NO: 37352 - DNA, 31 bp, Homo sapiens; identical to SEQ ID NO: 3350
  chr8:76319656-76319687
  hyper

SEQ ID NO: 37353 - DNA, 77 bp, Homo sapiens; identical to SEQ ID NO: 3358
  chr8:81490276-81490353
  hyper

SEQ ID NO: 37354 - DNA, 104 bp, Homo sapiens; identical to SEQ ID NO: 3359
  chr8:81490360-81490464
  hyper

SEQ ID NO: 37355 - DNA, 31 bp, Homo sapiens; identical to SEQ ID NO: 3360
  chr8:81490557-81490588
  hyper

SEQ ID NO: 37356 - DNA, 31 bp, Homo sapiens; identical to SEQ ID NO: 3361
  chr8:81490592-81490623
  hyper

SEQ ID NO: 37357 - DNA, 31 bp, Homo sapiens; identical to SEQ ID NO: 3362
  chr8:81490949-81490980
  hyper

SEQ ID NO: 37358 - DNA, 31 bp, Homo sapiens; identical to SEQ ID NO: 3363
  chr8:81785309-81785340
  hyper

SEQ ID NO: 37359 - DNA, 474 bp, Homo sapiens; identical to SEQ ID NO: 3364
  chr8:81785543-81786017
  hyper

SEQ ID NO: 37360 - DNA, 157 bp, Homo sapiens; identical to SEQ ID NO: 3365
  chr8:81786172-81786329
  hyper

SEQ ID NO: 37361 - DNA, 257 bp, Homo sapiens; identical to SEQ ID NO: 3366
  chr8:81786400-81786657
  hyper

SEQ ID NO: 37362 - DNA, 31 bp, Homo sapiens; identical to SEQ ID NO: 3367
  chr8:81786799-81786830
  hyper

SEQ ID NO: 37363 - DNA, 42 bp, Homo sapiens
  chr8:82193698-82193740
  hyper
aggagcgcaatgaggcctgggggtggccgtgtgttgccatcc

SEQ ID NO: 37364 - DNA, 90 bp, Homo sapiens; identical to SEQ ID NO: 3376
  chr8:87527031-87527121
  hyper

SEQ ID NO: 37365 - DNA, 31 bp, Homo sapiens; identical to SEQ ID NO: 3377
  chr8:91657492-91657523
  hyper

SEQ ID NO: 37366 - DNA, 31 bp, Homo sapiens; identical to SEQ ID NO: 3378
  chr8:91996904-91996935
  hyper

SEQ ID NO: 37367 - DNA, 136 bp, Homo sapiens; identical to SEQ ID NO: 3379
  chr8:93978346-93978482
  hyper

SEQ ID NO: 37368 - DNA, 56 bp, Homo sapiens; identical to SEQ ID NO: 3381
  chr8:95654442-95654498
  hyper

SEQ ID NO: 37369 - DNA, 48 bp, Homo sapiens; identical to SEQ ID NO: 3382
  chr8:95654507-95654555
  hyper

SEQ ID NO: 37370 - DNA, 49 bp, Homo sapiens; identical to SEQ ID NO: 3383
  chr8:96145957-96146006
  hyper

SEQ ID NO: 37371 - DNA, 370 bp, Homo sapiens; identical to SEQ ID NO: 3384
  chr8:96146109-96146479
  hyper

SEQ ID NO: 37372 - DNA, 109 bp, Homo sapiens; identical to SEQ ID NO: 3385
  chr8:96146633-96146742
  hyper

SEQ ID NO: 37373 - DNA, 66 bp, Homo sapiens; identical to SEQ ID NO: 3386
  chr8:96146758-96146824
  hyper

SEQ ID NO: 37374 - DNA, 37 bp, Homo sapiens
  chr8:97657754-97657791
  hyper
tccagcatcgctcattcgggggcgtgacgggaggacc

SEQ ID NO: 37375 - DNA, 42 bp, Homo sapiens; identical to SEQ ID NO: 3395
  chr8:99955001-99955043
  hyper

SEQ ID NO: 37376 - DNA, 31 bp, Homo sapiens; identical to SEQ ID NO: 3396
  chr8:101962306-101962337
  hyper

SEQ ID NO: 37377 - DNA, 31 bp, Homo sapiens; identical to SEQ ID NO: 3397
  chr8:101962361-101962392
  hyper

SEQ ID NO: 37378 - DNA, 31 bp, Homo sapiens; identical to SEQ ID NO: 3398
  chr8:104311507-104311538
  hyper

SEQ ID NO: 37379 - DNA, 31 bp, Homo sapiens; identical to SEQ ID NO: 3399
  chr8:107669717-107669748
  hyper

SEQ ID NO: 37380 - DNA, 31 bp, Homo sapiens; identical to SEQ ID NO: 3401
  chr8:107670602-107670633
  hyper

SEQ ID NO: 37381 - DNA, 31 bp, Homo sapiens; identical to SEQ ID NO: 3403
  chr8:119123497-119123528
  hyper

SEQ ID NO: 37382 - DNA, 31 bp, Homo sapiens; identical to SEQ ID NO: 3404
  chr8:119123674-119123705
  hyper

SEQ ID NO: 37383 - DNA, 65 bp, Homo sapiens; identical to SEQ ID NO: 3405
  chr8:120220352-120220417
  hyper

SEQ ID NO: 37384 - DNA, 31 bp, Homo sapiens; identical to SEQ ID NO: 3407
  chr8:120221021-120221052
  hyper

SEQ ID NO: 37385 - DNA, 37 bp, Homo sapiens; identical to SEQ ID NO: 3408
  chr8:120221198-120221235
  hyper

SEQ ID NO: 37386 - DNA, 45 bp, Homo sapiens; identical to SEQ ID NO: 3410
  chr8:127569471-127569516
  hyper

SEQ ID NO: 37387 - DNA, 31 bp, Homo sapiens; identical to SEQ ID NO: 3411
  chr8:127570026-127570057
  hyper

SEQ ID NO: 37388 - DNA, 84 bp, Homo sapiens; identical to SEQ ID NO: 3412
  chr8:127570211-127570295
  hyper

SEQ ID NO: 37389 - DNA, 31 bp, Homo sapiens; identical to SEQ ID NO: 3413
  chr8:127570537-127570568
  hyper

SEQ ID NO: 37390 - DNA, 163 bp, Homo sapiens; identical to SEQ ID NO: 3414
  chr8:127570640-127570803
  hyper

SEQ ID NO: 37391 - DNA, 37 bp, Homo sapiens; identical to SEQ ID NO: 3415
  chr8:133687474-133687511
  hyper

SEQ ID NO: 37392 - DNA, 54 bp, Homo sapiens; identical to SEQ ID NO: 3416
  chr8:134308717-134308771
  hyper

SEQ ID NO: 37393 - DNA, 105 bp, Homo sapiens; identical to SEQ ID NO: 3417
  chr8:134308781-134308886
  hyper

SEQ ID NO: 37394 - DNA, 44 bp, Homo sapiens; identical to SEQ ID NO: 3418
  chr8:134308893-134308937
  hyper

SEQ ID NO: 37395 - DNA, 133 bp, Homo sapiens; identical to SEQ ID NO: 3419
  chr8:134308982-134309115
  hyper

SEQ ID NO: 37396 - DNA, 133 bp, Homo sapiens; identical to SEQ ID NO: 3420
  chr8:134309262-134309395
  hyper

SEQ ID NO: 37397 - DNA, 31 bp, Homo sapiens; identical to SEQ ID NO: 3421
  chr8:134581318-134581349
  hyper

SEQ ID NO: 37398 - DNA, 72 bp, Homo sapiens
  chr8:134583293-134583365
  hyper
cccccagatccggagcagcgcgctctgacggcgtccccggggccgatagccacctcccggatctgcgcctgc

SEQ ID NO: 37399 - DNA, 76 bp, Homo sapiens; identical to SEQ ID NO: 3423
  chr8:134583478-134583554
  hyper

SEQ ID NO: 37400 - DNA, 31 bp, Homo sapiens; identical to SEQ ID NO: 3424
  chr8:135703767-135703798
  hyper

SEQ ID NO: 37401 - DNA, 38 bp, Homo sapiens; identical to SEQ ID NO: 3425
  chr8:141400091-141400129
  hyper

SEQ ID NO: 37402 - DNA, 82 bp, Homo sapiens; identical to SEQ ID NO: 3426
  chr8:141644413-141644495
  hyper

SEQ ID NO: 37403 - DNA, 31 bp, Homo sapiens; identical to SEQ ID NO: 3427
  chr8:142010383-142010414
  hyper

SEQ ID NO: 37404 - DNA, 48 bp, Homo sapiens; identical to SEQ ID NO: 3428
  chr8:142010549-142010597
  hyper

SEQ ID NO: 37405 - DNA, 39 bp, Homo sapiens; identical to SEQ ID NO: 3429
  chr8:142010629-142010668
  hyper

SEQ ID NO: 37406 - DNA, 109 bp, Homo sapiens; identical to SEQ ID NO: 3430
  chr8:142010702-142010811
  hyper

SEQ ID NO: 37407 - DNA, 38 bp, Homo sapiens; identical to SEQ ID NO: 3431
  chr8:142011006-142011044
  hyper

SEQ ID NO: 37408 - DNA, 31 bp, Homo sapiens; identical to SEQ ID NO: 3433
  chr8:142011161-142011192
  hyper

SEQ ID NO: 37409 - DNA, 397 bp, Homo sapiens; identical to SEQ ID NO: 3434
  chr8:142011193-142011590
  hyper

SEQ ID NO: 37410 - DNA, 73 bp, Homo sapiens; identical to SEQ ID NO: 3435
  chr8:142011606-142011679
  hyper

SEQ ID NO: 37411 - DNA, 44 bp, Homo sapiens; identical to SEQ ID NO: 3436
  chr8:142011876-142011920
  hyper

SEQ ID NO: 37412 - DNA, 182 bp, Homo sapiens; identical to SEQ ID NO: 3437
  chr8:142012050-142012232
  hyper

SEQ ID NO: 37413 - DNA, 37 bp, Homo sapiens; identical to SEQ ID NO: 3438
  chr8:142012264-142012301
  hyper

SEQ ID NO: 37414 - DNA, 31 bp, Homo sapiens; identical to SEQ ID NO: 3439
  chr8:142202197-142202228
  hyper

SEQ ID NO: 37415 - DNA, 50 bp, Homo sapiens; identical to SEQ ID NO: 3440
  chr8:142297707-142297757
  hyper

SEQ ID NO: 37416 - DNA, 42 bp, Homo sapiens; identical to SEQ ID NO: 3441
  chr8:143429132-143429174
  hyper

SEQ ID NO: 37417 - DNA, 31 bp, Homo sapiens; identical to SEQ ID NO: 3442
  chr8:143577913-143577944
  hyper

SEQ ID NO: 37418 - DNA, 41 bp, Homo sapiens; identical to SEQ ID NO: 3444
  chr8:144373097-144373138
  hyper

SEQ ID NO: 37419 - DNA, 96 bp, Homo sapiens; identical to SEQ ID NO: 3445
  chr8:144373147-144373243
  hyper

SEQ ID NO: 37420 - DNA, 113 bp, Homo sapiens
  chr8:144636577-144636690
  hyper
gtacgtgtatgcacacgcgcacaaacatgcacaaaacacggacgtgcatgcacacgcgcacatgtacacaacacgcacgtgcatacacatacgcacaatacgcacgtgtgtgc

SEQ ID NO: 37421 - DNA, 31 bp, Homo sapiens; identical to SEQ ID NO: 3449
  chr8:144640707-144640738
  hyper

SEQ ID NO: 37422 - DNA, 31 bp, Homo sapiens; identical to SEQ ID NO: 3450
  chr8:144681190-144681221
  hyper

SEQ ID NO: 37423 - DNA, 54 bp, Homo sapiens; identical to SEQ ID NO: 3451
  chr8:144691795-144691849
  hyper

SEQ ID NO: 37424 - DNA, 35 bp, Homo sapiens; identical to SEQ ID NO: 3452
  chr8:145149553-145149588
  hyper

SEQ ID NO: 37425 - DNA, 62 bp, Homo sapiens; identical to SEQ ID NO: 3453
  chr8:145687373-145687435
  hyper

SEQ ID NO: 37426 - DNA, 31 bp, Homo sapiens; identical to SEQ ID NO: 3454
  chr8:145697428-145697459
  hyper

SEQ ID NO: 37427 - DNA, 31 bp, Homo sapiens; identical to SEQ ID NO: 3455
  chr8:145697478-145697509
  hyper

SEQ ID NO: 37428 - DNA, 36 bp, Homo sapiens
  chr8:145697521-145697557
  hyper
gccctcctgaggaccccggcatagttcctagggcgc

SEQ ID NO: 37429 - DNA, 31 bp, Homo sapiens; identical to SEQ ID NO: 3457
  chr8:145909601-145909632
  hyper

SEQ ID NO: 37430 - DNA, 31 bp, Homo sapiens; identical to SEQ ID NO: 3458
  chr8:145909821-145909852
  hyper

SEQ ID NO: 37431 - DNA, 113 bp, Homo sapiens; identical to SEQ ID NO: 3459
  chr8:145909879-145909992
  hyper

SEQ ID NO: 37432 - DNA, 37 bp, Homo sapiens; identical to SEQ ID NO: 3460
  chr8:145910219-145910256
  hyper

SEQ ID NO: 37433 - DNA, 49 bp, Homo sapiens; identical to SEQ ID NO: 3461
  chr8:145910266-145910315
  hyper

SEQ ID NO: 37434 - DNA, 96 bp, Homo sapiens; identical to SEQ ID NO: 3462
  chr8:145911309-145911405
  hyper

SEQ ID NO: 37435 - DNA, 31 bp, Homo sapiens; identical to SEQ ID NO: 3463
  chr8:145911410-145911441
  hyper

SEQ ID NO: 37436 - DNA, 66 bp, Homo sapiens; identical to SEQ ID NO: 3464
  chr8:146052021-146052087
  hyper

SEQ ID NO: 37437 - DNA, 31 bp, Homo sapiens; identical to SEQ ID NO: 3465
  chr8:146052175-146052206
  hyper

SEQ ID NO: 37438 - DNA, 37 bp, Homo sapiens; identical to SEQ ID NO: 3466
  chr8:146078070-146078107
  hyper

SEQ ID NO: 37439 - DNA, 31 bp, Homo sapiens; identical to SEQ ID NO: 3467
  chr8:146278303-146278334
  hyper

SEQ ID NO: 37440 - DNA, 20 bp, Homo sapiens
  chr9:73497-73517
  hyper
caggtcggcgccccgcgccc

SEQ ID NO: 37441 - DNA, 31 bp, Homo sapiens; identical to SEQ ID NO: 3469
  chr9:757052-757083
  hyper

SEQ ID NO: 37442 - DNA, 46 bp, Homo sapiens; identical to SEQ ID NO: 3470
  chr9:2622859-2622905
  hyper

SEQ ID NO: 37443 - DNA, 31 bp, Homo sapiens; identical to SEQ ID NO: 3471
  chr9:4298072-4298103
  hyper

SEQ ID NO: 37444 - DNA, 2 bp, Homo sapiens
  chr9:6412570-6412572
  hyper
at

SEQ ID NO: 37445 - DNA, 55 bp, Homo sapiens; identical to SEQ ID NO: 3474
  chr9:6412929-6412984
  hyper

SEQ ID NO: 37446 - DNA, 31 bp, Homo sapiens; identical to SEQ ID NO: 3476
  chr9:12776574-12776605
  hyper

SEQ ID NO: 37447 - DNA, 6 bp, Homo sapiens
  chr9:13279298-13279304
  hyper
agcgcc

SEQ ID NO: 37448 - DNA, 47 bp, Homo sapiens
  chr9:13279406-13279453
  hyper
cggcgcccgcccagggccgcgacgcgagggggcggaggactggggag

SEQ ID NO: 37449 - DNA, 31 bp, Homo sapiens; identical to SEQ ID NO: 3478
  chr9:13279546-13279577
  hyper

SEQ ID NO: 37450 - DNA, 37 bp, Homo sapiens
  chr9:13279597-13279634
  hyper
cgccagcctagcgctccgccgcgccccctcccccagc

SEQ ID NO: 37451 - DNA, 21 bp, Homo sapiens
  chr9:13279749-13279770
  hyper
ggggacgcggccgagcaggcc

SEQ ID NO: 37452 - DNA, 58 bp, Homo sapiens; identical to SEQ ID NO: 3480
  chr9:14313170-14313228
  hyper

SEQ ID NO: 37453 - DNA, 105 bp, Homo sapiens; identical to SEQ ID NO: 3481
  chr9:14313927-14314032
  hyper

SEQ ID NO: 37454 - DNA, 135 bp, Homo sapiens; identical to SEQ ID NO: 3482
  chr9:14314038-14314173
  hyper

SEQ ID NO: 37455 - DNA, 86 bp, Homo sapiens; identical to SEQ ID NO: 3483
  chr9:14314196-14314282
  hyper

SEQ ID NO: 37456 - DNA, 31 bp, Homo sapiens; identical to SEQ ID NO: 3484
  chr9:14314538-14314569
  hyper

SEQ ID NO: 37457 - DNA, 39 bp, Homo sapiens; identical to SEQ ID NO: 3485
  chr9:14315070-14315109
  hyper

SEQ ID NO: 37458 - DNA, 411 bp, Homo sapiens; identical to SEQ ID NO: 3486
  chr9:14315263-14315674
  hyper

SEQ ID NO: 37459 - DNA, 31 bp, Homo sapiens; identical to SEQ ID NO: 3487
  chr9:14315779-14315810
  hyper

SEQ ID NO: 37460 - DNA, 43 bp, Homo sapiens; identical to SEQ ID NO: 3488
  chr9:14322292-14322335
  hyper

SEQ ID NO: 37461 - DNA, 181 bp, Homo sapiens; identical to SEQ ID NO: 3489
  chr9:14322352-14322533
  hyper

SEQ ID NO: 37462 - DNA, 383 bp, Homo sapiens; identical to SEQ ID NO: 3490
  chr9:14322614-14322997
  hyper

SEQ ID NO: 37463 - DNA, 31 bp, Homo sapiens; identical to SEQ ID NO: 3491
  chr9:14323107-14323138
  hyper

SEQ ID NO: 37464 - DNA, 31 bp, Homo sapiens; identical to SEQ ID NO: 3492
  chr9:15306090-15306121
  hyper

SEQ ID NO: 37465 - DNA, 31 bp, Homo sapiens; identical to SEQ ID NO: 3493
  chr9:15306648-15306679
  hyper

SEQ ID NO: 37466 - DNA, 113 bp, Homo sapiens; identical to SEQ ID NO: 3494
  chr9:15306719-15306832
  hyper

SEQ ID NO: 37467 - DNA, 31 bp, Homo sapiens; identical to SEQ ID NO: 3495
  chr9:15306895-15306926
  hyper

SEQ ID NO: 37468 - DNA, 134 bp, Homo sapiens; identical to SEQ ID NO: 3496
  chr9:15306998-15307132
  hyper

SEQ ID NO: 37469 - DNA, 31 bp, Homo sapiens; identical to SEQ ID NO: 3497
  chr9:15423708-15423739
  hyper

SEQ ID NO: 37470 - DNA, 72 bp, Homo sapiens; identical to SEQ ID NO: 3498
  chr9:20620968-20621040
  hyper

SEQ ID NO: 37471 - DNA, 170 bp, Homo sapiens; identical to SEQ ID NO: 3499
  chr9:20621047-20621217
  hyper

SEQ ID NO: 37472 - DNA, 34 bp, Homo sapiens; identical to SEQ ID NO: 3500
  chr9:20621272-20621306
  hyper

SEQ ID NO: 37473 - DNA, 276 bp, Homo sapiens; identical to SEQ ID NO: 3501
  chr9:20621639-20621915
  hyper

SEQ ID NO: 37474 - DNA, 31 bp, Homo sapiens; identical to SEQ ID NO: 3502
  chr9:20622091-20622122
  hyper

SEQ ID NO: 37475 - DNA, 70 bp, Homo sapiens; identical to SEQ ID NO: 3503
  chr9:20622136-20622206
  hyper

SEQ ID NO: 37476 - DNA, 41 bp, Homo sapiens; identical to SEQ ID NO: 3504
  chr9:20622217-20622258
  hyper

SEQ ID NO: 37477 - DNA, 2 bp, Homo sapiens
  chr9:21031411-21031413
  hyper
aa

SEQ ID NO: 37478 - DNA, 31 bp, Homo sapiens; identical to SEQ ID NO: 3506
  chr9:21802621-21802652
  hyper

SEQ ID NO: 37479 - DNA, 64 bp, Homo sapiens; identical to SEQ ID NO: 3507
  chr9:26956460-26956524
  hyper

SEQ ID NO: 37480 - DNA, 40 bp, Homo sapiens; identical to SEQ ID NO: 3508
  chr9:29780379-29780419
  hyper

SEQ ID NO: 37481 - DNA, 39 bp, Homo sapiens; identical to SEQ ID NO: 3509
  chr9:34647224-34647263
  hyper

SEQ ID NO: 37482 - DNA, 34 bp, Homo sapiens; identical to SEQ ID NO: 3510
  chr9:35072283-35072317
  hyper

SEQ ID NO: 37483 - DNA, 167 bp, Homo sapiens; identical to SEQ ID NO: 3511
  chr9:35161858-35162025
  hyper

SEQ ID NO: 37484 - DNA, 2 bp, Homo sapiens
  chr9:35162052-35162054
  hyper
cc

SEQ ID NO: 37485 - DNA, 31 bp, Homo sapiens; identical to SEQ ID NO: 3514
  chr9:35162482-35162513
  hyper

SEQ ID NO: 37486 - DNA, 90 bp, Homo sapiens; identical to SEQ ID NO: 3515
  chr9:35489688-35489778
  hyper

SEQ ID NO: 37487 - DNA, 36 bp, Homo sapiens; identical to SEQ ID NO: 3516
  chr9:35489784-35489820
  hyper

SEQ ID NO: 37488 - DNA, 47 bp, Homo sapiens; identical to SEQ ID NO: 3517
  chr9:35490106-35490153
  hyper

SEQ ID NO: 37489 - DNA, 31 bp, Homo sapiens; identical to SEQ ID NO: 3519
  chr9:35700411-35700442
  hyper

SEQ ID NO: 37490 - DNA, 42 bp, Homo sapiens; identical to SEQ ID NO: 3533
  chr9:37034149-37034191
  hyper

SEQ ID NO: 37491 - DNA, 2 bp, Homo sapiens
  chr9:37034196-37034198
  hyper
ct

SEQ ID NO: 37492 - DNA, 31 bp, Homo sapiens; identical to SEQ ID NO: 3541
  chr9:37998734-37998765
  hyper

SEQ ID NO: 37493 - DNA, 34 bp, Homo sapiens; identical to SEQ ID NO: 3542
  chr9:38067950-38067984
  hyper

SEQ ID NO: 37494 - DNA, 96 bp, Homo sapiens; identical to SEQ ID NO: 3543
  chr9:38067990-38068086
  hyper

SEQ ID NO: 37495 - DNA, 106 bp, Homo sapiens; identical to SEQ ID NO: 3544
  chr9:38068491-38068597
  hyper

SEQ ID NO: 37496 - DNA, 76 bp, Homo sapiens; identical to SEQ ID NO: 3545
  chr9:38068628-38068704
  hyper

SEQ ID NO: 37497 - DNA, 75 bp, Homo sapiens; identical to SEQ ID NO: 3546
  chr9:38068832-38068907
  hyper

SEQ ID NO: 37498 - DNA, 2 bp, Homo sapiens
  chr9:66455724-66455726
  hyper
tg

SEQ ID NO: 37499 - DNA, 98 bp, Homo sapiens; identical to SEQ ID NO: 3548
  chr9:66458085-66458183
  hyper

SEQ ID NO: 37500 - DNA, 43 bp, Homo sapiens; identical to SEQ ID NO: 3549
  chr9:66458245-66458288
  hyper

SEQ ID NO: 37501 - DNA, 43 bp, Homo sapiens; identical to SEQ ID NO: 3556
  chr9:71736562-71736605
  hyper

SEQ ID NO: 37502 - DNA, 63 bp, Homo sapiens; identical to SEQ ID NO: 3557
  chr9:71737160-71737223
  hyper

SEQ ID NO: 37503 - DNA, 63 bp, Homo sapiens; identical to SEQ ID NO: 3558
  chr9:71737230-71737293
  hyper

SEQ ID NO: 37504 - DNA, 41 bp, Homo sapiens; identical to SEQ ID NO: 3559
  chr9:71788700-71788741
  hyper

SEQ ID NO: 37505 - DNA, 31 bp, Homo sapiens; identical to SEQ ID NO: 3560
  chr9:71788789-71788820
  hyper

SEQ ID NO: 37506 - DNA, 49 bp, Homo sapiens; identical to SEQ ID NO: 3561
  chr9:71788827-71788876
  hyper

SEQ ID NO: 37507 - DNA, 21 bp, Homo sapiens
  chr9:71788930-71788951
  hyper
cgccgccgccgcctcccgccc

SEQ ID NO: 37508 - DNA, 31 bp, Homo sapiens; identical to SEQ ID NO: 3566
  chr9:71789785-71789816
  hyper

SEQ ID NO: 37509 - DNA, 31 bp, Homo sapiens; identical to SEQ ID NO: 3567
  chr9:71881715-71881746
  hyper

SEQ ID NO: 37510 - DNA, 97 bp, Homo sapiens
  chr9:71939984-71940081
  hyper
gggtgcgcccagggccagcgggaggcggacccgccaggcggcaggtgggtgcggccggctggagccagggcagcggcagcggcggcagcaagtggtt

SEQ ID NO: 37511 - DNA, 58 bp, Homo sapiens; identical to SEQ ID NO: 3570
  chr9:71940141-71940199
  hyper

SEQ ID NO: 37512 - DNA, 69 bp, Homo sapiens; identical to SEQ ID NO: 3572
  chr9:71940315-71940384
  hyper

SEQ ID NO: 37513 - DNA, 31 bp, Homo sapiens; identical to SEQ ID NO: 3573
  chr9:72374873-72374904
  hyper

SEQ ID NO: 37514 - DNA, 31 bp, Homo sapiens; identical to SEQ ID NO: 3574
  chr9:72874087-72874118
  hyper

SEQ ID NO: 37515 - DNA, 40 bp, Homo sapiens
  chr9:73027930-73027970
  hyper
gatcctgtctctcctccgggctgtgggaaggactcgaccc

SEQ ID NO: 37516 - DNA, 130 bp, Homo sapiens; identical to SEQ ID NO: 3576
  chr9:73028375-73028505
  hyper

SEQ ID NO: 37517 - DNA, 75 bp, Homo sapiens; identical to SEQ ID NO: 3577
  chr9:73028534-73028609
  hyper

SEQ ID NO: 37518 - DNA, 40 bp, Homo sapiens; identical to SEQ ID NO: 3578
  chr9:73028998-73029038
  hyper

SEQ ID NO: 37519 - DNA, 31 bp, Homo sapiens; identical to SEQ ID NO: 3579
  chr9:73035699-73035730
  hyper

SEQ ID NO: 37520 - DNA, 36 bp, Homo sapiens; identical to SEQ ID NO: 3580
  chr9:74382902-74382938
  hyper

SEQ ID NO: 37521 - DNA, 59 bp, Homo sapiens; identical to SEQ ID NO: 3581
  chr9:74639986-74640045
  hyper

SEQ ID NO: 37522 - DNA, 47 bp, Homo sapiens; identical to SEQ ID NO: 3582
  chr9:74640069-74640116
  hyper

SEQ ID NO: 37523 - DNA, 31 bp, Homo sapiens; identical to SEQ ID NO: 3583
  chr9:74640148-74640179
  hyper

SEQ ID NO: 37524 - DNA, 31 bp, Homo sapiens; identical to SEQ ID NO: 3584
  chr9:77501916-77501947
  hyper

SEQ ID NO: 37525 - DNA, 65 bp, Homo sapiens; identical to SEQ ID NO: 3585
  chr9:77502361-77502426
  hyper

SEQ ID NO: 37526 - DNA, 31 bp, Homo sapiens; identical to SEQ ID NO: 3586
  chr9:78505087-78505118
  hyper

SEQ ID NO: 37527 - DNA, 118 bp, Homo sapiens; identical to SEQ ID NO: 3587
  chr9:78505445-78505563
  hyper

SEQ ID NO: 37528 - DNA, 186 bp, Homo sapiens
  chr9:78505622-78505808
  hyper
gagggagcgctgggagcgagcaagcgagcgtttggagcccgggccagcagagggggcgcccggtcgctgcctgtaccgctcccgctggtcatctccgccgcgctcgggggccccgggaggagcgagaccgagtcggagagtccgggagccaagccgggcgaaacccaactgcggaggacgcccgcc

SEQ ID NO: 37529 - DNA, 87 bp, Homo sapiens; identical to SEQ ID NO: 3589
  chr9:80646055-80646142
  hyper

SEQ ID NO: 37530 - DNA, 164 bp, Homo sapiens; identical to SEQ ID NO: 3590
  chr9:80646151-80646315
  hyper

SEQ ID NO: 37531 - DNA, 337 bp, Homo sapiens
  chr9:80646509-80646846
  hyper
cgccgccgccgccgcctgcgaggctcccctacgccgtgcgcctggcggcgagagctcattcaccggggtgtccccgcagcgagcggccgccgacggctccccgcgcccggcgcgcccgctcctcgccgccgcctgacacggctcccgggcgccctcggccctgtccgcgcccaccgcccggctcgcgcgcagacccggttcccgtcccgcccggcaaccgcgcgctcctccgcctccgcctccgcccccgcccccgccagacgcccaccccctgccccgattgccaggcgcggagcggctgctcagtgcgagccctccccctcgccacacacacaca

SEQ ID NO: 37532 - DNA, 73 bp, Homo sapiens; identical to SEQ ID NO: 3592
  chr9:80646862-80646935
  hyper

SEQ ID NO: 37533 - DNA, 69 bp, Homo sapiens
  chr9:80647103-80647172
  hyper
cggcagagtccgcgggcgcagcagtcacggccgcccccggccgaagtcggggccagacccggccgccga

SEQ ID NO: 37534 - DNA, 269 bp, Homo sapiens
  chr9:80647247-80647516
  hyper
ggtgagacaggaatatggcggcctctgcctgcctcagcccaccggcccgggagcgcggccgcggcccctgctgaagtcgcgggaggcggccccgcggagccccgcacgcgctccctgcggcgccggcgctggcgtccgccgctcccgggctgtgcctgtctgctccacggggtcgctcctcagccgtttctgtgtttcccgttcctatttctaaaacgccattcggttagaaactctcacgtcacctctgacaccggtgcagtcttaga

SEQ ID NO: 37535 - DNA, 73 bp, Homo sapiens; identical to SEQ ID NO: 3594
  chr9:82185463-82185536
  hyper

SEQ ID NO: 37536 - DNA, 107 bp, Homo sapiens
  chr9:82185537-82185644
  hyper
ttgcttctccaaagagcgggaaaaagaggcgcagtcttggtactgatctgggggagggaacgtcccagggcgcgcaggggcgttttctacccgtgccccgtcggcct

SEQ ID NO: 37537 - DNA, 156 bp, Homo sapiens
  chr9:82185703-82185859
  hyper
ggaggtccagcgtctctgattcccggatcttcagccccacccggagcccccacggttactgccccccgcgacccccgatggagcgtcgggatgcgctttctctccgagtgcctccgggggtggagggagggaggcctgtttcggaactaaatggca

SEQ ID NO: 37538 - DNA, 72 bp, Homo sapiens; identical to SEQ ID NO: 3596
  chr9:82185989-82186061
  hyper

SEQ ID NO: 37539 - DNA, 98 bp, Homo sapiens; identical to SEQ ID NO: 3597
  chr9:84302221-84302319
  hyper

SEQ ID NO: 37540 - DNA, 80 bp, Homo sapiens; identical to SEQ ID NO: 3598
  chr9:84302327-84302407
  hyper

SEQ ID NO: 37541 - DNA, 31 bp, Homo sapiens; identical to SEQ ID NO: 3599
  chr9:84302412-84302443
  hyper

SEQ ID NO: 37542 - DNA, 31 bp, Homo sapiens; identical to SEQ ID NO: 3600
  chr9:84302451-84302482
  hyper

SEQ ID NO: 37543 - DNA, 55 bp, Homo sapiens; identical to SEQ ID NO: 3601
  chr9:84302509-84302564
  hyper

SEQ ID NO: 37544 - DNA, 44 bp, Homo sapiens; identical to SEQ ID NO: 3602
  chr9:84302565-84302609
  hyper

SEQ ID NO: 37545 - DNA, 217 bp, Homo sapiens; identical to SEQ ID NO: 3603
  chr9:84302640-84302857
  hyper

SEQ ID NO: 37546 - DNA, 54 bp, Homo sapiens; identical to SEQ ID NO: 3604
  chr9:84302879-84302933
  hyper

SEQ ID NO: 37547 - DNA, 53 bp, Homo sapiens; identical to SEQ ID NO: 3605
  chr9:84303002-84303055
  hyper

SEQ ID NO: 37548 - DNA, 59 bp, Homo sapiens; identical to SEQ ID NO: 3606
  chr9:84303106-84303165
  hyper

SEQ ID NO: 37549 - DNA, 167 bp, Homo sapiens; identical to SEQ ID NO: 3607
  chr9:84303313-84303480
  hyper

SEQ ID NO: 37550 - DNA, 64 bp, Homo sapiens; identical to SEQ ID NO: 3608
  chr9:84303614-84303678
  hyper

SEQ ID NO: 37551 - DNA, 161 bp, Homo sapiens; identical to SEQ ID NO: 3609
  chr9:84303730-84303891
  hyper

SEQ ID NO: 37552 - DNA, 64 bp, Homo sapiens; identical to SEQ ID NO: 3610
  chr9:84304432-84304496
  hyper

SEQ ID NO: 37553 - DNA, 46 bp, Homo sapiens; identical to SEQ ID NO: 3611
  chr9:84304529-84304575
  hyper

SEQ ID NO: 37554 - DNA, 50 bp, Homo sapiens; identical to SEQ ID NO: 3612
  chr9:84304579-84304629
  hyper

SEQ ID NO: 37555 - DNA, 31 bp, Homo sapiens; identical to SEQ ID NO: 3613
  chr9:85834937-85834968
  hyper

SEQ ID NO: 37556 - DNA, 24 bp, Homo sapiens
  chr9:86886736-86886760
  hyper
ctattttcccgggccggacactga

SEQ ID NO: 37557 - DNA, 225 bp, Homo sapiens; identical to SEQ ID NO: 3615
  chr9:88713661-88713886
  hyper

SEQ ID NO: 37558 - DNA, 62 bp, Homo sapiens; identical to SEQ ID NO: 3616
  chr9:90691227-90691289
  hyper

SEQ ID NO: 37559 - DNA, 31 bp, Homo sapiens; identical to SEQ ID NO: 3617
  chr9:91002683-91002714
  hyper

SEQ ID NO: 37560 - DNA, 96 bp, Homo sapiens; identical to SEQ ID NO: 3618
  chr9:91002725-91002821
  hyper

SEQ ID NO: 37561 - DNA, 54 bp, Homo sapiens; identical to SEQ ID NO: 3619
  chr9:91002840-91002894
  hyper

SEQ ID NO: 37562 - DNA, 51 bp, Homo sapiens; identical to SEQ ID NO: 3620
  chr9:91002941-91002992
  hyper

SEQ ID NO: 37563 - DNA, 31 bp, Homo sapiens; identical to SEQ ID NO: 3621
  chr9:92762428-92762459
  hyper

SEQ ID NO: 37564 - DNA, 31 bp, Homo sapiens; identical to SEQ ID NO: 3622
  chr9:92859700-92859731
  hyper

SEQ ID NO: 37565 - DNA, 222 bp, Homo sapiens; identical to SEQ ID NO: 3623
  chr9:93955658-93955880
  hyper

SEQ ID NO: 37566 - DNA, 31 bp, Homo sapiens; identical to SEQ ID NO: 3624
  chr9:93955893-93955924
  hyper

SEQ ID NO: 37567 - DNA, 2 bp, Homo sapiens
  chr9:93955928-93955930
  hyper
ca

SEQ ID NO: 37568 - DNA, 49 bp, Homo sapiens
  chr9:93956177-93956226
  hyper
gacccgcaggaatgcgaggggcaagacagatcgccggaggagcaggggt

SEQ ID NO: 37569 - DNA, 86 bp, Homo sapiens; identical to SEQ ID NO: 3627
  chr9:93956242-93956328
  hyper

SEQ ID NO: 37570 - DNA, 16 bp, Homo sapiens
  chr9:93956429-93956445
  hyper
ttacaaccccccaccc

SEQ ID NO: 37571 - DNA, 39 bp, Homo sapiens; identical to SEQ ID NO: 3629
  chr9:94662836-94662875
  hyper

SEQ ID NO: 37572 - DNA, 31 bp, Homo sapiens; identical to SEQ ID NO: 3630
  chr9:95946018-95946049
  hyper

SEQ ID NO: 37573 - DNA, 31 bp, Homo sapiens; identical to SEQ ID NO: 3632
  chr9:95946873-95946904
  hyper

SEQ ID NO: 37574 - DNA, 113 bp, Homo sapiens; identical to SEQ ID NO: 3634
  chr9:97767418-97767531
  hyper

SEQ ID NO: 37575 - DNA, 92 bp, Homo sapiens; identical to SEQ ID NO: 3635
  chr9:97767681-97767773
  hyper

SEQ ID NO: 37576 - DNA, 31 bp, Homo sapiens; identical to SEQ ID NO: 3636
  chr9:97811372-97811403
  hyper

SEQ ID NO: 37577 - DNA, 47 bp, Homo sapiens; identical to SEQ ID NO: 3637
  chr9:98268139-98268186
  hyper

SEQ ID NO: 37578 - DNA, 117 bp, Homo sapiens; identical to SEQ ID NO: 3638
  chr9:98273073-98273190
  hyper

SEQ ID NO: 37579 - DNA, 59 bp, Homo sapiens; identical to SEQ ID NO: 3639
  chr9:98273462-98273521
  hyper

SEQ ID NO: 37580 - DNA, 31 bp, Homo sapiens; identical to SEQ ID NO: 3640
  chr9:98273570-98273601
  hyper

SEQ ID NO: 37581 - DNA, 56 bp, Homo sapiens; identical to SEQ ID NO: 3641
  chr9:98273637-98273693
  hyper

SEQ ID NO: 37582 - DNA, 31 bp, Homo sapiens; identical to SEQ ID NO: 3643
  chr9:99145683-99145714
  hyper

SEQ ID NO: 37583 - DNA, 71 bp, Homo sapiens; identical to SEQ ID NO: 3644
  chr9:99381369-99381440
  hyper

SEQ ID NO: 37584 - DNA, 156 bp, Homo sapiens; identical to SEQ ID NO: 3646
  chr9:99381730-99381886
  hyper

SEQ ID NO: 37585 - DNA, 81 bp, Homo sapiens; identical to SEQ ID NO: 3647
  chr9:99381944-99382025
  hyper

SEQ ID NO: 37586 - DNA, 92 bp, Homo sapiens; identical to SEQ ID NO: 3648
  chr9:99382036-99382128
  hyper

SEQ ID NO: 37587 - DNA, 38 bp, Homo sapiens; identical to SEQ ID NO: 3649
  chr9:99382132-99382170
  hyper

SEQ ID NO: 37588 - DNA, 64 bp, Homo sapiens; identical to SEQ ID NO: 3650
  chr9:99382245-99382309
  hyper

SEQ ID NO: 37589 - DNA, 37 bp, Homo sapiens; identical to SEQ ID NO: 3651
  chr9:99416949-99416986
  hyper

SEQ ID NO: 37590 - DNA, 31 bp, Homo sapiens; identical to SEQ ID NO: 3652
  chr9:99417008-99417039
  hyper

SEQ ID NO: 37591 - DNA, 31 bp, Homo sapiens; identical to SEQ ID NO: 3653
  chr9:99417052-99417083
  hyper

SEQ ID NO: 37592 - DNA, 38 bp, Homo sapiens; identical to SEQ ID NO: 3654
  chr9:99417086-99417124
  hyper

SEQ ID NO: 37593 - DNA, 31 bp, Homo sapiens; identical to SEQ ID NO: 3655
  chr9:99417159-99417190
  hyper

SEQ ID NO: 37594 - DNA, 174 bp, Homo sapiens; identical to SEQ ID NO: 3656
  chr9:99417396-99417570
  hyper

SEQ ID NO: 37595 - DNA, 84 bp, Homo sapiens; identical to SEQ ID NO: 3657
  chr9:99417663-99417747
  hyper

SEQ ID NO: 37596 - DNA, 40 bp, Homo sapiens; identical to SEQ ID NO: 3658
  chr9:99417766-99417806
  hyper

SEQ ID NO: 37597 - DNA, 100 bp, Homo sapiens; identical to SEQ ID NO: 3659
  chr9:99801183-99801283
  hyper

SEQ ID NO: 37598 - DNA, 87 bp, Homo sapiens; identical to SEQ ID NO: 3660
  chr9:99801470-99801557
  hyper

SEQ ID NO: 37599 - DNA, 40 bp, Homo sapiens; identical to SEQ ID NO: 3661
  chr9:100565761-100565801
  hyper

SEQ ID NO: 37600 - DNA, 220 bp, Homo sapiens; identical to SEQ ID NO: 3662
  chr9:100565845-100566065
  hyper

SEQ ID NO: 37601 - DNA, 31 bp, Homo sapiens; identical to SEQ ID NO: 3664
  chr9:100610580-100610611
  hyper

SEQ ID NO: 37602 - DNA, 2 bp, Homo sapiens
  chr9:102586643-102586645
  hyper
gc

SEQ ID NO: 37603 - DNA, 31 bp, Homo sapiens; identical to SEQ ID NO: 3670
  chr9:110252105-110252136
  hyper

SEQ ID NO: 37604 - DNA, 41 bp, Homo sapiens; identical to SEQ ID NO: 3671
  chr9:110252232-110252273
  hyper

SEQ ID NO: 37605 - DNA, 493 bp, Homo sapiens; identical to SEQ ID NO: 3672
  chr9:112082580-112083073
  hyper

SEQ ID NO: 37606 - DNA, 249 bp, Homo sapiens; identical to SEQ ID NO: 3673
  chr9:112083164-112083413
  hyper

SEQ ID NO: 37607 - DNA, 79 bp, Homo sapiens; identical to SEQ ID NO: 3674
  chr9:112083423-112083502
  hyper

SEQ ID NO: 37608 - DNA, 2 bp, Homo sapiens
  chr9:112259824-112259826
  hyper
ga

SEQ ID NO: 37609 - DNA, 31 bp, Homo sapiens; identical to SEQ ID NO: 3678
  chr9:112260276-112260307
  hyper

SEQ ID NO: 37610 - DNA, 16 bp, Homo sapiens
  chr9:112260453-112260469
  hyper
ccccgcaccctgcccc

SEQ ID NO: 37611 - DNA, 74 bp, Homo sapiens
  chr9:112260523-112260597
  hyper
cccaggtaggtcgcgcgtgcgggcggcgcggaagctcgctcgcggcgcgacctggccgccgtctgagcatgccc

SEQ ID NO: 37612 - DNA, 31 bp, Homo sapiens; identical to SEQ ID NO: 3680
  chr9:114360504-114360535
  hyper

SEQ ID NO: 37613 - DNA, 31 bp, Homo sapiens; identical to SEQ ID NO: 3681
  chr9:114360546-114360577
  hyper

SEQ ID NO: 37614 - DNA, 31 bp, Homo sapiens; identical to SEQ ID NO: 3682
  chr9:114360731-114360762
  hyper

SEQ ID NO: 37615 - DNA, 15 bp, Homo sapiens
  chr9:114361169-114361184
  hyper
cagaacctactcctc

SEQ ID NO: 37616 - DNA, 143 bp, Homo sapiens; identical to SEQ ID NO: 3684
  chr9:114361585-114361728
  hyper

SEQ ID NO: 37617 - DNA, 55 bp, Homo sapiens; identical to SEQ ID NO: 3685
  chr9:116639070-116639125
  hyper

SEQ ID NO: 37618 - DNA, 31 bp, Homo sapiens; identical to SEQ ID NO: 3686
  chr9:116860420-116860451
  hyper

SEQ ID NO: 37619 - DNA, 31 bp, Homo sapiens; identical to SEQ ID NO: 3687
  chr9:116916213-116916244
  hyper

SEQ ID NO: 37620 - DNA, 19 bp, Homo sapiens
  chr9:123690914-123690933
  hyper
cactcgtcctttggggcgc

SEQ ID NO: 37621 - DNA, 31 bp, Homo sapiens; identical to SEQ ID NO: 3689
  chr9:124041370-124041401
  hyper

SEQ ID NO: 37622 - DNA, 24 bp, Homo sapiens
  chr9:124461310-124461334
  hyper
gcctcggccgcggtcggcgcggct

SEQ ID NO: 37623 - DNA, 31 bp, Homo sapiens; identical to SEQ ID NO: 3691
  chr9:124622035-124622066
  hyper

SEQ ID NO: 37624 - DNA, 31 bp, Homo sapiens; identical to SEQ ID NO: 3692
  chr9:124622092-124622123
  hyper

SEQ ID NO: 37625 - DNA, 71 bp, Homo sapiens; identical to SEQ ID NO: 3693
  chr9:124622146-124622217
  hyper

SEQ ID NO: 37626 - DNA, 31 bp, Homo sapiens; identical to SEQ ID NO: 3694
  chr9:125587779-125587810
  hyper

SEQ ID NO: 37627 - DNA, 31 bp, Homo sapiens; identical to SEQ ID NO: 3695
  chr9:127061459-127061490
  hyper

SEQ ID NO: 37628 - DNA, 94 bp, Homo sapiens; identical to SEQ ID NO: 3696
  chr9:127534415-127534509
  hyper

SEQ ID NO: 37629 - DNA, 31 bp, Homo sapiens; identical to SEQ ID NO: 3697
  chr9:128024544-128024575
  hyper

SEQ ID NO: 37630 - DNA, 31 bp, Homo sapiens; identical to SEQ ID NO: 3698
  chr9:128138375-128138406
  hyper

SEQ ID NO: 37631 - DNA, 31 bp, Homo sapiens; identical to SEQ ID NO: 3699
  chr9:129385814-129385845
  hyper

SEQ ID NO: 37632 - DNA, 31 bp, Homo sapiens; identical to SEQ ID NO: 3700
  chr9:129413244-129413275
  hyper

SEQ ID NO: 37633 - DNA, 83 bp, Homo sapiens; identical to SEQ ID NO: 3701
  chr9:129485525-129485608
  hyper

SEQ ID NO: 37634 - DNA, 67 bp, Homo sapiens
  chr9:129485614-129485681
  hyper
gccttcagggagcccgcgcgggcgggctaggctcgggcggaaatgaagaggataagatctgcgagca

SEQ ID NO: 37635 - DNA, 63 bp, Homo sapiens; identical to SEQ ID NO: 3703
  chr9:130159224-130159287
  hyper

SEQ ID NO: 37636 - DNA, 141 bp, Homo sapiens; identical to SEQ ID NO: 3704
  chr9:130159302-130159443
  hyper

SEQ ID NO: 37637 - DNA, 190 bp, Homo sapiens; identical to SEQ ID NO: 3705
  chr9:130330785-130330975
  hyper

SEQ ID NO: 37638 - DNA, 58 bp, Homo sapiens; identical to SEQ ID NO: 3706
  chr9:130331058-130331116
  hyper

SEQ ID NO: 37639 - DNA, 36 bp, Homo sapiens; identical to SEQ ID NO: 3707
  chr9:130331223-130331259
  hyper

SEQ ID NO: 37640 - DNA, 159 bp, Homo sapiens; identical to SEQ ID NO: 3708
  chr9:130374195-130374354
  hyper

SEQ ID NO: 37641 - DNA, 37 bp, Homo sapiens; identical to SEQ ID NO: 3709
  chr9:130374656-130374693
  hyper

SEQ ID NO: 37642 - DNA, 113 bp, Homo sapiens
  chr9:130639866-130639979
  hyper
ggcgcccccccagacacgcgcgggcacgcactgacctggggaggggtgcgggtgggcgccggggccagtgcgtgccctgcccgtcctcgcggcggccggcaaaggcgactatt

SEQ ID NO: 37643 - DNA, 18 bp, Homo sapiens
  chr9:130640012-130640030
  hyper
cggcgttcccgaaggcag

SEQ ID NO: 37644 - DNA, 40 bp, Homo sapiens; identical to SEQ ID NO: 3711
  chr9:130661050-130661090
  hyper

SEQ ID NO: 37645 - DNA, 55 bp, Homo sapiens; identical to SEQ ID NO: 3712
  chr9:130661091-130661146
  hyper

SEQ ID NO: 37646 - DNA, 31 bp, Homo sapiens; identical to SEQ ID NO: 3713
  chr9:130674858-130674889
  hyper

SEQ ID NO: 37647 - DNA, 31 bp, Homo sapiens; identical to SEQ ID NO: 3714
  chr9:130865695-130865726
  hyper

SEQ ID NO: 37648 - DNA, 75 bp, Homo sapiens; identical to SEQ ID NO: 3715
  chr9:131709400-131709475
  hyper

SEQ ID NO: 37649 - DNA, 38 bp, Homo sapiens; identical to SEQ ID NO: 3716
  chr9:131709587-131709625
  hyper

SEQ ID NO: 37650 - DNA, 19 bp, Homo sapiens
  chr9:131842859-131842878
  hyper
ctggtctcagtttactcgt

SEQ ID NO: 37651 - DNA, 43 bp, Homo sapiens
  chr9:131842946-131842989
  hyper
ggacgcgcaggtccccaagaccgcggatcggcagggggtacca

SEQ ID NO: 37652 - DNA, 101 bp, Homo sapiens; identical to SEQ ID NO: 3719
  chr9:131842992-131843093
  hyper

SEQ ID NO: 37653 - DNA, 68 bp, Homo sapiens; identical to SEQ ID NO: 3720
  chr9:131940268-131940336
  hyper

SEQ ID NO: 37654 - DNA, 94 bp, Homo sapiens; identical to SEQ ID NO: 3721
  chr9:131940343-131940437
  hyper

SEQ ID NO: 37655 - DNA, 100 bp, Homo sapiens; identical to SEQ ID NO: 3722
  chr9:131940695-131940795
  hyper

SEQ ID NO: 37656 - DNA, 73 bp, Homo sapiens; identical to SEQ ID NO: 3723
  chr9:131940902-131940975
  hyper

SEQ ID NO: 37657 - DNA, 35 bp, Homo sapiens; identical to SEQ ID NO: 3724
  chr9:131965488-131965523
  hyper

SEQ ID NO: 37658 - DNA, 31 bp, Homo sapiens; identical to SEQ ID NO: 3725
  chr9:131997502-131997533
  hyper

SEQ ID NO: 37659 - DNA, 69 bp, Homo sapiens; identical to SEQ ID NO: 3726
  chr9:132145664-132145733
  hyper

SEQ ID NO: 37660 - DNA, 31 bp, Homo sapiens; identical to SEQ ID NO: 3727
  chr9:132176733-132176764
  hyper

SEQ ID NO: 37661 - DNA, 31 bp, Homo sapiens; identical to SEQ ID NO: 3728
  chr9:132176777-132176808
  hyper

SEQ ID NO: 37662 - DNA, 35 bp, Homo sapiens; identical to SEQ ID NO: 3729
  chr9:132222863-132222898
  hyper

SEQ ID NO: 37663 - DNA, 158 bp, Homo sapiens; identical to SEQ ID NO: 3730
  chr9:132244498-132244656
  hyper

SEQ ID NO: 37664 - DNA, 26 bp, Homo sapiens
  chr9:132244674-132244700
  hyper
agctacataattaattcgcccataaa

SEQ ID NO: 37665 - DNA, 101 bp, Homo sapiens; identical to SEQ ID NO: 3732
  chr9:132244759-132244860
  hyper

SEQ ID NO: 37666 - DNA, 41 bp, Homo sapiens; identical to SEQ ID NO: 3733
  chr9:132244872-132244913
  hyper

SEQ ID NO: 37667 - DNA, 158 bp, Homo sapiens; identical to SEQ ID NO: 3734
  chr9:132245128-132245286
  hyper

SEQ ID NO: 37668 - DNA, 78 bp, Homo sapiens; identical to SEQ ID NO: 3735
  chr9:132245407-132245485
  hyper

SEQ ID NO: 37669 - DNA, 57 bp, Homo sapiens; identical to SEQ ID NO: 3736
  chr9:132250697-132250754
  hyper

SEQ ID NO: 37670 - DNA, 41 bp, Homo sapiens; identical to SEQ ID NO: 3737
  chr9:132258285-132258326
  hyper

SEQ ID NO: 37671 - DNA, 80 bp, Homo sapiens; identical to SEQ ID NO: 3738
  chr9:132258337-132258417
  hyper

SEQ ID NO: 37672 - DNA, 44 bp, Homo sapiens; identical to SEQ ID NO: 3739
  chr9:132258503-132258547
  hyper

SEQ ID NO: 37673 - DNA, 56 bp, Homo sapiens; identical to SEQ ID NO: 3740
  chr9:132258618-132258674
  hyper

SEQ ID NO: 37674 - DNA, 188 bp, Homo sapiens; identical to SEQ ID NO: 3741
  chr9:132258690-132258878
  hyper

SEQ ID NO: 37675 - DNA, 39 bp, Homo sapiens; identical to SEQ ID NO: 3742
  chr9:132258891-132258930
  hyper

SEQ ID NO: 37676 - DNA, 78 bp, Homo sapiens; identical to SEQ ID NO: 3743
  chr9:132331031-132331109
  hyper

SEQ ID NO: 37677 - DNA, 44 bp, Homo sapiens; identical to SEQ ID NO: 3744
  chr9:132331472-132331516
  hyper

SEQ ID NO: 37678 - DNA, 31 bp, Homo sapiens; identical to SEQ ID NO: 3746
  chr9:132387302-132387333
  hyper

SEQ ID NO: 37679 - DNA, 31 bp, Homo sapiens; identical to SEQ ID NO: 3748
  chr9:132804331-132804362
  hyper

SEQ ID NO: 37680 - DNA, 31 bp, Homo sapiens; identical to SEQ ID NO: 3749
  chr9:132804366-132804397
  hyper

SEQ ID NO: 37681 - DNA, 34 bp, Homo sapiens; identical to SEQ ID NO: 3750
  chr9:132804583-132804617
  hyper

SEQ ID NO: 37682 - DNA, 39 bp, Homo sapiens; identical to SEQ ID NO: 3751
  chr9:132804622-132804661
  hyper

SEQ ID NO: 37683 - DNA, 31 bp, Homo sapiens; identical to SEQ ID NO: 3753
  chr9:133319784-133319815
  hyper

SEQ ID NO: 37684 - DNA, 31 bp, Homo sapiens; identical to SEQ ID NO: 3754
  chr9:133710180-133710211
  hyper

SEQ ID NO: 37685 - DNA, 127 bp, Homo sapiens; identical to SEQ ID NO: 3755
  chr9:133710244-133710371
  hyper

SEQ ID NO: 37686 - DNA, 459 bp, Homo sapiens; identical to SEQ ID NO: 3756
  chr9:133710381-133710840
  hyper

SEQ ID NO: 37687 - DNA, 160 bp, Homo sapiens; identical to SEQ ID NO: 3757
  chr9:133710872-133711032
  hyper

SEQ ID NO: 37688 - DNA, 31 bp, Homo sapiens; identical to SEQ ID NO: 3758
  chr9:133711152-133711183
  hyper

SEQ ID NO: 37689 - DNA, 102 bp, Homo sapiens; identical to SEQ ID NO: 3759
  chr9:133711196-133711298
  hyper

SEQ ID NO: 37690 - DNA, 31 bp, Homo sapiens; identical to SEQ ID NO: 3760
  chr9:133971401-133971432
  hyper

SEQ ID NO: 37691 - DNA, 31 bp, Homo sapiens; identical to SEQ ID NO: 3767
  chr9:135077790-135077821
  hyper

SEQ ID NO: 37692 - DNA, 31 bp, Homo sapiens; identical to SEQ ID NO: 3768
  chr9:135117938-135117969
  hyper

SEQ ID NO: 37693 - DNA, 34 bp, Homo sapiens; identical to SEQ ID NO: 3769
  chr9:135395348-135395382
  hyper

SEQ ID NO: 37694 - DNA, 31 bp, Homo sapiens; identical to SEQ ID NO: 3770
  chr9:135395479-135395510
  hyper

SEQ ID NO: 37695 - DNA, 31 bp, Homo sapiens; identical to SEQ ID NO: 3772
  chr9:136856334-136856365
  hyper

SEQ ID NO: 37696 - DNA, 31 bp, Homo sapiens; identical to SEQ ID NO: 3773
  chr9:136856910-136856941
  hyper

SEQ ID NO: 37697 - DNA, 46 bp, Homo sapiens; identical to SEQ ID NO: 3774
  chr9:137255488-137255534
  hyper

SEQ ID NO: 37698 - DNA, 31 bp, Homo sapiens; identical to SEQ ID NO: 3775
  chr9:137255548-137255579
  hyper

SEQ ID NO: 37699 - DNA, 65 bp, Homo sapiens; identical to SEQ ID NO: 3776
  chr9:137255589-137255654
  hyper

SEQ ID NO: 37700 - DNA, 2 bp, Homo sapiens
  chr9:137295660-137295662
  hyper
gt

SEQ ID NO: 37701 - DNA, 31 bp, Homo sapiens; identical to SEQ ID NO: 3778
  chr9:137442506-137442537
  hyper

SEQ ID NO: 37702 - DNA, 94 bp, Homo sapiens; identical to SEQ ID NO: 3779
  chr9:138372194-138372288
  hyper

SEQ ID NO: 37703 - DNA, 31 bp, Homo sapiens; identical to SEQ ID NO: 3780
  chr9:138613913-138613944
  hyper

SEQ ID NO: 37704 - DNA, 235 bp, Homo sapiens; identical to SEQ ID NO: 3781
  chr9:138986453-138986688
  hyper

SEQ ID NO: 37705 - DNA, 464 bp, Homo sapiens; identical to SEQ ID NO: 3782
  chr9:138986692-138987156
  hyper

SEQ ID NO: 37706 - DNA, 32 bp, Homo sapiens; identical to SEQ ID NO: 3783
  chr9:138987167-138987199
  hyper

SEQ ID NO: 37707 - DNA, 143 bp, Homo sapiens; identical to SEQ ID NO: 3784
  chr9:138987368-138987511
  hyper

SEQ ID NO: 37708 - DNA, 35 bp, Homo sapiens; identical to SEQ ID NO: 3785
  chr9:138987585-138987620
  hyper

SEQ ID NO: 37709 - DNA, 51 bp, Homo sapiens; identical to SEQ ID NO: 3786
  chr9:138987676-138987727
  hyper

SEQ ID NO: 37710 - DNA, 31 bp, Homo sapiens; identical to SEQ ID NO: 3787
  chr9:139029042-139029073
  hyper

SEQ ID NO: 37711 - DNA, 31 bp, Homo sapiens; identical to SEQ ID NO: 3788
  chr9:139294770-139294801
  hyper

SEQ ID NO: 37712 - DNA, 59 bp, Homo sapiens; identical to SEQ ID NO: 3789
  chr9:139334258-139334317
  hyper

SEQ ID NO: 37713 - DNA, 52 bp, Homo sapiens; identical to SEQ ID NO: 3790
  chr9:139440853-139440905
  hyper

SEQ ID NO: 37714 - DNA, 31 bp, Homo sapiens; identical to SEQ ID NO: 3791
  chr9:139519835-139519866
  hyper

SEQ ID NO: 37715 - DNA, 35 bp, Homo sapiens; identical to SEQ ID NO: 3792
  chr9:139519905-139519940
  hyper

SEQ ID NO: 37716 - DNA, 31 bp, Homo sapiens; identical to SEQ ID NO: 3793
  chr9:139580673-139580704
  hyper

SEQ ID NO: 37717 - DNA, 97 bp, Homo sapiens; identical to SEQ ID NO: 3794
  chr9:139581778-139581875
  hyper

SEQ ID NO: 37718 - DNA, 31 bp, Homo sapiens; identical to SEQ ID NO: 3795
  chr9:139838240-139838271
  hyper

SEQ ID NO: 37719 - DNA, 41 bp, Homo sapiens; identical to SEQ ID NO: 3796
  chr9:139872822-139872863
  hyper

SEQ ID NO: 37720 - DNA, 60 bp, Homo sapiens; identical to SEQ ID NO: 3797
  chr9:139940158-139940218
  hyper

SEQ ID NO: 37721 - DNA, 34 bp, Homo sapiens; identical to SEQ ID NO: 3798
  chr9:139948372-139948406
  hyper

SEQ ID NO: 37722 - DNA, 55 bp, Homo sapiens; identical to SEQ ID NO: 3799
  chr9:139948416-139948471
  hyper

SEQ ID NO: 37723 - DNA, 26 bp, Homo sapiens
  chr9:140024587-140024613
  hyper
ctggccgcgtggtcaccggcaagaag

SEQ ID NO: 37724 - DNA, 31 bp, Homo sapiens; identical to SEQ ID NO: 3803
  chr9:140195120-140195151
  hyper

SEQ ID NO: 37725 - DNA, 31 bp, Homo sapiens; identical to SEQ ID NO: 3804
  chr9:140195188-140195219
  hyper

SEQ ID NO: 37726 - DNA, 31 bp, Homo sapiens; identical to SEQ ID NO: 3805
  chr9:140195551-140195582
  hyper

SEQ ID NO: 37727 - DNA, 31 bp, Homo sapiens; identical to SEQ ID NO: 3806
  chr9:140195701-140195732
  hyper

SEQ ID NO: 37728 - DNA, 122 bp, Homo sapiens; identical to SEQ ID NO: 3807
  chr9:140195922-140196044
  hyper

SEQ ID NO: 37729 - DNA, 25 bp, Homo sapiens
  chr9:140196196-140196221
  hyper
cgtcgatgaccgactggtgcagcgc

SEQ ID NO: 37730 - DNA, 31 bp, Homo sapiens; identical to SEQ ID NO: 3809
  chr9:140445801-140445832
  hyper

SEQ ID NO: 37731 - DNA, 191 bp, Homo sapiens; identical to SEQ ID NO: 3810
  chr9:140445936-140446127
  hyper

SEQ ID NO: 37732 - DNA, 197 bp, Homo sapiens; identical to SEQ ID NO: 3811
  chr9:140446278-140446475
  hyper

SEQ ID NO: 37733 - DNA, 69 bp, Homo sapiens; identical to SEQ ID NO: 3812
  chr9:140473436-140473505
  hyper

SEQ ID NO: 37734 - DNA, 31 bp, Homo sapiens; identical to SEQ ID NO: 3813
  chr9:140473528-140473559
  hyper

SEQ ID NO: 37735 - DNA, 80 bp, Homo sapiens; identical to SEQ ID NO: 3814
  chr10:735607-735687
  hyper

SEQ ID NO: 37736 - DNA, 31 bp, Homo sapiens; identical to SEQ ID NO: 3815
  chr10:1627517-1627548
  hyper

SEQ ID NO: 37737 - DNA, 31 bp, Homo sapiens; identical to SEQ ID NO: 3817
  chr10:1780119-1780150
  hyper

SEQ ID NO: 37738 - DNA, 74 bp, Homo sapiens; identical to SEQ ID NO: 3818
  chr10:3239421-3239495
  hyper

SEQ ID NO: 37739 - DNA, 31 bp, Homo sapiens; identical to SEQ ID NO: 3819
  chr10:3239563-3239594
  hyper

SEQ ID NO: 37740 - DNA, 83 bp, Homo sapiens; identical to SEQ ID NO: 3820
  chr10:5708184-5708267
  hyper

SEQ ID NO: 37741 - DNA, 56 bp, Homo sapiens; identical to SEQ ID NO: 3821
  chr10:5708425-5708481
  hyper

SEQ ID NO: 37742 - DNA, 66 bp, Homo sapiens; identical to SEQ ID NO: 3822
  chr10:5708499-5708565
  hyper

SEQ ID NO: 37743 - DNA, 66 bp, Homo sapiens; identical to SEQ ID NO: 3823
  chr10:5708679-5708745
  hyper

SEQ ID NO: 37744 - DNA, 21 bp, Homo sapiens
  chr10:6018666-6018687
  hyper
gcgacccgctttcttctcgaa

SEQ ID NO: 37745 - DNA, 31 bp, Homo sapiens; identical to SEQ ID NO: 3825
  chr10:6019532-6019563
  hyper

SEQ ID NO: 37746 - DNA, 16 bp, Homo sapiens
  chr10:7453081-7453097
  hyper
gtgcgtgcgcgtgcag

SEQ ID NO: 37747 - DNA, 39 bp, Homo sapiens; identical to SEQ ID NO: 3858
  chr10:11207343-11207382
  hyper

SEQ ID NO: 37748 - DNA, 36 bp, Homo sapiens; identical to SEQ ID NO: 3859
  chr10:11207391-11207427
  hyper

SEQ ID NO: 37749 - DNA, 31 bp, Homo sapiens; identical to SEQ ID NO: 3860
  chr10:11652859-11652890
  hyper

SEQ ID NO: 37750 - DNA, 61 bp, Homo sapiens
  chr10:12390765-12390826
  hyper
gccagaaggggccaagcgtgagccagggcaaccaggccggccaggcccgccggccgctcca

SEQ ID NO: 37751 - DNA, 15 bp, Homo sapiens
  chr10:12390995-12391010
  hyper
cgaatgagctcccgc

SEQ ID NO: 37752 - DNA, 31 bp, Homo sapiens; identical to SEQ ID NO: 3864
  chr10:13341451-13341482
  hyper

SEQ ID NO: 37753 - DNA, 67 bp, Homo sapiens; identical to SEQ ID NO: 3865
  chr10:13341505-13341572
  hyper

SEQ ID NO: 37754 - DNA, 55 bp, Homo sapiens; identical to SEQ ID NO: 3866
  chr10:13515865-13515920
  hyper

SEQ ID NO: 37755 - DNA, 110 bp, Homo sapiens; identical to SEQ ID NO: 3867
  chr10:13570122-13570232
  hyper

SEQ ID NO: 37756 - DNA, 31 bp, Homo sapiens; identical to SEQ ID NO: 3868
  chr10:13570237-13570268
  hyper

SEQ ID NO: 37757 - DNA, 72 bp, Homo sapiens; identical to SEQ ID NO: 3869
  chr10:14646261-14646333
  hyper

SEQ ID NO: 37758 - DNA, 101 bp, Homo sapiens; identical to SEQ ID NO: 3870
  chr10:14646653-14646754
  hyper

SEQ ID NO: 37759 - DNA, 31 bp, Homo sapiens; identical to SEQ ID NO: 3871
  chr10:16536238-16536269
  hyper

SEQ ID NO: 37760 - DNA, 32 bp, Homo sapiens
  chr10:21462502-21462534
  hyper
catcacaatcgccaagcgtggtctctgacact

SEQ ID NO: 37761 - DNA, 154 bp, Homo sapiens; identical to SEQ ID NO: 3882
  chr10:21805906-21806060
  hyper

SEQ ID NO: 37762 - DNA, 31 bp, Homo sapiens; identical to SEQ ID NO: 3883
  chr10:21816421-21816452
  hyper

SEQ ID NO: 37763 - DNA, 2 bp, Homo sapiens
  chr10:22518010-22518012
  hyper
tg

SEQ ID NO: 37764 - DNA, 1 bp, Homo sapiens
  chr10:22518450-22518451
  hyper
g

SEQ ID NO: 37765 - DNA, 42 bp, Homo sapiens; identical to SEQ ID NO: 3889
  chr10:22540629-22540671
  hyper

SEQ ID NO: 37766 - DNA, 31 bp, Homo sapiens; identical to SEQ ID NO: 3897
  chr10:22605455-22605486
  hyper

SEQ ID NO: 37767 - DNA, 165 bp, Homo sapiens; identical to SEQ ID NO: 3898
  chr10:25012545-25012710
  hyper

SEQ ID NO: 37768 - DNA, 50 bp, Homo sapiens; identical to SEQ ID NO: 3899
  chr10:25305302-25305352
  hyper

SEQ ID NO: 37769 - DNA, 66 bp, Homo sapiens; identical to SEQ ID NO: 3907
  chr10:28966235-28966301
  hyper

SEQ ID NO: 37770 - DNA, 97 bp, Homo sapiens; identical to SEQ ID NO: 3908
  chr10:28966597-28966694
  hyper

SEQ ID NO: 37771 - DNA, 31 bp, Homo sapiens; identical to SEQ ID NO: 3909
  chr10:29737771-29737802
  hyper

SEQ ID NO: 37772 - DNA, 40 bp, Homo sapiens; identical to SEQ ID NO: 3910
  chr10:29738054-29738094
  hyper

SEQ ID NO: 37773 - DNA, 31 bp, Homo sapiens; identical to SEQ ID NO: 3911
  chr10:29738102-29738133
  hyper

SEQ ID NO: 37774 - DNA, 56 bp, Homo sapiens; identical to SEQ ID NO: 3912
  chr10:30025021-30025077
  hyper

SEQ ID NO: 37775 - DNA, 49 bp, Homo sapiens; identical to SEQ ID NO: 3913
  chr10:30025084-30025133
  hyper

SEQ ID NO: 37776 - DNA, 39 bp, Homo sapiens; identical to SEQ ID NO: 3914
  chr10:30025276-30025315
  hyper

SEQ ID NO: 37777 - DNA, 50 bp, Homo sapiens; identical to SEQ ID NO: 3915
  chr10:30025320-30025370
  hyper

SEQ ID NO: 37778 - DNA, 51 bp, Homo sapiens; identical to SEQ ID NO: 3916
  chr10:30025375-30025426
  hyper

SEQ ID NO: 37779 - DNA, 31 bp, Homo sapiens; identical to SEQ ID NO: 3917
  chr10:31388316-31388347
  hyper

SEQ ID NO: 37780 - DNA, 60 bp, Homo sapiens
  chr10:31423116-31423176
  hyper
gaaatgcggcagccgggggtgccggcagcttgagagaaaagtctgcgtggagggggggtg

SEQ ID NO: 37781 - DNA, 87 bp, Homo sapiens; identical to SEQ ID NO: 3920
  chr10:31608554-31608641
  hyper

SEQ ID NO: 37782 - DNA, 100 bp, Homo sapiens
  chr10:31608645-31608745
  hyper
tcctggccccctcagcgcgattctccctcagcgcccaggcccccgggagccgcggaacaaacttgtgcccggcgctgaccgtgcaaagtggcttccgcgc

SEQ ID NO: 37783 - DNA, 39 bp, Homo sapiens
  chr10:31609416-31609455
  hyper
tgggggagggggcggacggaccgacggacgcgcggggct

SEQ ID NO: 37784 - DNA, 39 bp, Homo sapiens; identical to SEQ ID NO: 3923
  chr10:31609544-31609583
  hyper

SEQ ID NO: 37785 - DNA, 84 bp, Homo sapiens
  chr10:31609585-31609669
  hyper
gtggtggttgcacagtcgccttttccagtttggagagacgttgtaagttgattgtatttctggttatctcggggcgatgctatg

SEQ ID NO: 37786 - DNA, 2 bp, Homo sapiens
  chr10:33623013-33623015
  hyper
ac

SEQ ID NO: 37787 - DNA, 148 bp, Homo sapiens
  chr10:33623220-33623368
  hyper
ctctgcctgtcacttaccgttgcgaaaagcgccggccggggcgaggacgagggcgagcacggcgcagaggagcggcagccccctctccattctcccttctccgggtccgcaggcagacgcgggagaacgaggacgtggggggaaatgc

SEQ ID NO: 37788 - DNA, 175 bp, Homo sapiens; identical to SEQ ID NO: 3929
  chr10:33623372-33623547
  hyper

SEQ ID NO: 37789 - DNA, 31 bp, Homo sapiens; identical to SEQ ID NO: 3930
  chr10:33623567-33623598
  hyper

SEQ ID NO: 37790 - DNA, 48 bp, Homo sapiens; identical to SEQ ID NO: 3931
  chr10:33623944-33623992
  hyper

SEQ ID NO: 37791 - DNA, 63 bp, Homo sapiens; identical to SEQ ID NO: 3933
  chr10:35102969-35103032
  hyper

SEQ ID NO: 37792 - DNA, 1 bp, Homo sapiens
  chr10:35103047-35103048
  hyper
g

SEQ ID NO: 37793 - DNA, 37 bp, Homo sapiens; identical to SEQ ID NO: 3935
  chr10:35103108-35103145
  hyper

SEQ ID NO: 37794 - DNA, 92 bp, Homo sapiens; identical to SEQ ID NO: 3936
  chr10:35103157-35103249
  hyper

SEQ ID NO: 37795 - DNA, 109 bp, Homo sapiens; identical to SEQ ID NO: 3937
  chr10:35103256-35103365
  hyper

SEQ ID NO: 37796 - DNA, 110 bp, Homo sapiens; identical to SEQ ID NO: 3938
  chr10:35103368-35103478
  hyper

SEQ ID NO: 37797 - DNA, 31 bp, Homo sapiens; identical to SEQ ID NO: 3939
  chr10:35103534-35103565
  hyper

SEQ ID NO: 37798 - DNA, 250 bp, Homo sapiens; identical to SEQ ID NO: 3940
  chr10:35103598-35103848
  hyper

SEQ ID NO: 37799 - DNA, 68 bp, Homo sapiens
  chr10:35104117-35104185
  hyper
tcgcttcgcccggggcttgcctcgcctctccccgccgcggcgcccgcagcctccggccacctgttcgg

SEQ ID NO: 37800 - DNA, 116 bp, Homo sapiens; identical to SEQ ID NO: 3942
  chr10:35104309-35104425
  hyper

SEQ ID NO: 37801 - DNA, 49 bp, Homo sapiens; identical to SEQ ID NO: 3943
  chr10:35104440-35104489
  hyper

SEQ ID NO: 37802 - DNA, 79 bp, Homo sapiens; identical to SEQ ID NO: 3944
  chr10:35104562-35104641
  hyper

SEQ ID NO: 37803 - DNA, 206 bp, Homo sapiens
  chr10:35104655-35104861
  hyper
ttttaatcccattcctcgaactggagggttttgggtgcaggcgctcccggggaaagcagtttgtgctcagtgcggtgagtcccctcctcaccgccccggaggctccagcccgagcctctccgcccgcggggactcgagcctgcagcttgctcggctgggtttctgccctgcccgctccctagctctgctgcagggccggcagcggc

SEQ ID NO: 37804 - DNA, 31 bp, Homo sapiens; identical to SEQ ID NO: 3947
  chr10:43697736-43697767
  hyper

SEQ ID NO: 37805 - DNA, 84 bp, Homo sapiens
  chr10:43698155-43698239
  hyper
aaaccagcggattccgcccacgttgccagcctaggccccccaccacccgctcccaccacgcccctaacccggacccaacccaca

SEQ ID NO: 37806 - DNA, 23 bp, Homo sapiens
  chr10:43698257-43698280
  hyper
ccccagcctggtgtggcgtcacg

SEQ ID NO: 37807 - DNA, 31 bp, Homo sapiens; identical to SEQ ID NO: 3952
  chr10:43761945-43761976
  hyper

SEQ ID NO: 37808 - DNA, 31 bp, Homo sapiens; identical to SEQ ID NO: 3953
  chr10:43932786-43932817
  hyper

SEQ ID NO: 37809 - DNA, 55 bp, Homo sapiens; identical to SEQ ID NO: 3954
  chr10:44069623-44069678
  hyper

SEQ ID NO: 37810 - DNA, 31 bp, Homo sapiens; identical to SEQ ID NO: 3955
  chr10:44069989-44070020
  hyper

SEQ ID NO: 37811 - DNA, 31 bp, Homo sapiens; identical to SEQ ID NO: 3956
  chr10:44420042-44420073
  hyper

SEQ ID NO: 37812 - DNA, 51 bp, Homo sapiens; identical to SEQ ID NO: 3957
  chr10:49514478-49514529
  hyper

SEQ ID NO: 37813 - DNA, 95 bp, Homo sapiens; identical to SEQ ID NO: 3958
  chr10:64028002-64028097
  hyper

SEQ ID NO: 37814 - DNA, 31 bp, Homo sapiens; identical to SEQ ID NO: 3962
  chr10:70748568-70748599
  hyper

SEQ ID NO: 37815 - DNA, 51 bp, Homo sapiens; identical to SEQ ID NO: 3963
  chr10:70749020-70749071
  hyper

SEQ ID NO: 37816 - DNA, 31 bp, Homo sapiens; identical to SEQ ID NO: 3964
  chr10:70749138-70749169
  hyper

SEQ ID NO: 37817 - DNA, 31 bp, Homo sapiens; identical to SEQ ID NO: 3965
  chr10:71389918-71389949
  hyper

SEQ ID NO: 37818 - DNA, 25 bp, Homo sapiens
  chr10:71390036-71390061
  hyper
ggacgccgccgaggcccggagtcgc

SEQ ID NO: 37819 - DNA, 9 bp, Homo sapiens
  chr10:71390109-71390118
  hyper
agcccgggc

SEQ ID NO: 37820 - DNA, 66 bp, Homo sapiens; identical to SEQ ID NO: 3967
  chr10:71561653-71561719
  hyper

SEQ ID NO: 37821 - DNA, 99 bp, Homo sapiens; identical to SEQ ID NO: 3968
  chr10:72972598-72972697
  hyper

SEQ ID NO: 37822 - DNA, 31 bp, Homo sapiens; identical to SEQ ID NO: 3970
  chr10:74032649-74032680
  hyper

SEQ ID NO: 37823 - DNA, 76 bp, Homo sapiens; identical to SEQ ID NO: 3971
  chr10:74032778-74032854
  hyper

SEQ ID NO: 37824 - DNA, 81 bp, Homo sapiens; identical to SEQ ID NO: 3972
  chr10:74057922-74058003
  hyper

SEQ ID NO: 37825 - DNA, 31 bp, Homo sapiens; identical to SEQ ID NO: 3973
  chr10:74070291-74070322
  hyper

SEQ ID NO: 37826 - DNA, 99 bp, Homo sapiens; identical to SEQ ID NO: 3974
  chr10:74114946-74115045
  hyper

SEQ ID NO: 37827 - DNA, 36 bp, Homo sapiens; identical to SEQ ID NO: 3975
  chr10:75408168-75408204
  hyper

SEQ ID NO: 37828 - DNA, 216 bp, Homo sapiens; identical to SEQ ID NO: 3976
  chr10:77159486-77159702
  hyper

SEQ ID NO: 37829 - DNA, 61 bp, Homo sapiens
  chr10:77159867-77159928
  hyper
ctccaccgccgcctcccggctccttcttatccgagccgggtttggagtacggcttgaaact

SEQ ID NO: 37830 - DNA, 98 bp, Homo sapiens; identical to SEQ ID NO: 3978
  chr10:77160052-77160150
  hyper

SEQ ID NO: 37831 - DNA, 63 bp, Homo sapiens; identical to SEQ ID NO: 3979
  chr10:77160291-77160354
  hyper

SEQ ID NO: 37832 - DNA, 56 bp, Homo sapiens; identical to SEQ ID NO: 3980
  chr10:77160571-77160627
  hyper

SEQ ID NO: 37833 - DNA, 31 bp, Homo sapiens; identical to SEQ ID NO: 3982
  chr10:77161729-77161760
  hyper

SEQ ID NO: 37834 - DNA, 35 bp, Homo sapiens; identical to SEQ ID NO: 3983
  chr10:77162330-77162365
  hyper

SEQ ID NO: 37835 - DNA, 31 bp, Homo sapiens; identical to SEQ ID NO: 3984
  chr10:77162374-77162405
  hyper

SEQ ID NO: 37836 - DNA, 37 bp, Homo sapiens; identical to SEQ ID NO: 3985
  chr10:77162410-77162447
  hyper

SEQ ID NO: 37837 - DNA, 31 bp, Homo sapiens; identical to SEQ ID NO: 3986
  chr10:77162451-77162482
  hyper

SEQ ID NO: 37838 - DNA, 74 bp, Homo sapiens; identical to SEQ ID NO: 3987
  chr10:77169380-77169454
  hyper

SEQ ID NO: 37839 - DNA, 29 bp, Homo sapiens
  chr10:79470897-79470926
  hyper
gctaaggagaggtctacgttttatttttt

SEQ ID NO: 37840 - DNA, 74 bp, Homo sapiens; identical to SEQ ID NO: 3989
  chr10:79606675-79606749
  hyper

SEQ ID NO: 37841 - DNA, 221 bp, Homo sapiens; identical to SEQ ID NO: 3990
  chr10:79685703-79685924
  hyper

SEQ ID NO: 37842 - DNA, 46 bp, Homo sapiens; identical to SEQ ID NO: 3991
  chr10:79686267-79686313
  hyper

SEQ ID NO: 37843 - DNA, 42 bp, Homo sapiens; identical to SEQ ID NO: 3992
  chr10:79686574-79686616
  hyper

SEQ ID NO: 37844 - DNA, 63 bp, Homo sapiens; identical to SEQ ID NO: 3993
  chr10:79686617-79686680
  hyper

SEQ ID NO: 37845 - DNA, 86 bp, Homo sapiens; identical to SEQ ID NO: 3994
  chr10:79686714-79686800
  hyper

SEQ ID NO: 37846 - DNA, 89 bp, Homo sapiens; identical to SEQ ID NO: 3995
  chr10:79686955-79687044
  hyper

SEQ ID NO: 37847 - DNA, 38 bp, Homo sapiens; identical to SEQ ID NO: 3996
  chr10:80733745-80733783
  hyper

SEQ ID NO: 37848 - DNA, 34 bp, Homo sapiens; identical to SEQ ID NO: 3997
  chr10:80827232-80827266
  hyper

SEQ ID NO: 37849 - DNA, 121 bp, Homo sapiens; identical to SEQ ID NO: 3998
  chr10:80828531-80828652
  hyper

SEQ ID NO: 37850 - DNA, 65 bp, Homo sapiens; identical to SEQ ID NO: 3999
  chr10:81074798-81074863
  hyper

SEQ ID NO: 37851 - DNA, 31 bp, Homo sapiens; identical to SEQ ID NO: 4000
  chr10:81074873-81074904
  hyper

SEQ ID NO: 37852 - DNA, 53 bp, Homo sapiens; identical to SEQ ID NO: 4001
  chr10:82213690-82213743
  hyper

SEQ ID NO: 37853 - DNA, 43 bp, Homo sapiens; identical to SEQ ID NO: 4002
  chr10:86088146-86088189
  hyper

SEQ ID NO: 37854 - DNA, 31 bp, Homo sapiens; identical to SEQ ID NO: 4003
  chr10:88515315-88515346
  hyper

SEQ ID NO: 37855 - DNA, 189 bp, Homo sapiens; identical to SEQ ID NO: 4004
  chr10:88515510-88515699
  hyper

SEQ ID NO: 37856 - DNA, 31 bp, Homo sapiens; identical to SEQ ID NO: 4005
  chr10:89419678-89419709
  hyper

SEQ ID NO: 37857 - DNA, 56 bp, Homo sapiens; identical to SEQ ID NO: 4006
  chr10:90750729-90750785
  hyper

SEQ ID NO: 37858 - DNA, 31 bp, Homo sapiens; identical to SEQ ID NO: 4008
  chr10:92981133-92981164
  hyper

SEQ ID NO: 37859 - DNA, 37 bp, Homo sapiens; identical to SEQ ID NO: 4009
  chr10:92981240-92981277
  hyper

SEQ ID NO: 37860 - DNA, 31 bp, Homo sapiens; identical to SEQ ID NO: 4013
  chr10:94451194-94451225
  hyper

SEQ ID NO: 37861 - DNA, 84 bp, Homo sapiens; identical to SEQ ID NO: 4016
  chr10:94607698-94607782
  hyper

SEQ ID NO: 37862 - DNA, 31 bp, Homo sapiens; identical to SEQ ID NO: 4017
  chr10:94607794-94607825
  hyper

SEQ ID NO: 37863 - DNA, 31 bp, Homo sapiens; identical to SEQ ID NO: 4018
  chr10:94607828-94607859
  hyper

SEQ ID NO: 37864 - DNA, 40 bp, Homo sapiens; identical to SEQ ID NO: 4019
  chr10:95326152-95326192
  hyper

SEQ ID NO: 37865 - DNA, 61 bp, Homo sapiens; identical to SEQ ID NO: 4020
  chr10:96122755-96122816
  hyper

SEQ ID NO: 37866 - DNA, 31 bp, Homo sapiens; identical to SEQ ID NO: 4021
  chr10:96161936-96161967
  hyper

SEQ ID NO: 37867 - DNA, 31 bp, Homo sapiens; identical to SEQ ID NO: 4022
  chr10:96162214-96162245
  hyper

SEQ ID NO: 37868 - DNA, 35 bp, Homo sapiens; identical to SEQ ID NO: 4023
  chr10:96162262-96162297
  hyper

SEQ ID NO: 37869 - DNA, 154 bp, Homo sapiens; identical to SEQ ID NO: 4024
  chr10:96162305-96162459
  hyper

SEQ ID NO: 37870 - DNA, 138 bp, Homo sapiens; identical to SEQ ID NO: 4025
  chr10:96162567-96162705
  hyper

SEQ ID NO: 37871 - DNA, 34 bp, Homo sapiens; identical to SEQ ID NO: 4026
  chr10:96162849-96162883
  hyper

SEQ ID NO: 37872 - DNA, 59 bp, Homo sapiens; identical to SEQ ID NO: 4027
  chr10:96162906-96162965
  hyper

SEQ ID NO: 37873 - DNA, 51 bp, Homo sapiens; identical to SEQ ID NO: 4028
  chr10:96162989-96163040
  hyper

SEQ ID NO: 37874 - DNA, 100 bp, Homo sapiens; identical to SEQ ID NO: 4029
  chr10:96163043-96163143
  hyper

SEQ ID NO: 37875 - DNA, 112 bp, Homo sapiens; identical to SEQ ID NO: 4030
  chr10:96163250-96163362
  hyper

SEQ ID NO: 37876 - DNA, 67 bp, Homo sapiens; identical to SEQ ID NO: 4031
  chr10:96163378-96163445
  hyper

SEQ ID NO: 37877 - DNA, 31 bp, Homo sapiens; identical to SEQ ID NO: 4032
  chr10:96163506-96163537
  hyper

SEQ ID NO: 37878 - DNA, 59 bp, Homo sapiens; identical to SEQ ID NO: 4033
  chr10:97321333-97321392
  hyper

SEQ ID NO: 37879 - DNA, 41 bp, Homo sapiens; identical to SEQ ID NO: 4034
  chr10:98956366-98956407
  hyper

SEQ ID NO: 37880 - DNA, 35 bp, Homo sapiens; identical to SEQ ID NO: 4036
  chr10:99093444-99093479
  hyper

SEQ ID NO: 37881 - DNA, 97 bp, Homo sapiens; identical to SEQ ID NO: 4037
  chr10:99447291-99447388
  hyper

SEQ ID NO: 37882 - DNA, 31 bp, Homo sapiens; identical to SEQ ID NO: 4039
  chr10:101300724-101300755
  hyper

SEQ ID NO: 37883 - DNA, 31 bp, Homo sapiens; identical to SEQ ID NO: 4040
  chr10:102132967-102132998
  hyper

SEQ ID NO: 37884 - DNA, 53 bp, Homo sapiens; identical to SEQ ID NO: 4041
  chr10:102133790-102133843
  hyper

SEQ ID NO: 37885 - DNA, 31 bp, Homo sapiens; identical to SEQ ID NO: 4044
  chr10:102746537-102746568
  hyper

SEQ ID NO: 37886 - DNA, 43 bp, Homo sapiens; identical to SEQ ID NO: 4045
  chr10:102802795-102802838
  hyper

SEQ ID NO: 37887 - DNA, 31 bp, Homo sapiens; identical to SEQ ID NO: 4046
  chr10:102802860-102802891
  hyper

SEQ ID NO: 37888 - DNA, 31 bp, Homo sapiens; identical to SEQ ID NO: 4047
  chr10:102802970-102803001
  hyper

SEQ ID NO: 37889 - DNA, 31 bp, Homo sapiens; identical to SEQ ID NO: 4048
  chr10:102827419-102827450
  hyper

SEQ ID NO: 37890 - DNA, 58 bp, Homo sapiens; identical to SEQ ID NO: 4049
  chr10:102973586-102973644
  hyper

SEQ ID NO: 37891 - DNA, 31 bp, Homo sapiens; identical to SEQ ID NO: 4053
  chr10:103600756-103600787
  hyper

SEQ ID NO: 37892 - DNA, 38 bp, Homo sapiens; identical to SEQ ID NO: 4054
  chr10:104181704-104181742
  hyper

SEQ ID NO: 37893 - DNA, 117 bp, Homo sapiens; identical to SEQ ID NO: 4055
  chr10:104181762-104181879
  hyper

SEQ ID NO: 37894 - DNA, 31 bp, Homo sapiens; identical to SEQ ID NO: 4056
  chr10:104409284-104409315
  hyper

SEQ ID NO: 37895 - DNA, 31 bp, Homo sapiens; identical to SEQ ID NO: 4057
  chr10:105315201-105315232
  hyper

SEQ ID NO: 37896 - DNA, 104 bp, Homo sapiens; identical to SEQ ID NO: 4058
  chr10:105615412-105615516
  hyper

SEQ ID NO: 37897 - DNA, 34 bp, Homo sapiens
  chr10:105615629-105615663
  hyper
ggcaggggcgggccgacgagcccccacccgagcc

SEQ ID NO: 37898 - DNA, 31 bp, Homo sapiens; identical to SEQ ID NO: 4060
  chr10:105991884-105991915
  hyper

SEQ ID NO: 37899 - DNA, 205 bp, Homo sapiens; identical to SEQ ID NO: 4061
  chr10:105992056-105992261
  hyper

SEQ ID NO: 37900 - DNA, 40 bp, Homo sapiens; identical to SEQ ID NO: 4062
  chr10:111643944-111643984
  hyper

SEQ ID NO: 37901 - DNA, 145 bp, Homo sapiens; identical to SEQ ID NO: 4063
  chr10:111767171-111767316
  hyper

SEQ ID NO: 37902 - DNA, 40 bp, Homo sapiens; identical to SEQ ID NO: 4064
  chr10:111767322-111767362
  hyper

SEQ ID NO: 37903 - DNA, 31 bp, Homo sapiens; identical to SEQ ID NO: 4065
  chr10:111767389-111767420
  hyper

SEQ ID NO: 37904 - DNA, 206 bp, Homo sapiens
  chr10:112432155-112432361
  hyper
aaggggaggctcccctcgccgagtgtcacccgggaccctgcgtccccgctctgcagagaccttctctccgggctgctgccgtcctccctcgcccggcggagcttccgtgatcgtcagccaaagcccccggggcggtgcgccgcaggcggtcttcccgggtgttcgcggaagctgcgcgctcgcgcccccacggttctccagcgacc

SEQ ID NO: 37905 - DNA, 78 bp, Homo sapiens; identical to SEQ ID NO: 4068
  chr10:112836635-112836713
  hyper

SEQ ID NO: 37906 - DNA, 1 bp, Homo sapiens
  chr10:114571198-114571199
  hyper
a

SEQ ID NO: 37907 - DNA, 56 bp, Homo sapiens; identical to SEQ ID NO: 4070
  chr10:114708956-114709012
  hyper

SEQ ID NO: 37908 - DNA, 31 bp, Homo sapiens; identical to SEQ ID NO: 4071
  chr10:114709044-114709075
  hyper

SEQ ID NO: 37909 - DNA, 34 bp, Homo sapiens; identical to SEQ ID NO: 4072
  chr10:114709863-114709897
  hyper

SEQ ID NO: 37910 - DNA, 31 bp, Homo sapiens; identical to SEQ ID NO: 4073
  chr10:114710140-114710171
  hyper

SEQ ID NO: 37911 - DNA, 56 bp, Homo sapiens; identical to SEQ ID NO: 4074
  chr10:114710659-114710715
  hyper

SEQ ID NO: 37912 - DNA, 31 bp, Homo sapiens; identical to SEQ ID NO: 4075
  chr10:114710919-114710950
  hyper

SEQ ID NO: 37913 - DNA, 47 bp, Homo sapiens; identical to SEQ ID NO: 4076
  chr10:114711333-114711380
  hyper

SEQ ID NO: 37914 - DNA, 42 bp, Homo sapiens; identical to SEQ ID NO: 4079
  chr10:115999483-115999525
  hyper

SEQ ID NO: 37915 - DNA, 31 bp, Homo sapiens; identical to SEQ ID NO: 4080
  chr10:116527399-116527430
  hyper

SEQ ID NO: 37916 - DNA, 31 bp, Homo sapiens; identical to SEQ ID NO: 4081
  chr10:116527433-116527464
  hyper

SEQ ID NO: 37917 - DNA, 137 bp, Homo sapiens; identical to SEQ ID NO: 4082
  chr10:116527508-116527645
  hyper

SEQ ID NO: 37918 - DNA, 38 bp, Homo sapiens; identical to SEQ ID NO: 4083
  chr10:116527656-116527694
  hyper

SEQ ID NO: 37919 - DNA, 484 bp, Homo sapiens; identical to SEQ ID NO: 4084
  chr10:116527747-116528231
  hyper

SEQ ID NO: 37920 - DNA, 158 bp, Homo sapiens; identical to SEQ ID NO: 4085
  chr10:118764376-118764534
  hyper

SEQ ID NO: 37921 - DNA, 35 bp, Homo sapiens; identical to SEQ ID NO: 4086
  chr10:118764558-118764593
  hyper

SEQ ID NO: 37922 - DNA, 118 bp, Homo sapiens; identical to SEQ ID NO: 4087
  chr10:118764979-118765097
  hyper

SEQ ID NO: 37923 - DNA, 31 bp, Homo sapiens; identical to SEQ ID NO: 4088
  chr10:118765127-118765158
  hyper

SEQ ID NO: 37924 - DNA, 49 bp, Homo sapiens; identical to SEQ ID NO: 4089
  chr10:119256305-119256354
  hyper

SEQ ID NO: 37925 - DNA, 31 bp, Homo sapiens; identical to SEQ ID NO: 4090
  chr10:119306398-119306429
  hyper

SEQ ID NO: 37926 - DNA, 31 bp, Homo sapiens; identical to SEQ ID NO: 4091
  chr10:119306846-119306877
  hyper

SEQ ID NO: 37927 - DNA, 31 bp, Homo sapiens; identical to SEQ ID NO: 4092
  chr10:119306988-119307019
  hyper

SEQ ID NO: 37928 - DNA, 2 bp, Homo sapiens
  chr10:121301493-121301495
  hyper
gg

SEQ ID NO: 37929 - DNA, 44 bp, Homo sapiens; identical to SEQ ID NO: 4097
  chr10:121356078-121356122
  hyper

SEQ ID NO: 37930 - DNA, 2 bp, Homo sapiens
  chr10:122708494-122708496
  hyper
ga

SEQ ID NO: 37931 - DNA, 31 bp, Homo sapiens; identical to SEQ ID NO: 4099
  chr10:122709344-122709375
  hyper

SEQ ID NO: 37932 - DNA, 80 bp, Homo sapiens
  chr10:123356990-123357070
  hyper
atgtcaccggccccaccccagcggccccctcccgaaaaaggggtctccgcagggcctggatggtacggaagttcccagga

SEQ ID NO: 37933 - DNA, 34 bp, Homo sapiens; identical to SEQ ID NO: 4101
  chr10:123357527-123357561
  hyper

SEQ ID NO: 37934 - DNA, 130 bp, Homo sapiens; identical to SEQ ID NO: 4102
  chr10:123357918-123358048
  hyper

SEQ ID NO: 37935 - DNA, 94 bp, Homo sapiens; identical to SEQ ID NO: 4103
  chr10:123358138-123358232
  hyper

SEQ ID NO: 37936 - DNA, 43 bp, Homo sapiens; identical to SEQ ID NO: 4105
  chr10:124133757-124133800
  hyper

SEQ ID NO: 37937 - DNA, 31 bp, Homo sapiens; identical to SEQ ID NO: 4106
  chr10:124133805-124133836
  hyper

SEQ ID NO: 37938 - DNA, 124 bp, Homo sapiens
  chr10:124134313-124134437
  hyper
gaggccgcggtaaagtttagcttgaagaacgcggccgcgctggagcaggggtggtggacggggccaggcgcgaggtggcggcggctgcggggctgccgggctgctggagcgcggttcccgctgt

SEQ ID NO: 37939 - DNA, 148 bp, Homo sapiens; identical to SEQ ID NO: 4109
  chr10:124134524-124134672
  hyper

SEQ ID NO: 37940 - DNA, 88 bp, Homo sapiens; identical to SEQ ID NO: 4110
  chr10:124134743-124134831
  hyper

SEQ ID NO: 37941 - DNA, 37 bp, Homo sapiens; identical to SEQ ID NO: 4111
  chr10:124134847-124134884
  hyper

SEQ ID NO: 37942 - DNA, 31 bp, Homo sapiens; identical to SEQ ID NO: 4112
  chr10:125727316-125727347
  hyper

SEQ ID NO: 37943 - DNA, 31 bp, Homo sapiens; identical to SEQ ID NO: 4114
  chr10:125852100-125852131
  hyper

SEQ ID NO: 37944 - DNA, 2 bp, Homo sapiens
  chr10:126847189-126847191
  hyper
ga

SEQ ID NO: 37945 - DNA, 31 bp, Homo sapiens; identical to SEQ ID NO: 4118
  chr10:126847583-126847614
  hyper

SEQ ID NO: 37946 - DNA, 53 bp, Homo sapiens; identical to SEQ ID NO: 4119
  chr10:126847634-126847687
  hyper

SEQ ID NO: 37947 - DNA, 126 bp, Homo sapiens; identical to SEQ ID NO: 4120
  chr10:126847692-126847818
  hyper

SEQ ID NO: 37948 - DNA, 38 bp, Homo sapiens; identical to SEQ ID NO: 4121
  chr10:126847830-126847868
  hyper

SEQ ID NO: 37949 - DNA, 123 bp, Homo sapiens; identical to SEQ ID NO: 4122
  chr10:126847900-126848023
  hyper

SEQ ID NO: 37950 - DNA, 146 bp, Homo sapiens; identical to SEQ ID NO: 4123
  chr10:126848387-126848533
  hyper

SEQ ID NO: 37951 - DNA, 40 bp, Homo sapiens; identical to SEQ ID NO: 4124
  chr10:126848551-126848591
  hyper

SEQ ID NO: 37952 - DNA, 94 bp, Homo sapiens; identical to SEQ ID NO: 4125
  chr10:126848631-126848725
  hyper

SEQ ID NO: 37953 - DNA, 94 bp, Homo sapiens; identical to SEQ ID NO: 4126
  chr10:126849002-126849096
  hyper

SEQ ID NO: 37954 - DNA, 82 bp, Homo sapiens; identical to SEQ ID NO: 4127
  chr10:126849497-126849579
  hyper

SEQ ID NO: 37955 - DNA, 39 bp, Homo sapiens; identical to SEQ ID NO: 4128
  chr10:126849762-126849801
  hyper

SEQ ID NO: 37956 - DNA, 31 bp, Homo sapiens; identical to SEQ ID NO: 4129
  chr10:126849863-126849894
  hyper

SEQ ID NO: 37957 - DNA, 161 bp, Homo sapiens; identical to SEQ ID NO: 4130
  chr10:126849984-126850145
  hyper

SEQ ID NO: 37958 - DNA, 60 bp, Homo sapiens; identical to SEQ ID NO: 4131
  chr10:126850345-126850405
  hyper

SEQ ID NO: 37959 - DNA, 31 bp, Homo sapiens; identical to SEQ ID NO: 4132
  chr10:127585010-127585041
  hyper

SEQ ID NO: 37960 - DNA, 58 bp, Homo sapiens; identical to SEQ ID NO: 4133
  chr10:128593607-128593665
  hyper

SEQ ID NO: 37961 - DNA, 31 bp, Homo sapiens; identical to SEQ ID NO: 4134
  chr10:128593701-128593732
  hyper

SEQ ID NO: 37962 - DNA, 50 bp, Homo sapiens; identical to SEQ ID NO: 4135
  chr10:129706050-129706100
  hyper

SEQ ID NO: 37963 - DNA, 41 bp, Homo sapiens; identical to SEQ ID NO: 4138
  chr10:134210376-134210417
  hyper

SEQ ID NO: 37964 - DNA, 116 bp, Homo sapiens; identical to SEQ ID NO: 4139
  chr10:134210546-134210662
  hyper

SEQ ID NO: 37965 - DNA, 135 bp, Homo sapiens; identical to SEQ ID NO: 4140
  chr10:134210747-134210882
  hyper

SEQ ID NO: 37966 - DNA, 99 bp, Homo sapiens; identical to SEQ ID NO: 4141
  chr10:134211033-134211132
  hyper

SEQ ID NO: 37967 - DNA, 31 bp, Homo sapiens; identical to SEQ ID NO: 4142
  chr10:134211207-134211238
  hyper

SEQ ID NO: 37968 - DNA, 68 bp, Homo sapiens; identical to SEQ ID NO: 4143
  chr10:134211254-134211322
  hyper

SEQ ID NO: 37969 - DNA, 58 bp, Homo sapiens; identical to SEQ ID NO: 4144
  chr10:134350648-134350706
  hyper

SEQ ID NO: 37970 - DNA, 52 bp, Homo sapiens; identical to SEQ ID NO: 4145
  chr10:134351008-134351060
  hyper

SEQ ID NO: 37971 - DNA, 44 bp, Homo sapiens; identical to SEQ ID NO: 4146
  chr10:134351257-134351301
  hyper

SEQ ID NO: 37972 - DNA, 160 bp, Homo sapiens; identical to SEQ ID NO: 4147
  chr10:134351391-134351551
  hyper

SEQ ID NO: 37973 - DNA, 77 bp, Homo sapiens; identical to SEQ ID NO: 4148
  chr10:134351702-134351779
  hyper

SEQ ID NO: 37974 - DNA, 50 bp, Homo sapiens; identical to SEQ ID NO: 4149
  chr10:134545672-134545722
  hyper

SEQ ID NO: 37975 - DNA, 31 bp, Homo sapiens; identical to SEQ ID NO: 4150
  chr10:134564784-134564815
  hyper

SEQ ID NO: 37976 - DNA, 74 bp, Homo sapiens; identical to SEQ ID NO: 4151
  chr10:134650410-134650484
  hyper

SEQ ID NO: 37977 - DNA, 47 bp, Homo sapiens; identical to SEQ ID NO: 4152
  chr10:134650486-134650533
  hyper

SEQ ID NO: 37978 - DNA, 79 bp, Homo sapiens; identical to SEQ ID NO: 4153
  chr10:134973645-134973724
  hyper

SEQ ID NO: 37979 - DNA, 37 bp, Homo sapiens; identical to SEQ ID NO: 4154
  chr10:135051089-135051126
  hyper

SEQ ID NO: 37980 - DNA, 31 bp, Homo sapiens; identical to SEQ ID NO: 4155
  chr10:135075092-135075123
  hyper

SEQ ID NO: 37981 - DNA, 31 bp, Homo sapiens; identical to SEQ ID NO: 4156
  chr11:320543-320574
  hyper

SEQ ID NO: 37982 - DNA, 2 bp, Homo sapiens
  chr11:327112-327114
  hyper
ct

SEQ ID NO: 37983 - DNA, 66 bp, Homo sapiens; identical to SEQ ID NO: 4159
  chr11:417263-417329
  hyper

SEQ ID NO: 37984 - DNA, 116 bp, Homo sapiens; identical to SEQ ID NO: 4160
  chr11:417386-417502
  hyper

SEQ ID NO: 37985 - DNA, 31 bp, Homo sapiens; identical to SEQ ID NO: 4161
  chr11:450246-450277
  hyper

SEQ ID NO: 37986 - DNA, 42 bp, Homo sapiens
  chr11:485972-486014
  hyper
tcaccgtgcgcgcaggcgagcgtaagcagtgcacgggcgcgc

SEQ ID NO: 37987 - DNA, 29 bp, Homo sapiens
  chr11:486095-486124
  hyper
ctggtgccctggtgcgtgtgtgctgtgag

SEQ ID NO: 37988 - DNA, 31 bp, Homo sapiens; identical to SEQ ID NO: 4164
  chr11:568368-568399
  hyper

SEQ ID NO: 37989 - DNA, 47 bp, Homo sapiens; identical to SEQ ID NO: 4165
  chr11:575193-575240
  hyper

SEQ ID NO: 37990 - DNA, 114 bp, Homo sapiens; identical to SEQ ID NO: 4166
  chr11:575264-575378
  hyper

SEQ ID NO: 37991 - DNA, 199 bp, Homo sapiens; identical to SEQ ID NO: 4167
  chr11:575603-575802
  hyper

SEQ ID NO: 37992 - DNA, 53 bp, Homo sapiens; identical to SEQ ID NO: 4168
  chr11:581817-581870
  hyper

SEQ ID NO: 37993 - DNA, 36 bp, Homo sapiens; identical to SEQ ID NO: 4170
  chr11:706175-706211
  hyper

SEQ ID NO: 37994 - DNA, 31 bp, Homo sapiens; identical to SEQ ID NO: 4171
  chr11:706385-706416
  hyper

SEQ ID NO: 37995 - DNA, 35 bp, Homo sapiens; identical to SEQ ID NO: 4172
  chr11:832780-832815
  hyper

SEQ ID NO: 37996 - DNA, 31 bp, Homo sapiens; identical to SEQ ID NO: 4173
  chr11:1139541-1139572
  hyper

SEQ ID NO: 37997 - DNA, 2 bp, Homo sapiens
  chr11:1357329-1357331
  hyper
gg

SEQ ID NO: 37998 - DNA, 94 bp, Homo sapiens; identical to SEQ ID NO: 4175
  chr11:1357369-1357463
  hyper

SEQ ID NO: 37999 - DNA, 31 bp, Homo sapiens; identical to SEQ ID NO: 4176
  chr11:1357946-1357977
  hyper

SEQ ID NO: 38000 - DNA, 62 bp, Homo sapiens; identical to SEQ ID NO: 4177
  chr11:1592746-1592808
  hyper

SEQ ID NO: 38001 - DNA, 82 bp, Homo sapiens; identical to SEQ ID NO: 4178
  chr11:1592947-1593029
  hyper

SEQ ID NO: 38002 - DNA, 31 bp, Homo sapiens; identical to SEQ ID NO: 4179
  chr11:1593214-1593245
  hyper

SEQ ID NO: 38003 - DNA, 118 bp, Homo sapiens; identical to SEQ ID NO: 4180
  chr11:1594038-1594156
  hyper

SEQ ID NO: 38004 - DNA, 66 bp, Homo sapiens; identical to SEQ ID NO: 4181
  chr11:1674133-1674199
  hyper

SEQ ID NO: 38005 - DNA, 31 bp, Homo sapiens; identical to SEQ ID NO: 4182
  chr11:2466003-2466034
  hyper

SEQ ID NO: 38006 - DNA, 48 bp, Homo sapiens; identical to SEQ ID NO: 4183
  chr11:2466078-2466126
  hyper

SEQ ID NO: 38007 - DNA, 2 bp, Homo sapiens
  chr11:2466440-2466442
  hyper
tg

SEQ ID NO: 38008 - DNA, 45 bp, Homo sapiens; identical to SEQ ID NO: 4187
  chr11:2905685-2905730
  hyper

SEQ ID NO: 38009 - DNA, 35 bp, Homo sapiens
  chr11:2906271-2906306
  hyper
ggggcggggtggacgccggggccgggaccgggaca

SEQ ID NO: 38010 - DNA, 35 bp, Homo sapiens; identical to SEQ ID NO: 4189
  chr11:2906692-2906727
  hyper

SEQ ID NO: 38011 - DNA, 81 bp, Homo sapiens
  chr11:2906971-2907052
  hyper
ggcacccctcgagcacagcgcacttggcctgtggaacgcccagcccgcctgcgccccctttatacgcgcgggccccacccc

SEQ ID NO: 38012 - DNA, 31 bp, Homo sapiens; identical to SEQ ID NO: 4192
  chr11:2950787-2950818
  hyper

SEQ ID NO: 38013 - DNA, 31 bp, Homo sapiens; identical to SEQ ID NO: 4193
  chr11:3112953-3112984
  hyper

SEQ ID NO: 38014 - DNA, 79 bp, Homo sapiens; identical to SEQ ID NO: 4194
  chr11:3186115-3186194
  hyper

SEQ ID NO: 38015 - DNA, 98 bp, Homo sapiens; identical to SEQ ID NO: 4195
  chr11:3186352-3186450
  hyper

SEQ ID NO: 38016 - DNA, 21 bp, Homo sapiens
  chr11:3186581-3186602
  hyper
ggaggcccagggagcccggag

SEQ ID NO: 38017 - DNA, 243 bp, Homo sapiens; identical to SEQ ID NO: 4197
  chr11:3444552-3444795
  hyper

SEQ ID NO: 38018 - DNA, 31 bp, Homo sapiens; identical to SEQ ID NO: 4199
  chr11:3663275-3663306
  hyper

SEQ ID NO: 38019 - DNA, 82 bp, Homo sapiens; identical to SEQ ID NO: 4200
  chr11:3663322-3663404
  hyper

SEQ ID NO: 38020 - DNA, 31 bp, Homo sapiens; identical to SEQ ID NO: 4201
  chr11:3887889-3887920
  hyper

SEQ ID NO: 38021 - DNA, 47 bp, Homo sapiens; identical to SEQ ID NO: 4202
  chr11:6495353-6495400
  hyper

SEQ ID NO: 38022 - DNA, 31 bp, Homo sapiens; identical to SEQ ID NO: 4203
  chr11:6502786-6502817
  hyper

SEQ ID NO: 38023 - DNA, 31 bp, Homo sapiens; identical to SEQ ID NO: 4204
  chr11:7534832-7534863
  hyper

SEQ ID NO: 38024 - DNA, 204 bp, Homo sapiens; identical to SEQ ID NO: 4208
  chr11:8892170-8892374
  hyper

SEQ ID NO: 38025 - DNA, 161 bp, Homo sapiens; identical to SEQ ID NO: 4209
  chr11:8892431-8892592
  hyper

SEQ ID NO: 38026 - DNA, 31 bp, Homo sapiens; identical to SEQ ID NO: 4210
  chr11:9596557-9596588
  hyper

SEQ ID NO: 38027 - DNA, 88 bp, Homo sapiens; identical to SEQ ID NO: 4211
  chr11:9596679-9596767
  hyper

SEQ ID NO: 38028 - DNA, 74 bp, Homo sapiens; identical to SEQ ID NO: 4212
  chr11:9685558-9685632
  hyper

SEQ ID NO: 38029 - DNA, 101 bp, Homo sapiens; identical to SEQ ID NO: 4213
  chr11:9685634-9685735
  hyper

SEQ ID NO: 38030 - DNA, 61 bp, Homo sapiens; identical to SEQ ID NO: 4214
  chr11:9685751-9685812
  hyper

SEQ ID NO: 38031 - DNA, 146 bp, Homo sapiens; identical to SEQ ID NO: 4215
  chr11:9685848-9685994
  hyper

SEQ ID NO: 38032 - DNA, 44 bp, Homo sapiens; identical to SEQ ID NO: 4216
  chr11:9685997-9686041
  hyper

SEQ ID NO: 38033 - DNA, 31 bp, Homo sapiens; identical to SEQ ID NO: 4218
  chr11:10324218-10324249
  hyper

SEQ ID NO: 38034 - DNA, 70 bp, Homo sapiens; identical to SEQ ID NO: 4219
  chr11:10324257-10324327
  hyper

SEQ ID NO: 38035 - DNA, 32 bp, Homo sapiens
  chr11:12132212-12132244
  hyper
gcgcccgcggccagggccgaggcaggcctgac

SEQ ID NO: 38036 - DNA, 34 bp, Homo sapiens; identical to SEQ ID NO: 4222
  chr11:12132269-12132303
  hyper

SEQ ID NO: 38037 - DNA, 7 bp, Homo sapiens
  chr11:12696746-12696753
  hyper
agccaga

SEQ ID NO: 38038 - DNA, 90 bp, Homo sapiens; identical to SEQ ID NO: 4230
  chr11:12696869-12696959
  hyper

SEQ ID NO: 38039 - DNA, 42 bp, Homo sapiens; identical to SEQ ID NO: 4231
  chr11:13298518-13298560
  hyper

SEQ ID NO: 38040 - DNA, 61 bp, Homo sapiens; identical to SEQ ID NO: 4232
  chr11:13298715-13298776
  hyper

SEQ ID NO: 38041 - DNA, 31 bp, Homo sapiens; identical to SEQ ID NO: 4233
  chr11:13298792-13298823
  hyper

SEQ ID NO: 38042 - DNA, 45 bp, Homo sapiens; identical to SEQ ID NO: 4234
  chr11:14666247-14666292
  hyper

SEQ ID NO: 38043 - DNA, 31 bp, Homo sapiens; identical to SEQ ID NO: 4235
  chr11:15671675-15671706
  hyper

SEQ ID NO: 38044 - DNA, 31 bp, Homo sapiens; identical to SEQ ID NO: 4236
  chr11:15671896-15671927
  hyper

SEQ ID NO: 38045 - DNA, 55 bp, Homo sapiens; identical to SEQ ID NO: 4237
  chr11:16626686-16626741
  hyper

SEQ ID NO: 38046 - DNA, 31 bp, Homo sapiens; identical to SEQ ID NO: 4238
  chr11:16760933-16760964
  hyper

SEQ ID NO: 38047 - DNA, 31 bp, Homo sapiens; identical to SEQ ID NO: 4239
  chr11:17035598-17035629
  hyper

SEQ ID NO: 38048 - DNA, 83 bp, Homo sapiens; identical to SEQ ID NO: 4240
  chr11:17035645-17035728
  hyper

SEQ ID NO: 38049 - DNA, 35 bp, Homo sapiens; identical to SEQ ID NO: 4241
  chr11:17035837-17035872
  hyper

SEQ ID NO: 38050 - DNA, 105 bp, Homo sapiens; identical to SEQ ID NO: 4242
  chr11:17035880-17035985
  hyper

SEQ ID NO: 38051 - DNA, 55 bp, Homo sapiens; identical to SEQ ID NO: 4243
  chr11:17036137-17036192
  hyper

SEQ ID NO: 38052 - DNA, 88 bp, Homo sapiens; identical to SEQ ID NO: 4244
  chr11:17036267-17036355
  hyper

SEQ ID NO: 38053 - DNA, 31 bp, Homo sapiens; identical to SEQ ID NO: 4245
  chr11:17498406-17498437
  hyper

SEQ ID NO: 38054 - DNA, 39 bp, Homo sapiens; identical to SEQ ID NO: 4246
  chr11:18610705-18610744
  hyper

SEQ ID NO: 38055 - DNA, 31 bp, Homo sapiens; identical to SEQ ID NO: 4247
  chr11:18720185-18720216
  hyper

SEQ ID NO: 38056 - DNA, 31 bp, Homo sapiens; identical to SEQ ID NO: 4248
  chr11:19093002-19093033
  hyper

SEQ ID NO: 38057 - DNA, 69 bp, Homo sapiens; identical to SEQ ID NO: 4249
  chr11:19093070-19093139
  hyper

SEQ ID NO: 38058 - DNA, 90 bp, Homo sapiens; identical to SEQ ID NO: 4250
  chr11:20689750-20689840
  hyper

SEQ ID NO: 38059 - DNA, 65 bp, Homo sapiens; identical to SEQ ID NO: 4251
  chr11:27493262-27493327
  hyper

SEQ ID NO: 38060 - DNA, 31 bp, Homo sapiens; identical to SEQ ID NO: 4252
  chr11:27493380-27493411
  hyper

SEQ ID NO: 38061 - DNA, 125 bp, Homo sapiens; identical to SEQ ID NO: 4253
  chr11:27493422-27493547
  hyper

SEQ ID NO: 38062 - DNA, 194 bp, Homo sapiens; identical to SEQ ID NO: 4254
  chr11:27493755-27493949
  hyper

SEQ ID NO: 38063 - DNA, 323 bp, Homo sapiens; identical to SEQ ID NO: 4255
  chr11:27494047-27494370
  hyper

SEQ ID NO: 38064 - DNA, 130 bp, Homo sapiens; identical to SEQ ID NO: 4256
  chr11:27494388-27494518
  hyper

SEQ ID NO: 38065 - DNA, 94 bp, Homo sapiens; identical to SEQ ID NO: 4257
  chr11:32851552-32851646
  hyper

SEQ ID NO: 38066 - DNA, 108 bp, Homo sapiens; identical to SEQ ID NO: 4258
  chr11:35966092-35966200
  hyper

SEQ ID NO: 38067 - DNA, 31 bp, Homo sapiens; identical to SEQ ID NO: 4259
  chr11:35966248-35966279
  hyper

SEQ ID NO: 38068 - DNA, 129 bp, Homo sapiens; identical to SEQ ID NO: 4261
  chr11:44087989-44088118
  hyper

SEQ ID NO: 38069 - DNA, 31 bp, Homo sapiens
  chr11:44748160-44748191
  hyper
cctggaataaacacttcgggtccagcatgcc

SEQ ID NO: 38070 - DNA, 98 bp, Homo sapiens; identical to SEQ ID NO: 4265
  chr11:44748501-44748599
  hyper

SEQ ID NO: 38071 - DNA, 10 bp, Homo sapiens
  chr11:44748666-44748676
  hyper
ccgagccccg

SEQ ID NO: 38072 - DNA, 83 bp, Homo sapiens
  chr11:44748871-44748954
  hyper
ccgccgccgcgcccccggggacctggggacccccccgcgcgccgccccgggggtgctgctggacgcggcggggaattggggtg

SEQ ID NO: 38073 - DNA, 35 bp, Homo sapiens; identical to SEQ ID NO: 4269
  chr11:44749131-44749166
  hyper

SEQ ID NO: 38074 - DNA, 45 bp, Homo sapiens; identical to SEQ ID NO: 4270
  chr11:45307445-45307490
  hyper

SEQ ID NO: 38075 - DNA, 67 bp, Homo sapiens
  chr11:45307754-45307821
  hyper
ccatggtgcccgctcccggcgaggggctgggtcccgcagccgctcaccttccccgggccgggcccgc

SEQ ID NO: 38076 - DNA, 68 bp, Homo sapiens
  chr11:45307857-45307925
  hyper
ctctcccgccgccagaggggcggggacggagggagggaggacggctgcgaggacgtcagaggaggctg

SEQ ID NO: 38077 - DNA, 52 bp, Homo sapiens; identical to SEQ ID NO: 4272
  chr11:45684298-45684350
  hyper

SEQ ID NO: 38078 - DNA, 31 bp, Homo sapiens; identical to SEQ ID NO: 4273
  chr11:45684364-45684395
  hyper

SEQ ID NO: 38079 - DNA, 46 bp, Homo sapiens; identical to SEQ ID NO: 4274
  chr11:46141116-46141162
  hyper

SEQ ID NO: 38080 - DNA, 63 bp, Homo sapiens; identical to SEQ ID NO: 4275
  chr11:46264957-46265020
  hyper

SEQ ID NO: 38081 - DNA, 45 bp, Homo sapiens; identical to SEQ ID NO: 4276
  chr11:46299546-46299591
  hyper

SEQ ID NO: 38082 - DNA, 49 bp, Homo sapiens; identical to SEQ ID NO: 4277
  chr11:46413560-46413609
  hyper

SEQ ID NO: 38083 - DNA, 31 bp, Homo sapiens; identical to SEQ ID NO: 4278
  chr11:47208544-47208575
  hyper

SEQ ID NO: 38084 - DNA, 37 bp, Homo sapiens; identical to SEQ ID NO: 4279
  chr11:47661386-47661423
  hyper

SEQ ID NO: 38085 - DNA, 51 bp, Homo sapiens; identical to SEQ ID NO: 4280
  chr11:48002695-48002746
  hyper

SEQ ID NO: 38086 - DNA, 80 bp, Homo sapiens; identical to SEQ ID NO: 4283
  chr11:57334770-57334850
  hyper

SEQ ID NO: 38087 - DNA, 31 bp, Homo sapiens; identical to SEQ ID NO: 4284
  chr11:57434948-57434979
  hyper

SEQ ID NO: 38088 - DNA, 4 bp, Homo sapiens
  chr11:59323956-59323960
  hyper
caag

SEQ ID NO: 38089 - DNA, 31 bp, Homo sapiens; identical to SEQ ID NO: 4286
  chr11:59324157-59324188
  hyper

SEQ ID NO: 38090 - DNA, 6 bp, Homo sapiens
  chr11:59333338-59333344
  hyper
ccggtc

SEQ ID NO: 38091 - DNA, 31 bp, Homo sapiens; identical to SEQ ID NO: 4290
  chr11:59333706-59333737
  hyper

SEQ ID NO: 38092 - DNA, 36 bp, Homo sapiens; identical to SEQ ID NO: 4291
  chr11:59523185-59523221
  hyper

SEQ ID NO: 38093 - DNA, 31 bp, Homo sapiens; identical to SEQ ID NO: 4292
  chr11:59523285-59523316
  hyper

SEQ ID NO: 38094 - DNA, 50 bp, Homo sapiens; identical to SEQ ID NO: 4293
  chr11:60692120-60692170
  hyper

SEQ ID NO: 38095 - DNA, 31 bp, Homo sapiens; identical to SEQ ID NO: 4299
  chr11:61160872-61160903
  hyper

SEQ ID NO: 38096 - DNA, 99 bp, Homo sapiens; identical to SEQ ID NO: 4300
  chr11:61348493-61348592
  hyper

SEQ ID NO: 38097 - DNA, 37 bp, Homo sapiens; identical to SEQ ID NO: 4301
  chr11:61355114-61355151
  hyper

SEQ ID NO: 38098 - DNA, 31 bp, Homo sapiens; identical to SEQ ID NO: 4302
  chr11:61447551-61447582
  hyper

SEQ ID NO: 38099 - DNA, 31 bp, Homo sapiens; identical to SEQ ID NO: 4303
  chr11:61447670-61447701
  hyper

SEQ ID NO: 38100 - DNA, 104 bp, Homo sapiens; identical to SEQ ID NO: 4304
  chr11:61447817-61447921
  hyper

SEQ ID NO: 38101 - DNA, 31 bp, Homo sapiens; identical to SEQ ID NO: 4305
  chr11:61447927-61447958
  hyper

SEQ ID NO: 38102 - DNA, 82 bp, Homo sapiens; identical to SEQ ID NO: 4306
  chr11:61519847-61519929
  hyper

SEQ ID NO: 38103 - DNA, 240 bp, Homo sapiens; identical to SEQ ID NO: 4307
  chr11:61520127-61520367
  hyper

SEQ ID NO: 38104 - DNA, 149 bp, Homo sapiens; identical to SEQ ID NO: 4308
  chr11:62313645-62313794
  hyper

SEQ ID NO: 38105 - DNA, 201 bp, Homo sapiens; identical to SEQ ID NO: 4309
  chr11:62313806-62314007
  hyper

SEQ ID NO: 38106 - DNA, 91 bp, Homo sapiens; identical to SEQ ID NO: 4310
  chr11:62314023-62314114
  hyper

SEQ ID NO: 38107 - DNA, 56 bp, Homo sapiens; identical to SEQ ID NO: 4311
  chr11:62369473-62369529
  hyper

SEQ ID NO: 38108 - DNA, 48 bp, Homo sapiens; identical to SEQ ID NO: 4312
  chr11:62369579-62369627
  hyper

SEQ ID NO: 38109 - DNA, 47 bp, Homo sapiens; identical to SEQ ID NO: 4313
  chr11:62369635-62369682
  hyper

SEQ ID NO: 38110 - DNA, 50 bp, Homo sapiens; identical to SEQ ID NO: 4314
  chr11:62369883-62369933
  hyper

SEQ ID NO: 38111 - DNA, 31 bp, Homo sapiens; identical to SEQ ID NO: 4320
  chr11:64698944-64698975
  hyper

SEQ ID NO: 38112 - DNA, 31 bp, Homo sapiens; identical to SEQ ID NO: 4321
  chr11:64698988-64699019
  hyper

SEQ ID NO: 38113 - DNA, 31 bp, Homo sapiens; identical to SEQ ID NO: 4322
  chr11:64699020-64699051
  hyper

SEQ ID NO: 38114 - DNA, 55 bp, Homo sapiens; identical to SEQ ID NO: 4323
  chr11:64699088-64699143
  hyper

SEQ ID NO: 38115 - DNA, 31 bp, Homo sapiens; identical to SEQ ID NO: 4324
  chr11:64759021-64759052
  hyper

SEQ ID NO: 38116 - DNA, 31 bp, Homo sapiens; identical to SEQ ID NO: 4325
  chr11:65082127-65082158
  hyper

SEQ ID NO: 38117 - DNA, 74 bp, Homo sapiens; identical to SEQ ID NO: 4326
  chr11:65121846-65121920
  hyper

SEQ ID NO: 38118 - DNA, 31 bp, Homo sapiens; identical to SEQ ID NO: 4329
  chr11:65276133-65276164
  hyper

SEQ ID NO: 38119 - DNA, 56 bp, Homo sapiens
  chr11:65405604-65405660
  hyper
gcagcgggaccccagcgcgggcggcggcggctgggcgggagccccagaggtactgg

SEQ ID NO: 38120 - DNA, 45 bp, Homo sapiens; identical to SEQ ID NO: 4332
  chr11:66139090-66139135
  hyper

SEQ ID NO: 38121 - DNA, 31 bp, Homo sapiens; identical to SEQ ID NO: 4333
  chr11:66176412-66176443
  hyper

SEQ ID NO: 38122 - DNA, 68 bp, Homo sapiens; identical to SEQ ID NO: 4334
  chr11:66176499-66176567
  hyper

SEQ ID NO: 38123 - DNA, 61 bp, Homo sapiens; identical to SEQ ID NO: 4335
  chr11:66176660-66176721
  hyper

SEQ ID NO: 38124 - DNA, 31 bp, Homo sapiens; identical to SEQ ID NO: 4336
  chr11:66725361-66725392
  hyper

SEQ ID NO: 38125 - DNA, 67 bp, Homo sapiens; identical to SEQ ID NO: 4337
  chr11:66725533-66725600
  hyper

SEQ ID NO: 38126 - DNA, 61 bp, Homo sapiens; identical to SEQ ID NO: 4339
  chr11:66886094-66886155
  hyper

SEQ ID NO: 38127 - DNA, 31 bp, Homo sapiens; identical to SEQ ID NO: 4340
  chr11:67183097-67183128
  hyper

SEQ ID NO: 38128 - DNA, 37 bp, Homo sapiens; identical to SEQ ID NO: 4341
  chr11:67183230-67183267
  hyper

SEQ ID NO: 38129 - DNA, 95 bp, Homo sapiens; identical to SEQ ID NO: 4342
  chr11:67210850-67210945
  hyper

SEQ ID NO: 38130 - DNA, 42 bp, Homo sapiens; identical to SEQ ID NO: 4343
  chr11:67210962-67211004
  hyper

SEQ ID NO: 38131 - DNA, 45 bp, Homo sapiens; identical to SEQ ID NO: 4345
  chr11:67275124-67275169
  hyper

SEQ ID NO: 38132 - DNA, 31 bp, Homo sapiens; identical to SEQ ID NO: 4346
  chr11:67777601-67777632
  hyper

SEQ ID NO: 38133 - DNA, 111 bp, Homo sapiens; identical to SEQ ID NO: 4347
  chr11:68080103-68080214
  hyper

SEQ ID NO: 38134 - DNA, 131 bp, Homo sapiens; identical to SEQ ID NO: 4348
  chr11:68080740-68080871
  hyper

SEQ ID NO: 38135 - DNA, 31 bp, Homo sapiens; identical to SEQ ID NO: 4349
  chr11:68801618-68801649
  hyper

SEQ ID NO: 38136 - DNA, 140 bp, Homo sapiens; identical to SEQ ID NO: 4350
  chr11:69453762-69453902
  hyper

SEQ ID NO: 38137 - DNA, 35 bp, Homo sapiens; identical to SEQ ID NO: 4351
  chr11:69453914-69453949
  hyper

SEQ ID NO: 38138 - DNA, 31 bp, Homo sapiens; identical to SEQ ID NO: 4352
  chr11:70016124-70016155
  hyper

SEQ ID NO: 38139 - DNA, 44 bp, Homo sapiens; identical to SEQ ID NO: 4353
  chr11:70117684-70117728
  hyper

SEQ ID NO: 38140 - DNA, 44 bp, Homo sapiens; identical to SEQ ID NO: 4354
  chr11:70117744-70117788
  hyper

SEQ ID NO: 38141 - DNA, 31 bp, Homo sapiens; identical to SEQ ID NO: 4355
  chr11:71752006-71752037
  hyper

SEQ ID NO: 38142 - DNA, 31 bp, Homo sapiens; identical to SEQ ID NO: 4356
  chr11:72854185-72854216
  hyper

SEQ ID NO: 38143 - DNA, 59 bp, Homo sapiens; identical to SEQ ID NO: 4357
  chr11:74851767-74851826
  hyper

SEQ ID NO: 38144 - DNA, 430 bp, Homo sapiens; identical to SEQ ID NO: 4358
  chr11:75062272-75062702
  hyper

SEQ ID NO: 38145 - DNA, 70 bp, Homo sapiens; identical to SEQ ID NO: 4359
  chr11:75062708-75062778
  hyper

SEQ ID NO: 38146 - DNA, 181 bp, Homo sapiens; identical to SEQ ID NO: 4360
  chr11:75062806-75062987
  hyper

SEQ ID NO: 38147 - DNA, 31 bp, Homo sapiens; identical to SEQ ID NO: 4362
  chr11:75237128-75237159
  hyper

SEQ ID NO: 38148 - DNA, 2 bp, Homo sapiens
  chr11:76382020-76382022
  hyper
gg

SEQ ID NO: 38149 - DNA, 31 bp, Homo sapiens; identical to SEQ ID NO: 4368
  chr11:76466226-76466257
  hyper

SEQ ID NO: 38150 - DNA, 263 bp, Homo sapiens; identical to SEQ ID NO: 4369
  chr11:76494602-76494865
  hyper

SEQ ID NO: 38151 - DNA, 71 bp, Homo sapiens; identical to SEQ ID NO: 4370
  chr11:76494906-76494977
  hyper

SEQ ID NO: 38152 - DNA, 31 bp, Homo sapiens; identical to SEQ ID NO: 4371
  chr11:76510329-76510360
  hyper

SEQ ID NO: 38153 - DNA, 31 bp, Homo sapiens; identical to SEQ ID NO: 4372
  chr11:76682667-76682698
  hyper

SEQ ID NO: 38154 - DNA, 112 bp, Homo sapiens; identical to SEQ ID NO: 4373
  chr11:77184394-77184506
  hyper

SEQ ID NO: 38155 - DNA, 167 bp, Homo sapiens; identical to SEQ ID NO: 4374
  chr11:77184508-77184675
  hyper

SEQ ID NO: 38156 - DNA, 31 bp, Homo sapiens; identical to SEQ ID NO: 4375
  chr11:77184749-77184780
  hyper

SEQ ID NO: 38157 - DNA, 31 bp, Homo sapiens; identical to SEQ ID NO: 4376
  chr11:77184829-77184860
  hyper

SEQ ID NO: 38158 - DNA, 31 bp, Homo sapiens; identical to SEQ ID NO: 4377
  chr11:77184910-77184941
  hyper

SEQ ID NO: 38159 - DNA, 31 bp, Homo sapiens; identical to SEQ ID NO: 4378
  chr11:77184952-77184983
  hyper

SEQ ID NO: 38160 - DNA, 133 bp, Homo sapiens; identical to SEQ ID NO: 4379
  chr11:77185040-77185173
  hyper

SEQ ID NO: 38161 - DNA, 126 bp, Homo sapiens; identical to SEQ ID NO: 4380
  chr11:77185324-77185450
  hyper

SEQ ID NO: 38162 - DNA, 47 bp, Homo sapiens; identical to SEQ ID NO: 4381
  chr11:77185470-77185517
  hyper

SEQ ID NO: 38163 - DNA, 31 bp, Homo sapiens; identical to SEQ ID NO: 4382
  chr11:77185623-77185654
  hyper

SEQ ID NO: 38164 - DNA, 83 bp, Homo sapiens; identical to SEQ ID NO: 4383
  chr11:77300372-77300455
  hyper

SEQ ID NO: 38165 - DNA, 162 bp, Homo sapiens; identical to SEQ ID NO: 4384
  chr11:86511242-86511404
  hyper

SEQ ID NO: 38166 - DNA, 363 bp, Homo sapiens; identical to SEQ ID NO: 4385
  chr11:86511408-86511771
  hyper

SEQ ID NO: 38167 - DNA, 34 bp, Homo sapiens; identical to SEQ ID NO: 4386
  chr11:86511868-86511902
  hyper

SEQ ID NO: 38168 - DNA, 31 bp, Homo sapiens; identical to SEQ ID NO: 4387
  chr11:86511916-86511947
  hyper

SEQ ID NO: 38169 - DNA, 62 bp, Homo sapiens; identical to SEQ ID NO: 4388
  chr11:86511979-86512041
  hyper

SEQ ID NO: 38170 - DNA, 158 bp, Homo sapiens; identical to SEQ ID NO: 4389
  chr11:86665885-86666043
  hyper

SEQ ID NO: 38171 - DNA, 52 bp, Homo sapiens; identical to SEQ ID NO: 4390
  chr11:86666228-86666280
  hyper

SEQ ID NO: 38172 - DNA, 31 bp, Homo sapiens; identical to SEQ ID NO: 4391
  chr11:86666306-86666337
  hyper

SEQ ID NO: 38173 - DNA, 196 bp, Homo sapiens; identical to SEQ ID NO: 4392
  chr11:86666339-86666535
  hyper

SEQ ID NO: 38174 - DNA, 31 bp, Homo sapiens; identical to SEQ ID NO: 4393
  chr11:92931155-92931186
  hyper

SEQ ID NO: 38175 - DNA, 51 bp, Homo sapiens; identical to SEQ ID NO: 4394
  chr11:94884635-94884686
  hyper

SEQ ID NO: 38176 - DNA, 34 bp, Homo sapiens; identical to SEQ ID NO: 4395
  chr11:95523018-95523052
  hyper

SEQ ID NO: 38177 - DNA, 54 bp, Homo sapiens
  chr11:101981964-101982018
  hyper
gagccgcggccgccagctctggtcaggggaggggggttgcgggaactctagctg

SEQ ID NO: 38178 - DNA, 31 bp, Homo sapiens; identical to SEQ ID NO: 4397
  chr11:101982173-101982204
  hyper

SEQ ID NO: 38179 - DNA, 31 bp, Homo sapiens; identical to SEQ ID NO: 4398
  chr11:101982240-101982271
  hyper

SEQ ID NO: 38180 - DNA, 31 bp, Homo sapiens; identical to SEQ ID NO: 4399
  chr11:101982559-101982590
  hyper

SEQ ID NO: 38181 - DNA, 74 bp, Homo sapiens; identical to SEQ ID NO: 4406
  chr11:108368606-108368680
  hyper

SEQ ID NO: 38182 - DNA, 59 bp, Homo sapiens; identical to SEQ ID NO: 4407
  chr11:108368878-108368937
  hyper

SEQ ID NO: 38183 - DNA, 53 bp, Homo sapiens; identical to SEQ ID NO: 4408
  chr11:108368986-108369039
  hyper

SEQ ID NO: 38184 - DNA, 141 bp, Homo sapiens; identical to SEQ ID NO: 4409
  chr11:108369108-108369249
  hyper

SEQ ID NO: 38185 - DNA, 78 bp, Homo sapiens; identical to SEQ ID NO: 4410
  chr11:108463552-108463630
  hyper

SEQ ID NO: 38186 - DNA, 113 bp, Homo sapiens; identical to SEQ ID NO: 4411
  chr11:108463827-108463940
  hyper

SEQ ID NO: 38187 - DNA, 31 bp, Homo sapiens; identical to SEQ ID NO: 4412
  chr11:108464144-108464175
  hyper

SEQ ID NO: 38188 - DNA, 71 bp, Homo sapiens; identical to SEQ ID NO: 4413
  chr11:108464201-108464272
  hyper

SEQ ID NO: 38189 - DNA, 31 bp, Homo sapiens; identical to SEQ ID NO: 4414
  chr11:108464285-108464316
  hyper

SEQ ID NO: 38190 - DNA, 31 bp, Homo sapiens; identical to SEQ ID NO: 4415
  chr11:108464333-108464364
  hyper

SEQ ID NO: 38191 - DNA, 31 bp, Homo sapiens; identical to SEQ ID NO: 4416
  chr11:111945412-111945443
  hyper

SEQ ID NO: 38192 - DNA, 31 bp, Homo sapiens; identical to SEQ ID NO: 4417
  chr11:112046231-112046262
  hyper

SEQ ID NO: 38193 - DNA, 31 bp, Homo sapiens; identical to SEQ ID NO: 4418
  chr11:113746651-113746682
  hyper

SEQ ID NO: 38194 - DNA, 38 bp, Homo sapiens; identical to SEQ ID NO: 4419
  chr11:115373018-115373056
  hyper

SEQ ID NO: 38195 - DNA, 31 bp, Homo sapiens; identical to SEQ ID NO: 4420
  chr11:116064587-116064618
  hyper

SEQ ID NO: 38196 - DNA, 262 bp, Homo sapiens; identical to SEQ ID NO: 4421
  chr11:117186648-117186910
  hyper

SEQ ID NO: 38197 - DNA, 38 bp, Homo sapiens; identical to SEQ ID NO: 4422
  chr11:117187036-117187074
  hyper

SEQ ID NO: 38198 - DNA, 61 bp, Homo sapiens; identical to SEQ ID NO: 4423
  chr11:117187076-117187137
  hyper

SEQ ID NO: 38199 - DNA, 54 bp, Homo sapiens; identical to SEQ ID NO: 4425
  chr11:118023498-118023552
  hyper

SEQ ID NO: 38200 - DNA, 31 bp, Homo sapiens; identical to SEQ ID NO: 4426
  chr11:118023556-118023587
  hyper

SEQ ID NO: 38201 - DNA, 34 bp, Homo sapiens; identical to SEQ ID NO: 4427
  chr11:118662850-118662884
  hyper

SEQ ID NO: 38202 - DNA, 31 bp, Homo sapiens; identical to SEQ ID NO: 4428
  chr11:118662982-118663013
  hyper

SEQ ID NO: 38203 - DNA, 46 bp, Homo sapiens; identical to SEQ ID NO: 4429
  chr11:119209336-119209382
  hyper

SEQ ID NO: 38204 - DNA, 34 bp, Homo sapiens; identical to SEQ ID NO: 4430
  chr11:119587837-119587871
  hyper

SEQ ID NO: 38205 - DNA, 51 bp, Homo sapiens; identical to SEQ ID NO: 4431
  chr11:119587875-119587926
  hyper

SEQ ID NO: 38206 - DNA, 136 bp, Homo sapiens; identical to SEQ ID NO: 4432
  chr11:119587931-119588067
  hyper

SEQ ID NO: 38207 - DNA, 31 bp, Homo sapiens; identical to SEQ ID NO: 4433
  chr11:119598324-119598355
  hyper

SEQ ID NO: 38208 - DNA, 104 bp, Homo sapiens; identical to SEQ ID NO: 4434
  chr11:119598366-119598470
  hyper

SEQ ID NO: 38209 - DNA, 31 bp, Homo sapiens; identical to SEQ ID NO: 4435
  chr11:119598481-119598512
  hyper

SEQ ID NO: 38210 - DNA, 69 bp, Homo sapiens; identical to SEQ ID NO: 4437
  chr11:119599011-119599080
  hyper

SEQ ID NO: 38211 - DNA, 57 bp, Homo sapiens; identical to SEQ ID NO: 4438
  chr11:119599093-119599150
  hyper

SEQ ID NO: 38212 - DNA, 166 bp, Homo sapiens; identical to SEQ ID NO: 4439
  chr11:119599159-119599325
  hyper

SEQ ID NO: 38213 - DNA, 58 bp, Homo sapiens; identical to SEQ ID NO: 4440
  chr11:119600031-119600089
  hyper

SEQ ID NO: 38214 - DNA, 31 bp, Homo sapiens; identical to SEQ ID NO: 4444
  chr11:120206517-120206548
  hyper

SEQ ID NO: 38215 - DNA, 31 bp, Homo sapiens; identical to SEQ ID NO: 4446
  chr11:122626283-122626314
  hyper

SEQ ID NO: 38216 - DNA, 31 bp, Homo sapiens; identical to SEQ ID NO: 4447
  chr11:123084067-123084098
  hyper

SEQ ID NO: 38217 - DNA, 31 bp, Homo sapiens; identical to SEQ ID NO: 4458
  chr11:123326582-123326613
  hyper

SEQ ID NO: 38218 - DNA, 51 bp, Homo sapiens; identical to SEQ ID NO: 4459
  chr11:124616947-124616998
  hyper

SEQ ID NO: 38219 - DNA, 31 bp, Homo sapiens; identical to SEQ ID NO: 4460
  chr11:124617129-124617160
  hyper

SEQ ID NO: 38220 - DNA, 43 bp, Homo sapiens; identical to SEQ ID NO: 4461
  chr11:124746303-124746346
  hyper

SEQ ID NO: 38221 - DNA, 2 bp, Homo sapiens
  chr11:125757372-125757374
  hyper
at

SEQ ID NO: 38222 - DNA, 24 bp, Homo sapiens
  chr11:125757409-125757433
  hyper
caaaatgtgcgccaatcaggatac

SEQ ID NO: 38223 - DNA, 45 bp, Homo sapiens; identical to SEQ ID NO: 4463
  chr11:125932493-125932538
  hyper

SEQ ID NO: 38224 - DNA, 186 bp, Homo sapiens; identical to SEQ ID NO: 4465
  chr11:125932556-125932742
  hyper

SEQ ID NO: 38225 - DNA, 125 bp, Homo sapiens; identical to SEQ ID NO: 4466
  chr11:125932778-125932903
  hyper

SEQ ID NO: 38226 - DNA, 88 bp, Homo sapiens; identical to SEQ ID NO: 4467
  chr11:125932904-125932992
  hyper

SEQ ID NO: 38227 - DNA, 31 bp, Homo sapiens; identical to SEQ ID NO: 4468
  chr11:125933297-125933328
  hyper

SEQ ID NO: 38228 - DNA, 66 bp, Homo sapiens; identical to SEQ ID NO: 4469
  chr11:128392687-128392753
  hyper

SEQ ID NO: 38229 - DNA, 72 bp, Homo sapiens; identical to SEQ ID NO: 4485
  chr11:129148498-129148570
  hyper

SEQ ID NO: 38230 - DNA, 145 bp, Homo sapiens; identical to SEQ ID NO: 4486
  chr11:129148572-129148717
  hyper

SEQ ID NO: 38231 - DNA, 83 bp, Homo sapiens; identical to SEQ ID NO: 4487
  chr11:129148740-129148823
  hyper

SEQ ID NO: 38232 - DNA, 111 bp, Homo sapiens; identical to SEQ ID NO: 4488
  chr11:129148827-129148938
  hyper

SEQ ID NO: 38233 - DNA, 35 bp, Homo sapiens; identical to SEQ ID NO: 4489
  chr11:129149096-129149131
  hyper

SEQ ID NO: 38234 - DNA, 253 bp, Homo sapiens; identical to SEQ ID NO: 4490
  chr11:129149291-129149544
  hyper

SEQ ID NO: 38235 - DNA, 145 bp, Homo sapiens; identical to SEQ ID NO: 4491
  chr11:129149553-129149698
  hyper

SEQ ID NO: 38236 - DNA, 35 bp, Homo sapiens; identical to SEQ ID NO: 4492
  chr11:129149893-129149928
  hyper

SEQ ID NO: 38237 - DNA, 71 bp, Homo sapiens; identical to SEQ ID NO: 4493
  chr11:129765559-129765630
  hyper

SEQ ID NO: 38238 - DNA, 31 bp, Homo sapiens; identical to SEQ ID NO: 4494
  chr11:129765636-129765667
  hyper

SEQ ID NO: 38239 - DNA, 80 bp, Homo sapiens; identical to SEQ ID NO: 4495
  chr11:129765696-129765776
  hyper

SEQ ID NO: 38240 - DNA, 31 bp, Homo sapiens; identical to SEQ ID NO: 4496
  chr11:130064639-130064670
  hyper

SEQ ID NO: 38241 - DNA, 42 bp, Homo sapiens; identical to SEQ ID NO: 4497
  chr11:130066273-130066315
  hyper

SEQ ID NO: 38242 - DNA, 31 bp, Homo sapiens; identical to SEQ ID NO: 4498
  chr11:130083143-130083174
  hyper

SEQ ID NO: 38243 - DNA, 15 bp, Homo sapiens
  chr11:131558102-131558117
  hyper
cgagctggagaacag

SEQ ID NO: 38244 - DNA, 31 bp, Homo sapiens; identical to SEQ ID NO: 4501
  chr11:134201565-134201596
  hyper

SEQ ID NO: 38245 - DNA, 29 bp, Homo sapiens
  chr11:134201762-134201791
  hyper
cggccagccccgcccccgcttgcgcgagg

SEQ ID NO: 38246 - DNA, 73 bp, Homo sapiens; identical to SEQ ID NO: 4503
  chr12:568902-568975
  hyper

SEQ ID NO: 38247 - DNA, 50 bp, Homo sapiens; identical to SEQ ID NO: 4504
  chr12:694939-694989
  hyper

SEQ ID NO: 38248 - DNA, 47 bp, Homo sapiens; identical to SEQ ID NO: 4505
  chr12:695005-695052
  hyper

SEQ ID NO: 38249 - DNA, 31 bp, Homo sapiens; identical to SEQ ID NO: 4506
  chr12:695118-695149
  hyper

SEQ ID NO: 38250 - DNA, 2 bp, Homo sapiens
  chr12:1059278-1059280
  hyper
ag

SEQ ID NO: 38251 - DNA, 17 bp, Homo sapiens
  chr12:1059361-1059378
  hyper
gtcgtcaccggatggcg

SEQ ID NO: 38252 - DNA, 31 bp, Homo sapiens; identical to SEQ ID NO: 4509
  chr12:1714947-1714978
  hyper

SEQ ID NO: 38253 - DNA, 2 bp, Homo sapiens
  chr12:1762160-1762162
  hyper
tg

SEQ ID NO: 38254 - DNA, 94 bp, Homo sapiens; identical to SEQ ID NO: 4512
  chr12:1906341-1906435
  hyper

SEQ ID NO: 38255 - DNA, 96 bp, Homo sapiens; identical to SEQ ID NO: 4513
  chr12:1906476-1906572
  hyper

SEQ ID NO: 38256 - DNA, 68 bp, Homo sapiens; identical to SEQ ID NO: 4514
  chr12:3067871-3067939
  hyper

SEQ ID NO: 38257 - DNA, 185 bp, Homo sapiens; identical to SEQ ID NO: 4515
  chr12:3067944-3068129
  hyper

SEQ ID NO: 38258 - DNA, 53 bp, Homo sapiens; identical to SEQ ID NO: 4516
  chr12:3068384-3068437
  hyper

SEQ ID NO: 38259 - DNA, 36 bp, Homo sapiens; identical to SEQ ID NO: 4517
  chr12:3068769-3068805
  hyper

SEQ ID NO: 38260 - DNA, 41 bp, Homo sapiens; identical to SEQ ID NO: 4518
  chr12:3068911-3068952
  hyper

SEQ ID NO: 38261 - DNA, 93 bp, Homo sapiens; identical to SEQ ID NO: 4519
  chr12:3068955-3069048
  hyper

SEQ ID NO: 38262 - DNA, 233 bp, Homo sapiens; identical to SEQ ID NO: 4520
  chr12:3069124-3069357
  hyper

SEQ ID NO: 38263 - DNA, 60 bp, Homo sapiens; identical to SEQ ID NO: 4521
  chr12:3069388-3069448
  hyper

SEQ ID NO: 38264 - DNA, 31 bp, Homo sapiens; identical to SEQ ID NO: 4522
  chr12:3129486-3129517
  hyper

SEQ ID NO: 38265 - DNA, 75 bp, Homo sapiens; identical to SEQ ID NO: 4523
  chr12:3129530-3129605
  hyper

SEQ ID NO: 38266 - DNA, 65 bp, Homo sapiens; identical to SEQ ID NO: 4524
  chr12:3186011-3186076
  hyper

SEQ ID NO: 38267 - DNA, 31 bp, Homo sapiens; identical to SEQ ID NO: 4525
  chr12:3186086-3186117
  hyper

SEQ ID NO: 38268 - DNA, 40 bp, Homo sapiens; identical to SEQ ID NO: 4526
  chr12:3186500-3186540
  hyper

SEQ ID NO: 38269 - DNA, 268 bp, Homo sapiens; identical to SEQ ID NO: 4527
  chr12:3186576-3186844
  hyper

SEQ ID NO: 38270 - DNA, 71 bp, Homo sapiens; identical to SEQ ID NO: 4528
  chr12:3186910-3186981
  hyper

SEQ ID NO: 38271 - DNA, 31 bp, Homo sapiens; identical to SEQ ID NO: 4529
  chr12:3186998-3187029
  hyper

SEQ ID NO: 38272 - DNA, 31 bp, Homo sapiens; identical to SEQ ID NO: 4531
  chr12:4377793-4377824
  hyper

SEQ ID NO: 38273 - DNA, 40 bp, Homo sapiens
  chr12:4377855-4377895
  hyper
agattctgcatgagcacggatgccacgagggtatccagcg

SEQ ID NO: 38274 - DNA, 211 bp, Homo sapiens; identical to SEQ ID NO: 4539
  chr12:4378560-4378771
  hyper

SEQ ID NO: 38275 - DNA, 2 bp, Homo sapiens
  chr12:4378801-4378803
  hyper
tt

SEQ ID NO: 38276 - DNA, 86 bp, Homo sapiens; identical to SEQ ID NO: 4550
  chr12:4380199-4380285
  hyper

SEQ ID NO: 38277 - DNA, 46 bp, Homo sapiens; identical to SEQ ID NO: 4551
  chr12:4380397-4380443
  hyper

SEQ ID NO: 38278 - DNA, 19 bp, Homo sapiens
  chr12:4380462-4380481
  hyper
ccccgggacgaccacccgc

SEQ ID NO: 38279 - DNA, 16 bp, Homo sapiens
  chr12:4381418-4381434
  hyper
gcacctctagtttatt

SEQ ID NO: 38280 - DNA, 37 bp, Homo sapiens; identical to SEQ ID NO: 4560
  chr12:4382899-4382936
  hyper

SEQ ID NO: 38281 - DNA, 45 bp, Homo sapiens
  chr12:4382999-4383044
  hyper
cgaggctctgctcgcccaccacccaatcctcgcctcccttctgct

SEQ ID NO: 38282 - DNA, 2 bp, Homo sapiens
  chr12:5540931-5540933
  hyper
aa

SEQ ID NO: 38283 - DNA, 31 bp, Homo sapiens; identical to SEQ ID NO: 4570
  chr12:6189830-6189861
  hyper

SEQ ID NO: 38284 - DNA, 132 bp, Homo sapiens; identical to SEQ ID NO: 4571
  chr12:6309397-6309529
  hyper

SEQ ID NO: 38285 - DNA, 95 bp, Homo sapiens; identical to SEQ ID NO: 4572
  chr12:6309534-6309629
  hyper

SEQ ID NO: 38286 - DNA, 31 bp, Homo sapiens; identical to SEQ ID NO: 4573
  chr12:6309653-6309684
  hyper

SEQ ID NO: 38287 - DNA, 31 bp, Homo sapiens; identical to SEQ ID NO: 4574
  chr12:6309693-6309724
  hyper

SEQ ID NO: 38288 - DNA, 310 bp, Homo sapiens; identical to SEQ ID NO: 4575
  chr12:6309725-6310035
  hyper

SEQ ID NO: 38289 - DNA, 31 bp, Homo sapiens; identical to SEQ ID NO: 4576
  chr12:6310054-6310085
  hyper

SEQ ID NO: 38290 - DNA, 77 bp, Homo sapiens; identical to SEQ ID NO: 4577
  chr12:6310144-6310221
  hyper

SEQ ID NO: 38291 - DNA, 42 bp, Homo sapiens; identical to SEQ ID NO: 4578
  chr12:6387949-6387991
  hyper

SEQ ID NO: 38292 - DNA, 64 bp, Homo sapiens; identical to SEQ ID NO: 4579
  chr12:6388070-6388134
  hyper

SEQ ID NO: 38293 - DNA, 35 bp, Homo sapiens; identical to SEQ ID NO: 4580
  chr12:6419603-6419638
  hyper

SEQ ID NO: 38294 - DNA, 42 bp, Homo sapiens; identical to SEQ ID NO: 4581
  chr12:6419741-6419783
  hyper

SEQ ID NO: 38295 - DNA, 24 bp, Homo sapiens
  chr12:6493330-6493354
  hyper
cccacttcctgagctccgccatgg

SEQ ID NO: 38296 - DNA, 31 bp, Homo sapiens; identical to SEQ ID NO: 4583
  chr12:6493590-6493621
  hyper

SEQ ID NO: 38297 - DNA, 78 bp, Homo sapiens; identical to SEQ ID NO: 4588
  chr12:10875353-10875431
  hyper

SEQ ID NO: 38298 - DNA, 245 bp, Homo sapiens; identical to SEQ ID NO: 4589
  chr12:10875432-10875677
  hyper

SEQ ID NO: 38299 - DNA, 35 bp, Homo sapiens; identical to SEQ ID NO: 4590
  chr12:10875678-10875713
  hyper

SEQ ID NO: 38300 - DNA, 69 bp, Homo sapiens; identical to SEQ ID NO: 4591
  chr12:10875714-10875783
  hyper

SEQ ID NO: 38301 - DNA, 153 bp, Homo sapiens; identical to SEQ ID NO: 4592
  chr12:10875800-10875953
  hyper

SEQ ID NO: 38302 - DNA, 45 bp, Homo sapiens; identical to SEQ ID NO: 4593
  chr12:11801642-11801687
  hyper

SEQ ID NO: 38303 - DNA, 26 bp, Homo sapiens
  chr12:12419476-12419502
  hyper
ccccctccccacgaccaggcctctcc

SEQ ID NO: 38304 - DNA, 52 bp, Homo sapiens; identical to SEQ ID NO: 4595
  chr12:12419643-12419695
  hyper

SEQ ID NO: 38305 - DNA, 49 bp, Homo sapiens; identical to SEQ ID NO: 4596
  chr12:12420197-12420246
  hyper

SEQ ID NO: 38306 - DNA, 2 bp, Homo sapiens
  chr12:12848340-12848342
  hyper
gg

SEQ ID NO: 38307 - DNA, 35 bp, Homo sapiens; identical to SEQ ID NO: 4599
  chr12:13069192-13069227
  hyper

SEQ ID NO: 38308 - DNA, 127 bp, Homo sapiens; identical to SEQ ID NO: 4602
  chr12:13153040-13153167
  hyper

SEQ ID NO: 38309 - DNA, 38 bp, Homo sapiens; identical to SEQ ID NO: 4603
  chr12:13153354-13153392
  hyper

SEQ ID NO: 38310 - DNA, 94 bp, Homo sapiens; identical to SEQ ID NO: 4604
  chr12:13154240-13154334
  hyper

SEQ ID NO: 38311 - DNA, 31 bp, Homo sapiens; identical to SEQ ID NO: 4605
  chr12:15941608-15941639
  hyper

SEQ ID NO: 38312 - DNA, 77 bp, Homo sapiens; identical to SEQ ID NO: 4606
  chr12:15941666-15941743
  hyper

SEQ ID NO: 38313 - DNA, 113 bp, Homo sapiens; identical to SEQ ID NO: 4607
  chr12:15941833-15941946
  hyper

SEQ ID NO: 38314 - DNA, 391 bp, Homo sapiens; identical to SEQ ID NO: 4608
  chr12:15941963-15942354
  hyper

SEQ ID NO: 38315 - DNA, 184 bp, Homo sapiens; identical to SEQ ID NO: 4609
  chr12:15942443-15942627
  hyper

SEQ ID NO: 38316 - DNA, 79 bp, Homo sapiens; identical to SEQ ID NO: 4610
  chr12:19282572-19282651
  hyper

SEQ ID NO: 38317 - DNA, 184 bp, Homo sapiens; identical to SEQ ID NO: 4611
  chr12:19282815-19282999
  hyper

SEQ ID NO: 38318 - DNA, 101 bp, Homo sapiens; identical to SEQ ID NO: 4613
  chr12:19283482-19283583
  hyper

SEQ ID NO: 38319 - DNA, 52 bp, Homo sapiens
  chr12:19283783-19283835
  hyper
cgccagccgcacggaggttgcacagactgccaggaggcggtgggcgtgcgag

SEQ ID NO: 38320 - DNA, 31 bp, Homo sapiens; identical to SEQ ID NO: 4615
  chr12:19283883-19283914
  hyper

SEQ ID NO: 38321 - DNA, 31 bp, Homo sapiens; identical to SEQ ID NO: 4616
  chr12:19283942-19283973
  hyper

SEQ ID NO: 38322 - DNA, 31 bp, Homo sapiens; identical to SEQ ID NO: 4617
  chr12:19283992-19284023
  hyper

SEQ ID NO: 38323 - DNA, 2 bp, Homo sapiens
  chr12:25101374-25101376
  hyper
tt

SEQ ID NO: 38324 - DNA, 39 bp, Homo sapiens; identical to SEQ ID NO: 4627
  chr12:25404450-25404489
  hyper

SEQ ID NO: 38325 - DNA, 47 bp, Homo sapiens; identical to SEQ ID NO: 4628
  chr12:25404551-25404598
  hyper

SEQ ID NO: 38326 - DNA, 31 bp, Homo sapiens; identical to SEQ ID NO: 4629
  chr12:26808252-26808283
  hyper

SEQ ID NO: 38327 - DNA, 31 bp, Homo sapiens; identical to SEQ ID NO: 4630
  chr12:27485803-27485834
  hyper

SEQ ID NO: 38328 - DNA, 61 bp, Homo sapiens; identical to SEQ ID NO: 4631
  chr12:33049526-33049587
  hyper

SEQ ID NO: 38329 - DNA, 38 bp, Homo sapiens; identical to SEQ ID NO: 4634
  chr12:33049721-33049759
  hyper

SEQ ID NO: 38330 - DNA, 31 bp, Homo sapiens; identical to SEQ ID NO: 4635
  chr12:33049889-33049920
  hyper

SEQ ID NO: 38331 - DNA, 57 bp, Homo sapiens
  chr12:33049945-33050002
  hyper
cctggagacttgtacccgcccgcggggaggtggggagaggggcgcggttcgcctggg

SEQ ID NO: 38332 - DNA, 31 bp, Homo sapiens; identical to SEQ ID NO: 4639
  chr12:33050265-33050296
  hyper

SEQ ID NO: 38333 - DNA, 31 bp, Homo sapiens; identical to SEQ ID NO: 4640
  chr12:33050304-33050335
  hyper

SEQ ID NO: 38334 - DNA, 50 bp, Homo sapiens; identical to SEQ ID NO: 4641
  chr12:40618248-40618298
  hyper

SEQ ID NO: 38335 - DNA, 31 bp, Homo sapiens; identical to SEQ ID NO: 4642
  chr12:47500470-47500501
  hyper

SEQ ID NO: 38336 - DNA, 19 bp, Homo sapiens
  chr12:48206705-48206724
  hyper
gtcacacctccttcagcgc

SEQ ID NO: 38337 - DNA, 31 bp, Homo sapiens; identical to SEQ ID NO: 4644
  chr12:48395456-48395487
  hyper

SEQ ID NO: 38338 - DNA, 80 bp, Homo sapiens; identical to SEQ ID NO: 4647
  chr12:48576996-48577076
  hyper

SEQ ID NO: 38339 - DNA, 72 bp, Homo sapiens; identical to SEQ ID NO: 4648
  chr12:48577359-48577431
  hyper

SEQ ID NO: 38340 - DNA, 36 bp, Homo sapiens
  chr12:48577434-48577470
  hyper
tgctgctgccacactcgcgggcgctgcccggtaatg

SEQ ID NO: 38341 - DNA, 70 bp, Homo sapiens; identical to SEQ ID NO: 4650
  chr12:49182446-49182516
  hyper

SEQ ID NO: 38342 - DNA, 54 bp, Homo sapiens; identical to SEQ ID NO: 4651
  chr12:49182531-49182585
  hyper

SEQ ID NO: 38343 - DNA, 56 bp, Homo sapiens; identical to SEQ ID NO: 4652
  chr12:49182603-49182659
  hyper

SEQ ID NO: 38344 - DNA, 94 bp, Homo sapiens; identical to SEQ ID NO: 4653
  chr12:49182688-49182782
  hyper

SEQ ID NO: 38345 - DNA, 51 bp, Homo sapiens; identical to SEQ ID NO: 4654
  chr12:49183195-49183246
  hyper

SEQ ID NO: 38346 - DNA, 31 bp, Homo sapiens; identical to SEQ ID NO: 4655
  chr12:49183299-49183330
  hyper

SEQ ID NO: 38347 - DNA, 59 bp, Homo sapiens; identical to SEQ ID NO: 4656
  chr12:49297957-49298016
  hyper

SEQ ID NO: 38348 - DNA, 60 bp, Homo sapiens; identical to SEQ ID NO: 4657
  chr12:49351295-49351355
  hyper

SEQ ID NO: 38349 - DNA, 95 bp, Homo sapiens; identical to SEQ ID NO: 4658
  chr12:49371750-49371845
  hyper

SEQ ID NO: 38350 - DNA, 103 bp, Homo sapiens; identical to SEQ ID NO: 4663
  chr12:49736496-49736599
  hyper

SEQ ID NO: 38351 - DNA, 49 bp, Homo sapiens; identical to SEQ ID NO: 4664
  chr12:49761540-49761589
  hyper

SEQ ID NO: 38352 - DNA, 31 bp, Homo sapiens; identical to SEQ ID NO: 4665
  chr12:49761771-49761802
  hyper

SEQ ID NO: 38353 - DNA, 31 bp, Homo sapiens; identical to SEQ ID NO: 4666
  chr12:49761811-49761842
  hyper

SEQ ID NO: 38354 - DNA, 31 bp, Homo sapiens; identical to SEQ ID NO: 4667
  chr12:50202841-50202872
  hyper

SEQ ID NO: 38355 - DNA, 61 bp, Homo sapiens; identical to SEQ ID NO: 4668
  chr12:50202885-50202946
  hyper

SEQ ID NO: 38356 - DNA, 39 bp, Homo sapiens; identical to SEQ ID NO: 4671
  chr12:50339387-50339426
  hyper

SEQ ID NO: 38357 - DNA, 173 bp, Homo sapiens; identical to SEQ ID NO: 4672
  chr12:50339448-50339621
  hyper

SEQ ID NO: 38358 - DNA, 31 bp, Homo sapiens; identical to SEQ ID NO: 4673
  chr12:50677033-50677064
  hyper

SEQ ID NO: 38359 - DNA, 43 bp, Homo sapiens; identical to SEQ ID NO: 4674
  chr12:50677370-50677413
  hyper

SEQ ID NO: 38360 - DNA, 38 bp, Homo sapiens; identical to SEQ ID NO: 4675
  chr12:52345763-52345801
  hyper

SEQ ID NO: 38361 - DNA, 31 bp, Homo sapiens; identical to SEQ ID NO: 4676
  chr12:53272442-53272473
  hyper

SEQ ID NO: 38362 - DNA, 156 bp, Homo sapiens; identical to SEQ ID NO: 4677
  chr12:53342669-53342825
  hyper

SEQ ID NO: 38363 - DNA, 67 bp, Homo sapiens; identical to SEQ ID NO: 4678
  chr12:53607266-53607333
  hyper

SEQ ID NO: 38364 - DNA, 31 bp, Homo sapiens; identical to SEQ ID NO: 4679
  chr12:54120887-54120918
  hyper

SEQ ID NO: 38365 - DNA, 31 bp, Homo sapiens; identical to SEQ ID NO: 4680
  chr12:54132551-54132582
  hyper

SEQ ID NO: 38366 - DNA, 31 bp, Homo sapiens; identical to SEQ ID NO: 4681
  chr12:54150999-54151030
  hyper

SEQ ID NO: 38367 - DNA, 31 bp, Homo sapiens; identical to SEQ ID NO: 4682
  chr12:54338495-54338526
  hyper

SEQ ID NO: 38368 - DNA, 73 bp, Homo sapiens; identical to SEQ ID NO: 4683
  chr12:54338528-54338601
  hyper

SEQ ID NO: 38369 - DNA, 31 bp, Homo sapiens; identical to SEQ ID NO: 4689
  chr12:54446878-54446909
  hyper

SEQ ID NO: 38370 - DNA, 31 bp, Homo sapiens; identical to SEQ ID NO: 4690
  chr12:54446927-54446958
  hyper

SEQ ID NO: 38371 - DNA, 31 bp, Homo sapiens; identical to SEQ ID NO: 4691
  chr12:54446959-54446990
  hyper

SEQ ID NO: 38372 - DNA, 31 bp, Homo sapiens; identical to SEQ ID NO: 4693
  chr12:56121857-56121888
  hyper

SEQ ID NO: 38373 - DNA, 42 bp, Homo sapiens; identical to SEQ ID NO: 4694
  chr12:56390555-56390597
  hyper

SEQ ID NO: 38374 - DNA, 31 bp, Homo sapiens; identical to SEQ ID NO: 4695
  chr12:56390676-56390707
  hyper

SEQ ID NO: 38375 - DNA, 31 bp, Homo sapiens; identical to SEQ ID NO: 4696
  chr12:56472731-56472762
  hyper

SEQ ID NO: 38376 - DNA, 43 bp, Homo sapiens; identical to SEQ ID NO: 4697
  chr12:56472776-56472819
  hyper

SEQ ID NO: 38377 - DNA, 40 bp, Homo sapiens; identical to SEQ ID NO: 4698
  chr12:56521402-56521442
  hyper

SEQ ID NO: 38378 - DNA, 35 bp, Homo sapiens; identical to SEQ ID NO: 4699
  chr12:56521445-56521480
  hyper

SEQ ID NO: 38379 - DNA, 31 bp, Homo sapiens; identical to SEQ ID NO: 4700
  chr12:56958137-56958168
  hyper

SEQ ID NO: 38380 - DNA, 31 bp, Homo sapiens; identical to SEQ ID NO: 4701
  chr12:57521846-57521877
  hyper

SEQ ID NO: 38381 - DNA, 31 bp, Homo sapiens; identical to SEQ ID NO: 4702
  chr12:57619210-57619241
  hyper

SEQ ID NO: 38382 - DNA, 31 bp, Homo sapiens; identical to SEQ ID NO: 4703
  chr12:57998765-57998796
  hyper

SEQ ID NO: 38383 - DNA, 90 bp, Homo sapiens; identical to SEQ ID NO: 4704
  chr12:58166514-58166604
  hyper

SEQ ID NO: 38384 - DNA, 191 bp, Homo sapiens; identical to SEQ ID NO: 4705
  chr12:58166618-58166809
  hyper

SEQ ID NO: 38385 - DNA, 31 bp, Homo sapiens; identical to SEQ ID NO: 4706
  chr12:59313599-59313630
  hyper

SEQ ID NO: 38386 - DNA, 42 bp, Homo sapiens; identical to SEQ ID NO: 4707
  chr12:59314238-59314280
  hyper

SEQ ID NO: 38387 - DNA, 158 bp, Homo sapiens; identical to SEQ ID NO: 4708
  chr12:64237614-64237772
  hyper

SEQ ID NO: 38388 - DNA, 52 bp, Homo sapiens; identical to SEQ ID NO: 4709
  chr12:64237892-64237944
  hyper

SEQ ID NO: 38389 - DNA, 111 bp, Homo sapiens; identical to SEQ ID NO: 4710
  chr12:64238194-64238305
  hyper

SEQ ID NO: 38390 - DNA, 31 bp, Homo sapiens; identical to SEQ ID NO: 4711
  chr12:64799098-64799129
  hyper

SEQ ID NO: 38391 - DNA, 79 bp, Homo sapiens; identical to SEQ ID NO: 4712
  chr12:64799131-64799210
  hyper

SEQ ID NO: 38392 - DNA, 31 bp, Homo sapiens; identical to SEQ ID NO: 4713
  chr12:64845174-64845205
  hyper

SEQ ID NO: 38393 - DNA, 52 bp, Homo sapiens; identical to SEQ ID NO: 4714
  chr12:64845222-64845274
  hyper

SEQ ID NO: 38394 - DNA, 50 bp, Homo sapiens; identical to SEQ ID NO: 4715
  chr12:64845320-64845370
  hyper

SEQ ID NO: 38395 - DNA, 36 bp, Homo sapiens; identical to SEQ ID NO: 4716
  chr12:64845434-64845470
  hyper

SEQ ID NO: 38396 - DNA, 63 bp, Homo sapiens; identical to SEQ ID NO: 4717
  chr12:64845507-64845570
  hyper

SEQ ID NO: 38397 - DNA, 72 bp, Homo sapiens; identical to SEQ ID NO: 4718
  chr12:65174375-65174447
  hyper

SEQ ID NO: 38398 - DNA, 2 bp, Homo sapiens
  chr12:65220111-65220113
  hyper
ac

SEQ ID NO: 38399 - DNA, 62 bp, Homo sapiens; identical to SEQ ID NO: 4722
  chr12:66217796-66217858
  hyper

SEQ ID NO: 38400 - DNA, 31 bp, Homo sapiens; identical to SEQ ID NO: 4723
  chr12:66218712-66218743
  hyper

SEQ ID NO: 38401 - DNA, 24 bp, Homo sapiens
  chr12:66219327-66219351
  hyper
gccccggggcgccagcaaccctcc

SEQ ID NO: 38402 - DNA, 40 bp, Homo sapiens; identical to SEQ ID NO: 4725
  chr12:69241506-69241546
  hyper

SEQ ID NO: 38403 - DNA, 31 bp, Homo sapiens; identical to SEQ ID NO: 4728
  chr12:71834658-71834689
  hyper

SEQ ID NO: 38404 - DNA, 31 bp, Homo sapiens; identical to SEQ ID NO: 4729
  chr12:72234434-72234465
  hyper

SEQ ID NO: 38405 - DNA, 11 bp, Homo sapiens
  chr12:75728067-75728078
  hyper
aataaaaatct

SEQ ID NO: 38406 - DNA, 43 bp, Homo sapiens; identical to SEQ ID NO: 4735
  chr12:77272815-77272858
  hyper

SEQ ID NO: 38407 - DNA, 62 bp, Homo sapiens; identical to SEQ ID NO: 4736
  chr12:77718708-77718770
  hyper

SEQ ID NO: 38408 - DNA, 31 bp, Homo sapiens; identical to SEQ ID NO: 4737
  chr12:80083437-80083468
  hyper

SEQ ID NO: 38409 - DNA, 78 bp, Homo sapiens; identical to SEQ ID NO: 4738
  chr12:80084656-80084734
  hyper

SEQ ID NO: 38410 - DNA, 72 bp, Homo sapiens; identical to SEQ ID NO: 4739
  chr12:80084905-80084977
  hyper

SEQ ID NO: 38411 - DNA, 109 bp, Homo sapiens; identical to SEQ ID NO: 4740
  chr12:80084980-80085089
  hyper

SEQ ID NO: 38412 - DNA, 20 bp, Homo sapiens
  chr12:81471436-81471456
  hyper
tcctgcaggtcagaggcgat

SEQ ID NO: 38413 - DNA, 38 bp, Homo sapiens; identical to SEQ ID NO: 4743
  chr12:83080990-83081028
  hyper

SEQ ID NO: 38414 - DNA, 192 bp, Homo sapiens; identical to SEQ ID NO: 4744
  chr12:83081030-83081222
  hyper

SEQ ID NO: 38415 - DNA, 50 bp, Homo sapiens; identical to SEQ ID NO: 4746
  chr12:88973444-88973494
  hyper

SEQ ID NO: 38416 - DNA, 28 bp, Homo sapiens
  chr12:88973582-88973610
  hyper
ccggcgcccacctcggggctacacaaat

SEQ ID NO: 38417 - DNA, 31 bp, Homo sapiens; identical to SEQ ID NO: 4748
  chr12:88973625-88973656
  hyper

SEQ ID NO: 38418 - DNA, 67 bp, Homo sapiens; identical to SEQ ID NO: 4749
  chr12:88973660-88973727
  hyper

SEQ ID NO: 38419 - DNA, 47 bp, Homo sapiens; identical to SEQ ID NO: 4750
  chr12:88973744-88973791
  hyper

SEQ ID NO: 38420 - DNA, 69 bp, Homo sapiens; identical to SEQ ID NO: 4751
  chr12:88973850-88973919
  hyper

SEQ ID NO: 38421 - DNA, 31 bp, Homo sapiens; identical to SEQ ID NO: 4753
  chr12:88974697-88974728
  hyper

SEQ ID NO: 38422 - DNA, 31 bp, Homo sapiens; identical to SEQ ID NO: 4754
  chr12:89747141-89747172
  hyper

SEQ ID NO: 38423 - DNA, 31 bp, Homo sapiens; identical to SEQ ID NO: 4755
  chr12:89747207-89747238
  hyper

SEQ ID NO: 38424 - DNA, 34 bp, Homo sapiens; identical to SEQ ID NO: 4756
  chr12:89747338-89747372
  hyper

SEQ ID NO: 38425 - DNA, 66 bp, Homo sapiens; identical to SEQ ID NO: 4757
  chr12:89747400-89747466
  hyper

SEQ ID NO: 38426 - DNA, 42 bp, Homo sapiens; identical to SEQ ID NO: 4758
  chr12:89747549-89747591
  hyper

SEQ ID NO: 38427 - DNA, 56 bp, Homo sapiens; identical to SEQ ID NO: 4759
  chr12:90101464-90101520
  hyper

SEQ ID NO: 38428 - DNA, 31 bp, Homo sapiens; identical to SEQ ID NO: 4760
  chr12:91503092-91503123
  hyper

SEQ ID NO: 38429 - DNA, 2 bp, Homo sapiens
  chr12:94541896-94541898
  hyper
ct

SEQ ID NO: 38430 - DNA, 169 bp, Homo sapiens; identical to SEQ ID NO: 4762
  chr12:94542775-94542944
  hyper

SEQ ID NO: 38431 - DNA, 103 bp, Homo sapiens; identical to SEQ ID NO: 4763
  chr12:94542961-94543064
  hyper

SEQ ID NO: 38432 - DNA, 21 bp, Homo sapiens
  chr12:94543068-94543089
  hyper
ctgctgctgccctaccgcgag

SEQ ID NO: 38433 - DNA, 21 bp, Homo sapiens
  chr12:94543992-94544013
  hyper
ggagcacggcctgaggtcccc

SEQ ID NO: 38434 - DNA, 2 bp, Homo sapiens
  chr12:96883068-96883070
  hyper
tg

SEQ ID NO: 38435 - DNA, 31 bp, Homo sapiens; identical to SEQ ID NO: 4772
  chr12:100967340-100967371
  hyper

SEQ ID NO: 38436 - DNA, 69 bp, Homo sapiens; identical to SEQ ID NO: 4773
  chr12:100967379-100967448
  hyper

SEQ ID NO: 38437 - DNA, 61 bp, Homo sapiens; identical to SEQ ID NO: 4774
  chr12:100967582-100967643
  hyper

SEQ ID NO: 38438 - DNA, 151 bp, Homo sapiens; identical to SEQ ID NO: 4775
  chr12:100967799-100967950
  hyper

SEQ ID NO: 38439 - DNA, 31 bp, Homo sapiens; identical to SEQ ID NO: 4776
  chr12:100967961-100967992
  hyper

SEQ ID NO: 38440 - DNA, 31 bp, Homo sapiens; identical to SEQ ID NO: 4777
  chr12:104322902-104322933
  hyper

SEQ ID NO: 38441 - DNA, 2 bp, Homo sapiens
  chr12:104322965-104322967
  hyper
tg

SEQ ID NO: 38442 - DNA, 35 bp, Homo sapiens
  chr12:104323141-104323176
  hyper
ggtcgggaaggtcccaaccacgttcttctgtaaac

SEQ ID NO: 38443 - DNA, 173 bp, Homo sapiens; identical to SEQ ID NO: 4781
  chr12:104323184-104323357
  hyper

SEQ ID NO: 38444 - DNA, 31 bp, Homo sapiens; identical to SEQ ID NO: 4782
  chr12:104359126-104359157
  hyper

SEQ ID NO: 38445 - DNA, 31 bp, Homo sapiens; identical to SEQ ID NO: 4785
  chr12:104850202-104850233
  hyper

SEQ ID NO: 38446 - DNA, 8 bp, Homo sapiens
  chr12:104850237-104850245
  hyper
tcctttga

SEQ ID NO: 38447 - DNA, 27 bp, Homo sapiens
  chr12:104851545-104851572
  hyper
gaccaggaggggcggtagttttttttt

SEQ ID NO: 38448 - DNA, 200 bp, Homo sapiens
  chr12:104851694-104851894
  hyper
ccctccctgctgctgccgaggtcggaggatgaaagagttacccggagccggctgctctgcgcccgggcgagccgcctcttcctggttgccgggccgggggcgaagggtgtacgccccggcgaggttgcgagtccctgcagcaggctgggagcccgggactgggctcccacgtgtcccgggctccgcgcagagctgagcag

SEQ ID NO: 38449 - DNA, 31 bp, Homo sapiens; identical to SEQ ID NO: 4802
  chr12:105110247-105110278
  hyper

SEQ ID NO: 38450 - DNA, 31 bp, Homo sapiens; identical to SEQ ID NO: 4803
  chr12:106532782-106532813
  hyper

SEQ ID NO: 38451 - DNA, 31 bp, Homo sapiens; identical to SEQ ID NO: 4804
  chr12:106533275-106533306
  hyper

SEQ ID NO: 38452 - DNA, 22 bp, Homo sapiens
  chr12:106533358-106533380
  hyper
actcacggaccttgcccgcccg

SEQ ID NO: 38453 - DNA, 181 bp, Homo sapiens; identical to SEQ ID NO: 4806
  chr12:106640991-106641172
  hyper

SEQ ID NO: 38454 - DNA, 59 bp, Homo sapiens; identical to SEQ ID NO: 4807
  chr12:106641197-106641256
  hyper

SEQ ID NO: 38455 - DNA, 55 bp, Homo sapiens; identical to SEQ ID NO: 4808
  chr12:106641514-106641569
  hyper

SEQ ID NO: 38456 - DNA, 44 bp, Homo sapiens; identical to SEQ ID NO: 4809
  chr12:107167935-107167979
  hyper

SEQ ID NO: 38457 - DNA, 59 bp, Homo sapiens; identical to SEQ ID NO: 4810
  chr12:107167981-107168040
  hyper

SEQ ID NO: 38458 - DNA, 190 bp, Homo sapiens; identical to SEQ ID NO: 4811
  chr12:107168227-107168417
  hyper

SEQ ID NO: 38459 - DNA, 126 bp, Homo sapiens; identical to SEQ ID NO: 4812
  chr12:107168560-107168686
  hyper

SEQ ID NO: 38460 - DNA, 92 bp, Homo sapiens; identical to SEQ ID NO: 4813
  chr12:107168829-107168921
  hyper

SEQ ID NO: 38461 - DNA, 45 bp, Homo sapiens; identical to SEQ ID NO: 4814
  chr12:107486363-107486408
  hyper

SEQ ID NO: 38462 - DNA, 139 bp, Homo sapiens; identical to SEQ ID NO: 4815
  chr12:107486793-107486932
  hyper

SEQ ID NO: 38463 - DNA, 90 bp, Homo sapiens; identical to SEQ ID NO: 4816
  chr12:107486933-107487023
  hyper

SEQ ID NO: 38464 - DNA, 63 bp, Homo sapiens; identical to SEQ ID NO: 4817
  chr12:107487048-107487111
  hyper

SEQ ID NO: 38465 - DNA, 33 bp, Homo sapiens
  chr12:107487855-107487888
  hyper
gccagtggtggagtcgggcggagagtgagggga

SEQ ID NO: 38466 - DNA, 31 bp, Homo sapiens; identical to SEQ ID NO: 4821
  chr12:107488196-107488227
  hyper

SEQ ID NO: 38467 - DNA, 31 bp, Homo sapiens; identical to SEQ ID NO: 4822
  chr12:107711907-107711938
  hyper

SEQ ID NO: 38468 - DNA, 31 bp, Homo sapiens; identical to SEQ ID NO: 4823
  chr12:108306543-108306574
  hyper

SEQ ID NO: 38469 - DNA, 131 bp, Homo sapiens; identical to SEQ ID NO: 4824
  chr12:111844274-111844405
  hyper

SEQ ID NO: 38470 - DNA, 31 bp, Homo sapiens; identical to SEQ ID NO: 4825
  chr12:111844407-111844438
  hyper

SEQ ID NO: 38471 - DNA, 93 bp, Homo sapiens; identical to SEQ ID NO: 4826
  chr12:111844495-111844588
  hyper

SEQ ID NO: 38472 - DNA, 12 bp, Homo sapiens
  chr12:111844599-111844611
  hyper
ccagttcctgca

SEQ ID NO: 38473 - DNA, 42 bp, Homo sapiens; identical to SEQ ID NO: 4828
  chr12:111844727-111844769
  hyper

SEQ ID NO: 38474 - DNA, 39 bp, Homo sapiens; identical to SEQ ID NO: 4829
  chr12:112689850-112689889
  hyper

SEQ ID NO: 38475 - DNA, 204 bp, Homo sapiens; identical to SEQ ID NO: 4834
  chr12:113796496-113796700
  hyper

SEQ ID NO: 38476 - DNA, 159 bp, Homo sapiens; identical to SEQ ID NO: 4835
  chr12:113796701-113796860
  hyper

SEQ ID NO: 38477 - DNA, 31 bp, Homo sapiens; identical to SEQ ID NO: 4836
  chr12:113796863-113796894
  hyper

SEQ ID NO: 38478 - DNA, 68 bp, Homo sapiens; identical to SEQ ID NO: 4837
  chr12:120525284-120525352
  hyper

SEQ ID NO: 38479 - DNA, 36 bp, Homo sapiens; identical to SEQ ID NO: 4838
  chr12:122214227-122214263
  hyper

SEQ ID NO: 38480 - DNA, 77 bp, Homo sapiens; identical to SEQ ID NO: 4839
  chr12:122231545-122231622
  hyper

SEQ ID NO: 38481 - DNA, 34 bp, Homo sapiens; identical to SEQ ID NO: 4840
  chr12:122237446-122237480
  hyper

SEQ ID NO: 38482 - DNA, 31 bp, Homo sapiens; identical to SEQ ID NO: 4841
  chr12:122237491-122237522
  hyper

SEQ ID NO: 38483 - DNA, 47 bp, Homo sapiens; identical to SEQ ID NO: 4842
  chr12:122459558-122459605
  hyper

SEQ ID NO: 38484 - DNA, 198 bp, Homo sapiens; identical to SEQ ID NO: 4843
  chr12:122459881-122460079
  hyper

SEQ ID NO: 38485 - DNA, 31 bp, Homo sapiens; identical to SEQ ID NO: 4844
  chr12:122461112-122461143
  hyper

SEQ ID NO: 38486 - DNA, 31 bp, Homo sapiens; identical to SEQ ID NO: 4845
  chr12:122461164-122461195
  hyper

SEQ ID NO: 38487 - DNA, 102 bp, Homo sapiens; identical to SEQ ID NO: 4846
  chr12:122461278-122461380
  hyper

SEQ ID NO: 38488 - DNA, 31 bp, Homo sapiens; identical to SEQ ID NO: 4847
  chr12:122478893-122478924
  hyper

SEQ ID NO: 38489 - DNA, 107 bp, Homo sapiens; identical to SEQ ID NO: 4848
  chr12:123380318-123380425
  hyper

SEQ ID NO: 38490 - DNA, 138 bp, Homo sapiens; identical to SEQ ID NO: 4849
  chr12:123380520-123380658
  hyper

SEQ ID NO: 38491 - DNA, 85 bp, Homo sapiens; identical to SEQ ID NO: 4850
  chr12:123380735-123380820
  hyper

SEQ ID NO: 38492 - DNA, 31 bp, Homo sapiens; identical to SEQ ID NO: 4851
  chr12:123414419-123414450
  hyper

SEQ ID NO: 38493 - DNA, 31 bp, Homo sapiens; identical to SEQ ID NO: 4852
  chr12:123497425-123497456
  hyper

SEQ ID NO: 38494 - DNA, 31 bp, Homo sapiens; identical to SEQ ID NO: 4853
  chr12:123754991-123755022
  hyper

SEQ ID NO: 38495 - DNA, 31 bp, Homo sapiens; identical to SEQ ID NO: 4854
  chr12:123755172-123755203
  hyper

SEQ ID NO: 38496 - DNA, 31 bp, Homo sapiens; identical to SEQ ID NO: 4857
  chr12:123920746-123920777
  hyper

SEQ ID NO: 38497 - DNA, 31 bp, Homo sapiens; identical to SEQ ID NO: 4858
  chr12:124156317-124156348
  hyper

SEQ ID NO: 38498 - DNA, 60 bp, Homo sapiens; identical to SEQ ID NO: 4859
  chr12:124779621-124779681
  hyper

SEQ ID NO: 38499 - DNA, 63 bp, Homo sapiens; identical to SEQ ID NO: 4860
  chr12:124779760-124779823
  hyper

SEQ ID NO: 38500 - DNA, 31 bp, Homo sapiens; identical to SEQ ID NO: 4861
  chr12:124790623-124790654
  hyper

SEQ ID NO: 38501 - DNA, 31 bp, Homo sapiens; identical to SEQ ID NO: 4862
  chr12:124870576-124870607
  hyper

SEQ ID NO: 38502 - DNA, 31 bp, Homo sapiens; identical to SEQ ID NO: 4863
  chr12:128024229-128024260
  hyper

SEQ ID NO: 38503 - DNA, 31 bp, Homo sapiens; identical to SEQ ID NO: 4864
  chr12:130709678-130709709
  hyper

SEQ ID NO: 38504 - DNA, 38 bp, Homo sapiens; identical to SEQ ID NO: 4865
  chr12:132380561-132380599
  hyper

SEQ ID NO: 38505 - DNA, 38 bp, Homo sapiens; identical to SEQ ID NO: 4866
  chr12:132380827-132380865
  hyper

SEQ ID NO: 38506 - DNA, 51 bp, Homo sapiens; identical to SEQ ID NO: 4867
  chr12:132480345-132480396
  hyper

SEQ ID NO: 38507 - DNA, 31 bp, Homo sapiens; identical to SEQ ID NO: 4868
  chr12:132982486-132982517
  hyper

SEQ ID NO: 38508 - DNA, 37 bp, Homo sapiens; identical to SEQ ID NO: 4869
  chr12:133136492-133136529
  hyper

SEQ ID NO: 38509 - DNA, 103 bp, Homo sapiens; identical to SEQ ID NO: 4870
  chr12:133706913-133707016
  hyper

SEQ ID NO: 38510 - DNA, 31 bp, Homo sapiens; identical to SEQ ID NO: 4872
  chr13:20766418-20766449
  hyper

SEQ ID NO: 38511 - DNA, 45 bp, Homo sapiens; identical to SEQ ID NO: 4873
  chr13:20766587-20766632
  hyper

SEQ ID NO: 38512 - DNA, 87 bp, Homo sapiens; identical to SEQ ID NO: 4874
  chr13:20766767-20766854
  hyper

SEQ ID NO: 38513 - DNA, 108 bp, Homo sapiens; identical to SEQ ID NO: 4875
  chr13:20767134-20767242
  hyper

SEQ ID NO: 38514 - DNA, 179 bp, Homo sapiens; identical to SEQ ID NO: 4876
  chr13:21099486-21099665
  hyper

SEQ ID NO: 38515 - DNA, 57 bp, Homo sapiens; identical to SEQ ID NO: 4877
  chr13:21099698-21099755
  hyper

SEQ ID NO: 38516 - DNA, 31 bp, Homo sapiens; identical to SEQ ID NO: 4878
  chr13:21099808-21099839
  hyper

SEQ ID NO: 38517 - DNA, 36 bp, Homo sapiens; identical to SEQ ID NO: 4879
  chr13:21099858-21099894
  hyper

SEQ ID NO: 38518 - DNA, 53 bp, Homo sapiens; identical to SEQ ID NO: 4880
  chr13:21099936-21099989
  hyper

SEQ ID NO: 38519 - DNA, 70 bp, Homo sapiens; identical to SEQ ID NO: 4881
  chr13:21635121-21635191
  hyper

SEQ ID NO: 38520 - DNA, 268 bp, Homo sapiens; identical to SEQ ID NO: 4882
  chr13:21635206-21635474
  hyper

SEQ ID NO: 38521 - DNA, 84 bp, Homo sapiens; identical to SEQ ID NO: 4883
  chr13:21635478-21635562
  hyper

SEQ ID NO: 38522 - DNA, 184 bp, Homo sapiens; identical to SEQ ID NO: 4884
  chr13:21635571-21635755
  hyper

SEQ ID NO: 38523 - DNA, 143 bp, Homo sapiens; identical to SEQ ID NO: 4885
  chr13:21635777-21635920
  hyper

SEQ ID NO: 38524 - DNA, 31 bp, Homo sapiens; identical to SEQ ID NO: 4886
  chr13:21635942-21635973
  hyper

SEQ ID NO: 38525 - DNA, 31 bp, Homo sapiens; identical to SEQ ID NO: 4887
  chr13:21635974-21636005
  hyper

SEQ ID NO: 38526 - DNA, 187 bp, Homo sapiens; identical to SEQ ID NO: 4888
  chr13:22245212-22245399
  hyper

SEQ ID NO: 38527 - DNA, 97 bp, Homo sapiens; identical to SEQ ID NO: 4889
  chr13:22247844-22247941
  hyper

SEQ ID NO: 38528 - DNA, 370 bp, Homo sapiens; identical to SEQ ID NO: 4891
  chr13:24734819-24735189
  hyper

SEQ ID NO: 38529 - DNA, 353 bp, Homo sapiens; identical to SEQ ID NO: 4892
  chr13:24735198-24735551
  hyper

SEQ ID NO: 38530 - DNA, 103 bp, Homo sapiens; identical to SEQ ID NO: 4893
  chr13:24735565-24735668
  hyper

SEQ ID NO: 38531 - DNA, 38 bp, Homo sapiens; identical to SEQ ID NO: 4894
  chr13:27744843-27744881
  hyper

SEQ ID NO: 38532 - DNA, 31 bp, Homo sapiens; identical to SEQ ID NO: 4895
  chr13:27744945-27744976
  hyper

SEQ ID NO: 38533 - DNA, 43 bp, Homo sapiens; identical to SEQ ID NO: 4900
  chr13:30982668-30982711
  hyper

SEQ ID NO: 38534 - DNA, 31 bp, Homo sapiens; identical to SEQ ID NO: 4901
  chr13:33000976-33001007
  hyper

SEQ ID NO: 38535 - DNA, 43 bp, Homo sapiens
  chr13:33001026-33001069
  hyper
gaggggcatatactggcggggtgggatagctgcccggtcttaa

SEQ ID NO: 38536 - DNA, 138 bp, Homo sapiens; identical to SEQ ID NO: 4904
  chr13:33001234-33001372
  hyper

SEQ ID NO: 38537 - DNA, 31 bp, Homo sapiens; identical to SEQ ID NO: 4905
  chr13:33162267-33162298
  hyper

SEQ ID NO: 38538 - DNA, 34 bp, Homo sapiens; identical to SEQ ID NO: 4906
  chr13:39612008-39612042
  hyper

SEQ ID NO: 38539 - DNA, 67 bp, Homo sapiens; identical to SEQ ID NO: 4907
  chr13:41364042-41364109
  hyper

SEQ ID NO: 38540 - DNA, 51 bp, Homo sapiens; identical to SEQ ID NO: 4908
  chr13:41364149-41364200
  hyper

SEQ ID NO: 38541 - DNA, 84 bp, Homo sapiens; identical to SEQ ID NO: 4909
  chr13:42615144-42615228
  hyper

SEQ ID NO: 38542 - DNA, 57 bp, Homo sapiens; identical to SEQ ID NO: 4910
  chr13:42615948-42616005
  hyper

SEQ ID NO: 38543 - DNA, 189 bp, Homo sapiens; identical to SEQ ID NO: 4911
  chr13:42621977-42622166
  hyper

SEQ ID NO: 38544 - DNA, 48 bp, Homo sapiens; identical to SEQ ID NO: 4912
  chr13:42622257-42622305
  hyper

SEQ ID NO: 38545 - DNA, 31 bp, Homo sapiens; identical to SEQ ID NO: 4913
  chr13:42622367-42622398
  hyper

SEQ ID NO: 38546 - DNA, 34 bp, Homo sapiens; identical to SEQ ID NO: 4914
  chr13:42622424-42622458
  hyper

SEQ ID NO: 38547 - DNA, 67 bp, Homo sapiens; identical to SEQ ID NO: 4915
  chr13:42622649-42622716
  hyper

SEQ ID NO: 38548 - DNA, 4 bp, Homo sapiens
  chr13:43566647-43566651
  hyper
gtga

SEQ ID NO: 38549 - DNA, 31 bp, Homo sapiens; identical to SEQ ID NO: 4921
  chr13:44544528-44544559
  hyper

SEQ ID NO: 38550 - DNA, 31 bp, Homo sapiens; identical to SEQ ID NO: 4922
  chr13:44991618-44991649
  hyper

SEQ ID NO: 38551 - DNA, 31 bp, Homo sapiens; identical to SEQ ID NO: 4923
  chr13:44991670-44991701
  hyper

SEQ ID NO: 38552 - DNA, 31 bp, Homo sapiens; identical to SEQ ID NO: 4924
  chr13:44991733-44991764
  hyper

SEQ ID NO: 38553 - DNA, 38 bp, Homo sapiens; identical to SEQ ID NO: 4925
  chr13:44991786-44991824
  hyper

SEQ ID NO: 38554 - DNA, 31 bp, Homo sapiens; identical to SEQ ID NO: 4926
  chr13:45009498-45009529
  hyper

SEQ ID NO: 38555 - DNA, 31 bp, Homo sapiens; identical to SEQ ID NO: 4927
  chr13:45009532-45009563
  hyper

SEQ ID NO: 38556 - DNA, 58 bp, Homo sapiens; identical to SEQ ID NO: 4928
  chr13:45009737-45009795
  hyper

SEQ ID NO: 38557 - DNA, 31 bp, Homo sapiens; identical to SEQ ID NO: 4936
  chr13:51086771-51086802
  hyper

SEQ ID NO: 38558 - DNA, 2 bp, Homo sapiens
  chr13:51086818-51086820
  hyper
ct

SEQ ID NO: 38559 - DNA, 31 bp, Homo sapiens; identical to SEQ ID NO: 4939
  chr13:52702935-52702966
  hyper

SEQ ID NO: 38560 - DNA, 31 bp, Homo sapiens; identical to SEQ ID NO: 4940
  chr13:52703086-52703117
  hyper

SEQ ID NO: 38561 - DNA, 31 bp, Homo sapiens; identical to SEQ ID NO: 4942
  chr13:72440914-72440945
  hyper

SEQ ID NO: 38562 - DNA, 2 bp, Homo sapiens
  chr13:74707260-74707262
  hyper
ca

SEQ ID NO: 38563 - DNA, 23 bp, Homo sapiens
  chr13:74707414-74707437
  hyper
accccgctcgaggccggggggcc

SEQ ID NO: 38564 - DNA, 2 bp, Homo sapiens
  chr13:74707624-74707626
  hyper
cc

SEQ ID NO: 38565 - DNA, 44 bp, Homo sapiens
  chr13:74707668-74707712
  hyper
aacagcatcgcccttccccggccccctcccgcttcccagcactt

SEQ ID NO: 38566 - DNA, 185 bp, Homo sapiens; identical to SEQ ID NO: 4947
  chr13:74709333-74709518
  hyper

SEQ ID NO: 38567 - DNA, 36 bp, Homo sapiens; identical to SEQ ID NO: 4948
  chr13:75794020-75794056
  hyper

SEQ ID NO: 38568 - DNA, 47 bp, Homo sapiens; identical to SEQ ID NO: 4949
  chr13:76054891-76054938
  hyper

SEQ ID NO: 38569 - DNA, 218 bp, Homo sapiens; identical to SEQ ID NO: 4950
  chr13:76055017-76055235
  hyper

SEQ ID NO: 38570 - DNA, 86 bp, Homo sapiens; identical to SEQ ID NO: 4951
  chr13:76055318-76055404
  hyper

SEQ ID NO: 38571 - DNA, 76 bp, Homo sapiens; identical to SEQ ID NO: 4952
  chr13:76055407-76055483
  hyper

SEQ ID NO: 38572 - DNA, 154 bp, Homo sapiens; identical to SEQ ID NO: 4953
  chr13:76055484-76055638
  hyper

SEQ ID NO: 38573 - DNA, 82 bp, Homo sapiens; identical to SEQ ID NO: 4954
  chr13:76055648-76055730
  hyper

SEQ ID NO: 38574 - DNA, 326 bp, Homo sapiens; identical to SEQ ID NO: 4955
  chr13:76055734-76056060
  hyper

SEQ ID NO: 38575 - DNA, 57 bp, Homo sapiens; identical to SEQ ID NO: 4956
  chr13:76056064-76056121
  hyper

SEQ ID NO: 38576 - DNA, 243 bp, Homo sapiens; identical to SEQ ID NO: 4959
  chr13:78272373-78272616
  hyper

SEQ ID NO: 38577 - DNA, 31 bp, Homo sapiens; identical to SEQ ID NO: 4960
  chr13:80913491-80913522
  hyper

SEQ ID NO: 38578 - DNA, 69 bp, Homo sapiens; identical to SEQ ID NO: 4961
  chr13:80913583-80913652
  hyper

SEQ ID NO: 38579 - DNA, 31 bp, Homo sapiens; identical to SEQ ID NO: 4962
  chr13:80913704-80913735
  hyper

SEQ ID NO: 38580 - DNA, 89 bp, Homo sapiens
  chr13:80914144-80914233
  hyper
ccaggcagggcgacgctcccacccgctccgggctagactgtccacacggagcagaggcgggcactccctccacccggcaccctgccttt

SEQ ID NO: 38581 - DNA, 71 bp, Homo sapiens; identical to SEQ ID NO: 4964
  chr13:80914243-80914314
  hyper

SEQ ID NO: 38582 - DNA, 35 bp, Homo sapiens; identical to SEQ ID NO: 4965
  chr13:80914346-80914381
  hyper

SEQ ID NO: 38583 - DNA, 31 bp, Homo sapiens; identical to SEQ ID NO: 4966
  chr13:80914464-80914495
  hyper

SEQ ID NO: 38584 - DNA, 134 bp, Homo sapiens; identical to SEQ ID NO: 4967
  chr13:80914864-80914998
  hyper

SEQ ID NO: 38585 - DNA, 31 bp, Homo sapiens; identical to SEQ ID NO: 4968
  chr13:80915069-80915100
  hyper

SEQ ID NO: 38586 - DNA, 37 bp, Homo sapiens; identical to SEQ ID NO: 4969
  chr13:80915177-80915214
  hyper

SEQ ID NO: 38587 - DNA, 31 bp, Homo sapiens; identical to SEQ ID NO: 4970
  chr13:80915430-80915461
  hyper

SEQ ID NO: 38588 - DNA, 48 bp, Homo sapiens; identical to SEQ ID NO: 4971
  chr13:80915615-80915663
  hyper

SEQ ID NO: 38589 - DNA, 215 bp, Homo sapiens; identical to SEQ ID NO: 4972
  chr13:80916946-80917161
  hyper

SEQ ID NO: 38590 - DNA, 85 bp, Homo sapiens; identical to SEQ ID NO: 4973
  chr13:80917191-80917276
  hyper

SEQ ID NO: 38591 - DNA, 31 bp, Homo sapiens; identical to SEQ ID NO: 4974
  chr13:80917283-80917314
  hyper

SEQ ID NO: 38592 - DNA, 90 bp, Homo sapiens; identical to SEQ ID NO: 4975
  chr13:80917356-80917446
  hyper

SEQ ID NO: 38593 - DNA, 31 bp, Homo sapiens; identical to SEQ ID NO: 4976
  chr13:90384876-90384907
  hyper

SEQ ID NO: 38594 - DNA, 109 bp, Homo sapiens
  chr13:95201518-95201627
  hyper
ggtgttttgctggccccgtggacagaccagacctcctcccatcggagcctcgggtctcacaccagccccccaggcggcgcgcggccccgtctcgccaccgcggcccggg

SEQ ID NO: 38595 - DNA, 61 bp, Homo sapiens; identical to SEQ ID NO: 4980
  chr13:96705466-96705527
  hyper

SEQ ID NO: 38596 - DNA, 240 bp, Homo sapiens; identical to SEQ ID NO: 4981
  chr13:96705577-96705817
  hyper

SEQ ID NO: 38597 - DNA, 120 bp, Homo sapiens; identical to SEQ ID NO: 4982
  chr13:96705823-96705943
  hyper

SEQ ID NO: 38598 - DNA, 31 bp, Homo sapiens; identical to SEQ ID NO: 4983
  chr13:98795068-98795099
  hyper

SEQ ID NO: 38599 - DNA, 31 bp, Homo sapiens; identical to SEQ ID NO: 4984
  chr13:98795195-98795226
  hyper

SEQ ID NO: 38600 - DNA, 148 bp, Homo sapiens; identical to SEQ ID NO: 4985
  chr13:98795358-98795506
  hyper

SEQ ID NO: 38601 - DNA, 37 bp, Homo sapiens; identical to SEQ ID NO: 4986
  chr13:98795538-98795575
  hyper

SEQ ID NO: 38602 - DNA, 52 bp, Homo sapiens; identical to SEQ ID NO: 4987
  chr13:98795635-98795687
  hyper

SEQ ID NO: 38603 - DNA, 57 bp, Homo sapiens; identical to SEQ ID NO: 4988
  chr13:98795714-98795771
  hyper

SEQ ID NO: 38604 - DNA, 31 bp, Homo sapiens; identical to SEQ ID NO: 4989
  chr13:99129086-99129117
  hyper

SEQ ID NO: 38605 - DNA, 115 bp, Homo sapiens; identical to SEQ ID NO: 4990
  chr13:99229763-99229878
  hyper

SEQ ID NO: 38606 - DNA, 46 bp, Homo sapiens; identical to SEQ ID NO: 4991
  chr13:99229888-99229934
  hyper

SEQ ID NO: 38607 - DNA, 42 bp, Homo sapiens; identical to SEQ ID NO: 4992
  chr13:99229937-99229979
  hyper

SEQ ID NO: 38608 - DNA, 31 bp, Homo sapiens; identical to SEQ ID NO: 4993
  chr13:99739097-99739128
  hyper

SEQ ID NO: 38609 - DNA, 94 bp, Homo sapiens; identical to SEQ ID NO: 4994
  chr13:99739247-99739341
  hyper

SEQ ID NO: 38610 - DNA, 98 bp, Homo sapiens; identical to SEQ ID NO: 4995
  chr13:99739354-99739452
  hyper

SEQ ID NO: 38611 - DNA, 39 bp, Homo sapiens; identical to SEQ ID NO: 4996
  chr13:99740139-99740178
  hyper

SEQ ID NO: 38612 - DNA, 38 bp, Homo sapiens; identical to SEQ ID NO: 4997
  chr13:100634142-100634180
  hyper

SEQ ID NO: 38613 - DNA, 31 bp, Homo sapiens; identical to SEQ ID NO: 4998
  chr13:101717570-101717601
  hyper

SEQ ID NO: 38614 - DNA, 31 bp, Homo sapiens; identical to SEQ ID NO: 4999
  chr13:103258072-103258103
  hyper

SEQ ID NO: 38615 - DNA, 31 bp, Homo sapiens; identical to SEQ ID NO: 5000
  chr13:103450907-103450938
  hyper

SEQ ID NO: 38616 - DNA, 2 bp, Homo sapiens
  chr13:103451012-103451014
  hyper
cc

SEQ ID NO: 38617 - DNA, 21 bp, Homo sapiens
  chr13:103451043-103451064
  hyper
atccaccgataaatgaagaag

SEQ ID NO: 38618 - DNA, 147 bp, Homo sapiens; identical to SEQ ID NO: 5002
  chr13:103451071-103451218
  hyper

SEQ ID NO: 38619 - DNA, 248 bp, Homo sapiens; identical to SEQ ID NO: 5003
  chr13:103451315-103451563
  hyper

SEQ ID NO: 38620 - DNA, 112 bp, Homo sapiens; identical to SEQ ID NO: 5004
  chr13:103451761-103451873
  hyper

SEQ ID NO: 38621 - DNA, 136 bp, Homo sapiens; identical to SEQ ID NO: 5005
  chr13:103452262-103452398
  hyper

SEQ ID NO: 38622 - DNA, 31 bp, Homo sapiens; identical to SEQ ID NO: 5006
  chr13:103452420-103452451
  hyper

SEQ ID NO: 38623 - DNA, 326 bp, Homo sapiens; identical to SEQ ID NO: 5007
  chr13:103452750-103453076
  hyper

SEQ ID NO: 38624 - DNA, 15 bp, Homo sapiens
  chr13:108518657-108518672
  hyper
cgctgctgctgctgc

SEQ ID NO: 38625 - DNA, 31 bp, Homo sapiens; identical to SEQ ID NO: 5014
  chr13:110439117-110439148
  hyper

SEQ ID NO: 38626 - DNA, 317 bp, Homo sapiens; identical to SEQ ID NO: 5015
  chr13:111213551-111213868
  hyper

SEQ ID NO: 38627 - DNA, 150 bp, Homo sapiens; identical to SEQ ID NO: 5016
  chr13:111213877-111214027
  hyper

SEQ ID NO: 38628 - DNA, 38 bp, Homo sapiens; identical to SEQ ID NO: 5017
  chr13:111214222-111214260
  hyper

SEQ ID NO: 38629 - DNA, 106 bp, Homo sapiens; identical to SEQ ID NO: 5018
  chr13:111214274-111214380
  hyper

SEQ ID NO: 38630 - DNA, 31 bp, Homo sapiens; identical to SEQ ID NO: 5019
  chr13:111268136-111268167
  hyper

SEQ ID NO: 38631 - DNA, 74 bp, Homo sapiens; identical to SEQ ID NO: 5020
  chr13:111268234-111268308
  hyper

SEQ ID NO: 38632 - DNA, 31 bp, Homo sapiens; identical to SEQ ID NO: 5021
  chr13:111305635-111305666
  hyper

SEQ ID NO: 38633 - DNA, 31 bp, Homo sapiens; identical to SEQ ID NO: 5022
  chr13:111527013-111527044
  hyper

SEQ ID NO: 38634 - DNA, 72 bp, Homo sapiens; identical to SEQ ID NO: 5023
  chr13:111527049-111527121
  hyper

SEQ ID NO: 38635 - DNA, 31 bp, Homo sapiens; identical to SEQ ID NO: 5024
  chr13:113548353-113548384
  hyper

SEQ ID NO: 38636 - DNA, 31 bp, Homo sapiens; identical to SEQ ID NO: 5025
  chr13:113548669-113548700
  hyper

SEQ ID NO: 38637 - DNA, 41 bp, Homo sapiens; identical to SEQ ID NO: 5026
  chr13:113597574-113597615
  hyper

SEQ ID NO: 38638 - DNA, 44 bp, Homo sapiens; identical to SEQ ID NO: 5027
  chr13:113597655-113597699
  hyper

SEQ ID NO: 38639 - DNA, 63 bp, Homo sapiens; identical to SEQ ID NO: 5028
  chr13:113597781-113597844
  hyper

SEQ ID NO: 38640 - DNA, 31 bp, Homo sapiens; identical to SEQ ID NO: 5029
  chr13:113807778-113807809
  hyper

SEQ ID NO: 38641 - DNA, 31 bp, Homo sapiens; identical to SEQ ID NO: 5030
  chr13:113807976-113808007
  hyper

SEQ ID NO: 38642 - DNA, 59 bp, Homo sapiens; identical to SEQ ID NO: 5031
  chr13:113951224-113951283
  hyper

SEQ ID NO: 38643 - DNA, 229 bp, Homo sapiens; identical to SEQ ID NO: 28488
  chr13:114017991-114018220
  hyper

SEQ ID NO: 38644 - DNA, 8 bp, Homo sapiens
  chr13:114018330-114018338
  hyper
acacctgg

SEQ ID NO: 38645 - DNA, 128 bp, Homo sapiens; identical to SEQ ID NO: 5034
  chr13:114018340-114018468
  hyper

SEQ ID NO: 38646 - DNA, 31 bp, Homo sapiens; identical to SEQ ID NO: 5035
  chr13:114048391-114048422
  hyper

SEQ ID NO: 38647 - DNA, 31 bp, Homo sapiens; identical to SEQ ID NO: 5036
  chr13:114238865-114238896
  hyper

SEQ ID NO: 38648 - DNA, 95 bp, Homo sapiens; identical to SEQ ID NO: 5037
  chr13:114566903-114566998
  hyper

SEQ ID NO: 38649 - DNA, 43 bp, Homo sapiens; identical to SEQ ID NO: 5038
  chr13:114566999-114567042
  hyper

SEQ ID NO: 38650 - DNA, 42 bp, Homo sapiens; identical to SEQ ID NO: 5041
  chr13:114776458-114776500
  hyper

SEQ ID NO: 38651 - DNA, 31 bp, Homo sapiens; identical to SEQ ID NO: 5042
  chr13:114976825-114976856
  hyper

SEQ ID NO: 38652 - DNA, 31 bp, Homo sapiens; identical to SEQ ID NO: 5043
  chr14:19403466-19403497
  hyper

SEQ ID NO: 38653 - DNA, 151 bp, Homo sapiens; identical to SEQ ID NO: 5046
  chr14:21493032-21493183
  hyper

SEQ ID NO: 38654 - DNA, 31 bp, Homo sapiens; identical to SEQ ID NO: 5047
  chr14:21553686-21553717
  hyper

SEQ ID NO: 38655 - DNA, 2 bp, Homo sapiens
  chr14:21769029-21769031
  hyper
at

SEQ ID NO: 38656 - DNA, 35 bp, Homo sapiens
  chr14:23355356-23355391
  hyper
ctgggaggccgcaccacgacctacccgttatcctc

SEQ ID NO: 38657 - DNA, 187 bp, Homo sapiens; identical to SEQ ID NO: 5054
  chr14:23450867-23451054
  hyper

SEQ ID NO: 38658 - DNA, 80 bp, Homo sapiens; identical to SEQ ID NO: 5055
  chr14:23451068-23451148
  hyper

SEQ ID NO: 38659 - DNA, 62 bp, Homo sapiens; identical to SEQ ID NO: 5056
  chr14:23451279-23451341
  hyper

SEQ ID NO: 38660 - DNA, 112 bp, Homo sapiens; identical to SEQ ID NO: 5057
  chr14:23451349-23451461
  hyper

SEQ ID NO: 38661 - DNA, 35 bp, Homo sapiens; identical to SEQ ID NO: 5058
  chr14:23451585-23451620
  hyper

SEQ ID NO: 38662 - DNA, 123 bp, Homo sapiens; identical to SEQ ID NO: 5059
  chr14:23451828-23451951
  hyper

SEQ ID NO: 38663 - DNA, 57 bp, Homo sapiens; identical to SEQ ID NO: 5060
  chr14:23452130-23452187
  hyper

SEQ ID NO: 38664 - DNA, 37 bp, Homo sapiens; identical to SEQ ID NO: 5061
  chr14:23452271-23452308
  hyper

SEQ ID NO: 38665 - DNA, 31 bp, Homo sapiens; identical to SEQ ID NO: 5062
  chr14:23775833-23775864
  hyper

SEQ ID NO: 38666 - DNA, 74 bp, Homo sapiens; identical to SEQ ID NO: 5063
  chr14:23776070-23776144
  hyper

SEQ ID NO: 38667 - DNA, 78 bp, Homo sapiens; identical to SEQ ID NO: 5064
  chr14:23776181-23776259
  hyper

SEQ ID NO: 38668 - DNA, 50 bp, Homo sapiens; identical to SEQ ID NO: 5066
  chr14:24837856-24837906
  hyper

SEQ ID NO: 38669 - DNA, 31 bp, Homo sapiens; identical to SEQ ID NO: 5067
  chr14:26892909-26892940
  hyper

SEQ ID NO: 38670 - DNA, 31 bp, Homo sapiens; identical to SEQ ID NO: 5068
  chr14:31028138-31028169
  hyper

SEQ ID NO: 38671 - DNA, 31 bp, Homo sapiens; identical to SEQ ID NO: 5069
  chr14:38063820-38063851
  hyper

SEQ ID NO: 38672 - DNA, 20 bp, Homo sapiens
  chr14:38064382-38064402
  hyper
gccgggggcaggcggctgcc

SEQ ID NO: 38673 - DNA, 31 bp, Homo sapiens; identical to SEQ ID NO: 5071
  chr14:38065381-38065412
  hyper

SEQ ID NO: 38674 - DNA, 31 bp, Homo sapiens; identical to SEQ ID NO: 5072
  chr14:38678113-38678144
  hyper

SEQ ID NO: 38675 - DNA, 31 bp, Homo sapiens; identical to SEQ ID NO: 5073
  chr14:39735664-39735695
  hyper

SEQ ID NO: 38676 - DNA, 44 bp, Homo sapiens; identical to SEQ ID NO: 5074
  chr14:39735734-39735778
  hyper

SEQ ID NO: 38677 - DNA, 31 bp, Homo sapiens; identical to SEQ ID NO: 5075
  chr14:50238427-50238458
  hyper

SEQ ID NO: 38678 - DNA, 68 bp, Homo sapiens; identical to SEQ ID NO: 5077
  chr14:52327330-52327398
  hyper

SEQ ID NO: 38679 - DNA, 204 bp, Homo sapiens; identical to SEQ ID NO: 5078
  chr14:52327416-52327620
  hyper

SEQ ID NO: 38680 - DNA, 31 bp, Homo sapiens; identical to SEQ ID NO: 5079
  chr14:52455648-52455679
  hyper

SEQ ID NO: 38681 - DNA, 60 bp, Homo sapiens; identical to SEQ ID NO: 5080
  chr14:52455722-52455782
  hyper

SEQ ID NO: 38682 - DNA, 40 bp, Homo sapiens; identical to SEQ ID NO: 5081
  chr14:52455788-52455828
  hyper

SEQ ID NO: 38683 - DNA, 51 bp, Homo sapiens; identical to SEQ ID NO: 5082
  chr14:54420071-54420122
  hyper

SEQ ID NO: 38684 - DNA, 31 bp, Homo sapiens; identical to SEQ ID NO: 5083
  chr14:54420289-54420320
  hyper

SEQ ID NO: 38685 - DNA, 59 bp, Homo sapiens; identical to SEQ ID NO: 5084
  chr14:54420477-54420536
  hyper

SEQ ID NO: 38686 - DNA, 31 bp, Homo sapiens; identical to SEQ ID NO: 5085
  chr14:57734480-57734511
  hyper

SEQ ID NO: 38687 - DNA, 89 bp, Homo sapiens; identical to SEQ ID NO: 5086
  chr14:57858260-57858349
  hyper

SEQ ID NO: 38688 - DNA, 31 bp, Homo sapiens; identical to SEQ ID NO: 5088
  chr14:61736456-61736487
  hyper

SEQ ID NO: 38689 - DNA, 89 bp, Homo sapiens; identical to SEQ ID NO: 5089
  chr14:62161812-62161901
  hyper

SEQ ID NO: 38690 - DNA, 93 bp, Homo sapiens; identical to SEQ ID NO: 5090
  chr14:62162323-62162416
  hyper

SEQ ID NO: 38691 - DNA, 203 bp, Homo sapiens; identical to SEQ ID NO: 5091
  chr14:62162425-62162628
  hyper

SEQ ID NO: 38692 - DNA, 50 bp, Homo sapiens; identical to SEQ ID NO: 5092
  chr14:62162756-62162806
  hyper

SEQ ID NO: 38693 - DNA, 38 bp, Homo sapiens; identical to SEQ ID NO: 5093
  chr14:62162926-62162964
  hyper

SEQ ID NO: 38694 - DNA, 31 bp, Homo sapiens; identical to SEQ ID NO: 5094
  chr14:64182959-64182990
  hyper

SEQ ID NO: 38695 - DNA, 31 bp, Homo sapiens; identical to SEQ ID NO: 5095
  chr14:64320708-64320739
  hyper

SEQ ID NO: 38696 - DNA, 66 bp, Homo sapiens; identical to SEQ ID NO: 5102
  chr14:65171081-65171147
  hyper

SEQ ID NO: 38697 - DNA, 31 bp, Homo sapiens; identical to SEQ ID NO: 5103
  chr14:65171882-65171913
  hyper

SEQ ID NO: 38698 - DNA, 31 bp, Homo sapiens; identical to SEQ ID NO: 5104
  chr14:66974386-66974417
  hyper

SEQ ID NO: 38699 - DNA, 31 bp, Homo sapiens; identical to SEQ ID NO: 5105
  chr14:66974577-66974608
  hyper

SEQ ID NO: 38700 - DNA, 54 bp, Homo sapiens; identical to SEQ ID NO: 5106
  chr14:66974621-66974675
  hyper

SEQ ID NO: 38701 - DNA, 75 bp, Homo sapiens; identical to SEQ ID NO: 5107
  chr14:66974894-66974969
  hyper

SEQ ID NO: 38702 - DNA, 31 bp, Homo sapiens; identical to SEQ ID NO: 5108
  chr14:66975756-66975787
  hyper

SEQ ID NO: 38703 - DNA, 60 bp, Homo sapiens; identical to SEQ ID NO: 5109
  chr14:67826024-67826084
  hyper

SEQ ID NO: 38704 - DNA, 123 bp, Homo sapiens; identical to SEQ ID NO: 5110
  chr14:67826123-67826246
  hyper

SEQ ID NO: 38705 - DNA, 30 bp, Homo sapiens; identical to SEQ ID NO: 5111
  chr14:67878763-67878793
  hyper

SEQ ID NO: 38706 - DNA, 31 bp, Homo sapiens; identical to SEQ ID NO: 5112
  chr14:69258877-69258908
  hyper

SEQ ID NO: 38707 - DNA, 31 bp, Homo sapiens; identical to SEQ ID NO: 5113
  chr14:69259342-69259373
  hyper

SEQ ID NO: 38708 - DNA, 31 bp, Homo sapiens; identical to SEQ ID NO: 5114
  chr14:69259383-69259414
  hyper

SEQ ID NO: 38709 - DNA, 31 bp, Homo sapiens; identical to SEQ ID NO: 5115
  chr14:69259419-69259450
  hyper

SEQ ID NO: 38710 - DNA, 31 bp, Homo sapiens; identical to SEQ ID NO: 5116
  chr14:69259474-69259505
  hyper

SEQ ID NO: 38711 - DNA, 112 bp, Homo sapiens; identical to SEQ ID NO: 5117
  chr14:69444742-69444854
  hyper

SEQ ID NO: 38712 - DNA, 112 bp, Homo sapiens; identical to SEQ ID NO: 5118
  chr14:69444880-69444992
  hyper

SEQ ID NO: 38713 - DNA, 102 bp, Homo sapiens; identical to SEQ ID NO: 5119
  chr14:69445111-69445213
  hyper

SEQ ID NO: 38714 - DNA, 31 bp, Homo sapiens; identical to SEQ ID NO: 5120
  chr14:69445726-69445757
  hyper

SEQ ID NO: 38715 - DNA, 31 bp, Homo sapiens; identical to SEQ ID NO: 5121
  chr14:69445764-69445795
  hyper

SEQ ID NO: 38716 - DNA, 31 bp, Homo sapiens; identical to SEQ ID NO: 5122
  chr14:69445827-69445858
  hyper

SEQ ID NO: 38717 - DNA, 156 bp, Homo sapiens; identical to SEQ ID NO: 5123
  chr14:69445870-69446026
  hyper

SEQ ID NO: 38718 - DNA, 44 bp, Homo sapiens; identical to SEQ ID NO: 5124
  chr14:69446237-69446281
  hyper

SEQ ID NO: 38719 - DNA, 31 bp, Homo sapiens; identical to SEQ ID NO: 5125
  chr14:69446438-69446469
  hyper

SEQ ID NO: 38720 - DNA, 51 bp, Homo sapiens; identical to SEQ ID NO: 5126
  chr14:69446487-69446538
  hyper

SEQ ID NO: 38721 - DNA, 132 bp, Homo sapiens; identical to SEQ ID NO: 5127
  chr14:69446546-69446678
  hyper

SEQ ID NO: 38722 - DNA, 31 bp, Homo sapiens; identical to SEQ ID NO: 5128
  chr14:69618276-69618307
  hyper

SEQ ID NO: 38723 - DNA, 49 bp, Homo sapiens; identical to SEQ ID NO: 5129
  chr14:69658737-69658786
  hyper

SEQ ID NO: 38724 - DNA, 31 bp, Homo sapiens; identical to SEQ ID NO: 5130
  chr14:69658802-69658833
  hyper

SEQ ID NO: 38725 - DNA, 105 bp, Homo sapiens; identical to SEQ ID NO: 5131
  chr14:70826256-70826361
  hyper

SEQ ID NO: 38726 - DNA, 31 bp, Homo sapiens; identical to SEQ ID NO: 5132
  chr14:70826438-70826469
  hyper

SEQ ID NO: 38727 - DNA, 54 bp, Homo sapiens; identical to SEQ ID NO: 5133
  chr14:70826504-70826558
  hyper

SEQ ID NO: 38728 - DNA, 61 bp, Homo sapiens; identical to SEQ ID NO: 5134
  chr14:71108797-71108858
  hyper

SEQ ID NO: 38729 - DNA, 31 bp, Homo sapiens; identical to SEQ ID NO: 5135
  chr14:73485669-73485700
  hyper

SEQ ID NO: 38730 - DNA, 63 bp, Homo sapiens; identical to SEQ ID NO: 5136
  chr14:74180609-74180672
  hyper

SEQ ID NO: 38731 - DNA, 47 bp, Homo sapiens; identical to SEQ ID NO: 5137
  chr14:74180851-74180898
  hyper

SEQ ID NO: 38732 - DNA, 31 bp, Homo sapiens; identical to SEQ ID NO: 5138
  chr14:74238785-74238816
  hyper

SEQ ID NO: 38733 - DNA, 55 bp, Homo sapiens; identical to SEQ ID NO: 5140
  chr14:75743667-75743722
  hyper

SEQ ID NO: 38734 - DNA, 31 bp, Homo sapiens; identical to SEQ ID NO: 5141
  chr14:75743729-75743760
  hyper

SEQ ID NO: 38735 - DNA, 91 bp, Homo sapiens; identical to SEQ ID NO: 5142
  chr14:75743971-75744062
  hyper

SEQ ID NO: 38736 - DNA, 37 bp, Homo sapiens; identical to SEQ ID NO: 5143
  chr14:76819084-76819121
  hyper

SEQ ID NO: 38737 - DNA, 119 bp, Homo sapiens; identical to SEQ ID NO: 5145
  chr14:77493393-77493512
  hyper

SEQ ID NO: 38738 - DNA, 232 bp, Homo sapiens; identical to SEQ ID NO: 5146
  chr14:77493527-77493759
  hyper

SEQ ID NO: 38739 - DNA, 31 bp, Homo sapiens; identical to SEQ ID NO: 5147
  chr14:77499643-77499674
  hyper

SEQ ID NO: 38740 - DNA, 36 bp, Homo sapiens; identical to SEQ ID NO: 5148
  chr14:81901991-81902027
  hyper

SEQ ID NO: 38741 - DNA, 55 bp, Homo sapiens; identical to SEQ ID NO: 5149
  chr14:81902329-81902384
  hyper

SEQ ID NO: 38742 - DNA, 150 bp, Homo sapiens; identical to SEQ ID NO: 5150
  chr14:81902633-81902783
  hyper

SEQ ID NO: 38743 - DNA, 18 bp, Homo sapiens
  chr14:88459631-88459649
  hyper
tgacgcagctggcggagt

SEQ ID NO: 38744 - DNA, 22 bp, Homo sapiens
  chr14:88789941-88789963
  hyper
ggaagccgcggaggggcgggga

SEQ ID NO: 38745 - DNA, 53 bp, Homo sapiens; identical to SEQ ID NO: 5154
  chr14:89020728-89020781
  hyper

SEQ ID NO: 38746 - DNA, 31 bp, Homo sapiens; identical to SEQ ID NO: 5155
  chr14:89020800-89020831
  hyper

SEQ ID NO: 38747 - DNA, 399 bp, Homo sapiens; identical to SEQ ID NO: 5156
  chr14:89020844-89021243
  hyper

SEQ ID NO: 38748 - DNA, 31 bp, Homo sapiens; identical to SEQ ID NO: 5157
  chr14:89021244-89021275
  hyper

SEQ ID NO: 38749 - DNA, 36 bp, Homo sapiens; identical to SEQ ID NO: 5158
  chr14:89021377-89021413
  hyper

SEQ ID NO: 38750 - DNA, 62 bp, Homo sapiens; identical to SEQ ID NO: 5159
  chr14:89290984-89291046
  hyper

SEQ ID NO: 38751 - DNA, 31 bp, Homo sapiens; identical to SEQ ID NO: 5160
  chr14:89291184-89291215
  hyper

SEQ ID NO: 38752 - DNA, 31 bp, Homo sapiens; identical to SEQ ID NO: 5161
  chr14:89506987-89507018
  hyper

SEQ ID NO: 38753 - DNA, 42 bp, Homo sapiens; identical to SEQ ID NO: 5162
  chr14:89507057-89507099
  hyper

SEQ ID NO: 38754 - DNA, 45 bp, Homo sapiens; identical to SEQ ID NO: 5163
  chr14:89884246-89884291
  hyper

SEQ ID NO: 38755 - DNA, 30 bp, Homo sapiens; identical to SEQ ID NO: 5164
  chr14:90849827-90849857
  hyper

SEQ ID NO: 38756 - DNA, 38 bp, Homo sapiens; identical to SEQ ID NO: 5165
  chr14:90849897-90849935
  hyper

SEQ ID NO: 38757 - DNA, 49 bp, Homo sapiens; identical to SEQ ID NO: 5166
  chr14:91976435-91976484
  hyper

SEQ ID NO: 38758 - DNA, 31 bp, Homo sapiens; identical to SEQ ID NO: 5167
  chr14:92302266-92302297
  hyper

SEQ ID NO: 38759 - DNA, 31 bp, Homo sapiens; identical to SEQ ID NO: 5169
  chr14:93214735-93214766
  hyper

SEQ ID NO: 38760 - DNA, 237 bp, Homo sapiens; identical to SEQ ID NO: 5170
  chr14:93214771-93215008
  hyper

SEQ ID NO: 38761 - DNA, 99 bp, Homo sapiens; identical to SEQ ID NO: 5171
  chr14:94406083-94406182
  hyper

SEQ ID NO: 38762 - DNA, 74 bp, Homo sapiens; identical to SEQ ID NO: 5172
  chr14:94492879-94492953
  hyper

SEQ ID NO: 38763 - DNA, 36 bp, Homo sapiens; identical to SEQ ID NO: 5173
  chr14:94492963-94492999
  hyper

SEQ ID NO: 38764 - DNA, 31 bp, Homo sapiens; identical to SEQ ID NO: 5174
  chr14:94493019-94493050
  hyper

SEQ ID NO: 38765 - DNA, 31 bp, Homo sapiens; identical to SEQ ID NO: 5175
  chr14:94493109-94493140
  hyper

SEQ ID NO: 38766 - DNA, 36 bp, Homo sapiens; identical to SEQ ID NO: 5176
  chr14:94640375-94640411
  hyper

SEQ ID NO: 38767 - DNA, 35 bp, Homo sapiens; identical to SEQ ID NO: 5177
  chr14:94640412-94640447
  hyper

SEQ ID NO: 38768 - DNA, 31 bp, Homo sapiens; identical to SEQ ID NO: 5178
  chr14:95932616-95932647
  hyper

SEQ ID NO: 38769 - DNA, 31 bp, Homo sapiens; identical to SEQ ID NO: 5179
  chr14:96499773-96499804
  hyper

SEQ ID NO: 38770 - DNA, 31 bp, Homo sapiens; identical to SEQ ID NO: 5180
  chr14:96678012-96678043
  hyper

SEQ ID NO: 38771 - DNA, 31 bp, Homo sapiens; identical to SEQ ID NO: 5181
  chr14:96678098-96678129
  hyper

SEQ ID NO: 38772 - DNA, 31 bp, Homo sapiens; identical to SEQ ID NO: 5182
  chr14:99737280-99737311
  hyper

SEQ ID NO: 38773 - DNA, 31 bp, Homo sapiens; identical to SEQ ID NO: 5183
  chr14:99737544-99737575
  hyper

SEQ ID NO: 38774 - DNA, 31 bp, Homo sapiens; identical to SEQ ID NO: 5184
  chr14:99740292-99740323
  hyper

SEQ ID NO: 38775 - DNA, 58 bp, Homo sapiens; identical to SEQ ID NO: 5185
  chr14:99740835-99740893
  hyper

SEQ ID NO: 38776 - DNA, 31 bp, Homo sapiens; identical to SEQ ID NO: 5186
  chr14:99741285-99741316
  hyper

SEQ ID NO: 38777 - DNA, 31 bp, Homo sapiens; identical to SEQ ID NO: 5187
  chr14:99741326-99741357
  hyper

SEQ ID NO: 38778 - DNA, 31 bp, Homo sapiens; identical to SEQ ID NO: 5188
  chr14:100069925-100069956
  hyper

SEQ ID NO: 38779 - DNA, 44 bp, Homo sapiens; identical to SEQ ID NO: 5189
  chr14:100070063-100070107
  hyper

SEQ ID NO: 38780 - DNA, 41 bp, Homo sapiens; identical to SEQ ID NO: 5190
  chr14:100070159-100070200
  hyper

SEQ ID NO: 38781 - DNA, 281 bp, Homo sapiens; identical to SEQ ID NO: 5191
  chr14:100070244-100070525
  hyper

SEQ ID NO: 38782 - DNA, 240 bp, Homo sapiens; identical to SEQ ID NO: 5192
  chr14:100070680-100070920
  hyper

SEQ ID NO: 38783 - DNA, 98 bp, Homo sapiens; identical to SEQ ID NO: 5193
  chr14:100071075-100071173
  hyper

SEQ ID NO: 38784 - DNA, 79 bp, Homo sapiens; identical to SEQ ID NO: 5194
  chr14:100071305-100071384
  hyper

SEQ ID NO: 38785 - DNA, 31 bp, Homo sapiens; identical to SEQ ID NO: 5195
  chr14:100071387-100071418
  hyper

SEQ ID NO: 38786 - DNA, 92 bp, Homo sapiens; identical to SEQ ID NO: 5196
  chr14:100071435-100071527
  hyper

SEQ ID NO: 38787 - DNA, 41 bp, Homo sapiens; identical to SEQ ID NO: 5197
  chr14:100071548-100071589
  hyper

SEQ ID NO: 38788 - DNA, 141 bp, Homo sapiens; identical to SEQ ID NO: 5198
  chr14:100150247-100150388
  hyper

SEQ ID NO: 38789 - DNA, 154 bp, Homo sapiens; identical to SEQ ID NO: 5199
  chr14:100150582-100150736
  hyper

SEQ ID NO: 38790 - DNA, 41 bp, Homo sapiens; identical to SEQ ID NO: 5200
  chr14:100772012-100772053
  hyper

SEQ ID NO: 38791 - DNA, 63 bp, Homo sapiens; identical to SEQ ID NO: 5201
  chr14:100772055-100772118
  hyper

SEQ ID NO: 38792 - DNA, 31 bp, Homo sapiens; identical to SEQ ID NO: 5202
  chr14:100773414-100773445
  hyper

SEQ ID NO: 38793 - DNA, 31 bp, Homo sapiens; identical to SEQ ID NO: 5203
  chr14:100773473-100773504
  hyper

SEQ ID NO: 38794 - DNA, 71 bp, Homo sapiens; identical to SEQ ID NO: 5205
  chr14:101053019-101053090
  hyper

SEQ ID NO: 38795 - DNA, 31 bp, Homo sapiens; identical to SEQ ID NO: 5206
  chr14:101053119-101053150
  hyper

SEQ ID NO: 38796 - DNA, 147 bp, Homo sapiens; identical to SEQ ID NO: 5207
  chr14:102975680-102975827
  hyper

SEQ ID NO: 38797 - DNA, 31 bp, Homo sapiens; identical to SEQ ID NO: 5208
  chr14:102975895-102975926
  hyper

SEQ ID NO: 38798 - DNA, 114 bp, Homo sapiens; identical to SEQ ID NO: 5209
  chr14:102975944-102976058
  hyper

SEQ ID NO: 38799 - DNA, 53 bp, Homo sapiens; identical to SEQ ID NO: 5212
  chr14:103242510-103242563
  hyper

SEQ ID NO: 38800 - DNA, 31 bp, Homo sapiens; identical to SEQ ID NO: 5213
  chr14:103263057-103263088
  hyper

SEQ ID NO: 38801 - DNA, 48 bp, Homo sapiens; identical to SEQ ID NO: 5214
  chr14:103523057-103523105
  hyper

SEQ ID NO: 38802 - DNA, 229 bp, Homo sapiens; identical to SEQ ID NO: 5215
  chr14:103523110-103523339
  hyper

SEQ ID NO: 38803 - DNA, 136 bp, Homo sapiens; identical to SEQ ID NO: 5216
  chr14:103523340-103523476
  hyper

SEQ ID NO: 38804 - DNA, 252 bp, Homo sapiens; identical to SEQ ID NO: 5217
  chr14:103523477-103523729
  hyper

SEQ ID NO: 38805 - DNA, 31 bp, Homo sapiens; identical to SEQ ID NO: 5218
  chr14:103523757-103523788
  hyper

SEQ ID NO: 38806 - DNA, 222 bp, Homo sapiens; identical to SEQ ID NO: 5219
  chr14:103523852-103524074
  hyper

SEQ ID NO: 38807 - DNA, 43 bp, Homo sapiens; identical to SEQ ID NO: 5220
  chr14:103524178-103524221
  hyper

SEQ ID NO: 38808 - DNA, 309 bp, Homo sapiens; identical to SEQ ID NO: 5221
  chr14:103524235-103524544
  hyper

SEQ ID NO: 38809 - DNA, 37 bp, Homo sapiens; identical to SEQ ID NO: 5222
  chr14:103541956-103541993
  hyper

SEQ ID NO: 38810 - DNA, 36 bp, Homo sapiens; identical to SEQ ID NO: 5223
  chr14:103541998-103542034
  hyper

SEQ ID NO: 38811 - DNA, 31 bp, Homo sapiens; identical to SEQ ID NO: 5224
  chr14:103542258-103542289
  hyper

SEQ ID NO: 38812 - DNA, 38 bp, Homo sapiens; identical to SEQ ID NO: 5225
  chr14:103593883-103593921
  hyper

SEQ ID NO: 38813 - DNA, 2 bp, Homo sapiens
  chr14:103593973-103593975
  hyper
ga

SEQ ID NO: 38814 - DNA, 5 bp, Homo sapiens
  chr14:103594004-103594009
  hyper
ggtgt

SEQ ID NO: 38815 - DNA, 96 bp, Homo sapiens; identical to SEQ ID NO: 5227
  chr14:103594011-103594107
  hyper

SEQ ID NO: 38816 - DNA, 44 bp, Homo sapiens; identical to SEQ ID NO: 5228
  chr14:104582814-104582858
  hyper

SEQ ID NO: 38817 - DNA, 215 bp, Homo sapiens; identical to SEQ ID NO: 5229
  chr14:104583110-104583325
  hyper

SEQ ID NO: 38818 - DNA, 99 bp, Homo sapiens; identical to SEQ ID NO: 5230
  chr14:104583359-104583458
  hyper

SEQ ID NO: 38819 - DNA, 22 bp, Homo sapiens
  chr14:105195883-105195905
  hyper
gtggcgtcggcgtggtggggag

SEQ ID NO: 38820 - DNA, 31 bp, Homo sapiens; identical to SEQ ID NO: 5233
  chr14:105269070-105269101
  hyper

SEQ ID NO: 38821 - DNA, 57 bp, Homo sapiens; identical to SEQ ID NO: 5234
  chr14:105330613-105330670
  hyper

SEQ ID NO: 38822 - DNA, 111 bp, Homo sapiens; identical to SEQ ID NO: 5235
  chr14:105330828-105330939
  hyper

SEQ ID NO: 38823 - DNA, 328 bp, Homo sapiens; identical to SEQ ID NO: 5236
  chr14:105330980-105331308
  hyper

SEQ ID NO: 38824 - DNA, 85 bp, Homo sapiens; identical to SEQ ID NO: 5237
  chr14:105331418-105331503
  hyper

SEQ ID NO: 38825 - DNA, 31 bp, Homo sapiens; identical to SEQ ID NO: 5238
  chr14:105331549-105331580
  hyper

SEQ ID NO: 38826 - DNA, 101 bp, Homo sapiens; identical to SEQ ID NO: 5239
  chr14:105331605-105331706
  hyper

SEQ ID NO: 38827 - DNA, 154 bp, Homo sapiens; identical to SEQ ID NO: 5240
  chr14:105331744-105331898
  hyper

SEQ ID NO: 38828 - DNA, 31 bp, Homo sapiens; identical to SEQ ID NO: 5241
  chr14:105332328-105332359
  hyper

SEQ ID NO: 38829 - DNA, 66 bp, Homo sapiens; identical to SEQ ID NO: 5242
  chr14:105332366-105332432
  hyper

SEQ ID NO: 38830 - DNA, 79 bp, Homo sapiens; identical to SEQ ID NO: 5243
  chr14:105332449-105332528
  hyper

SEQ ID NO: 38831 - DNA, 31 bp, Homo sapiens; identical to SEQ ID NO: 5244
  chr14:105399680-105399711
  hyper

SEQ ID NO: 38832 - DNA, 1 bp, Homo sapiens
  chr14:105511966-105511967
  hyper
c

SEQ ID NO: 38833 - DNA, 31 bp, Homo sapiens; identical to SEQ ID NO: 5249
  chr14:105512399-105512430
  hyper

SEQ ID NO: 38834 - DNA, 48 bp, Homo sapiens; identical to SEQ ID NO: 5250
  chr14:105647608-105647656
  hyper

SEQ ID NO: 38835 - DNA, 70 bp, Homo sapiens; identical to SEQ ID NO: 5251
  chr14:105647694-105647764
  hyper

SEQ ID NO: 38836 - DNA, 94 bp, Homo sapiens; identical to SEQ ID NO: 5253
  chr14:105781804-105781898
  hyper

SEQ ID NO: 38837 - DNA, 34 bp, Homo sapiens; identical to SEQ ID NO: 5254
  chr14:105781903-105781937
  hyper

SEQ ID NO: 38838 - DNA, 31 bp, Homo sapiens; identical to SEQ ID NO: 5255
  chr14:105781954-105781985
  hyper

SEQ ID NO: 38839 - DNA, 31 bp, Homo sapiens; identical to SEQ ID NO: 5256
  chr15:20478122-20478153
  hyper

SEQ ID NO: 38840 - DNA, 31 bp, Homo sapiens; identical to SEQ ID NO: 5257
  chr15:20478176-20478207
  hyper

SEQ ID NO: 38841 - DNA, 60 bp, Homo sapiens; identical to SEQ ID NO: 5258
  chr15:20478212-20478272
  hyper

SEQ ID NO: 38842 - DNA, 31 bp, Homo sapiens; identical to SEQ ID NO: 5259
  chr15:20478294-20478325
  hyper

SEQ ID NO: 38843 - DNA, 31 bp, Homo sapiens; identical to SEQ ID NO: 5260
  chr15:22544585-22544616
  hyper

SEQ ID NO: 38844 - DNA, 46 bp, Homo sapiens; identical to SEQ ID NO: 5261
  chr15:22892152-22892198
  hyper

SEQ ID NO: 38845 - DNA, 45 bp, Homo sapiens; identical to SEQ ID NO: 5262
  chr15:22892280-22892325
  hyper

SEQ ID NO: 38846 - DNA, 101 bp, Homo sapiens; identical to SEQ ID NO: 5263
  chr15:22892341-22892442
  hyper

SEQ ID NO: 38847 - DNA, 31 bp, Homo sapiens; identical to SEQ ID NO: 5264
  chr15:22892733-22892764
  hyper

SEQ ID NO: 38848 - DNA, 54 bp, Homo sapiens; identical to SEQ ID NO: 5265
  chr15:22893130-22893184
  hyper

SEQ ID NO: 38849 - DNA, 43 bp, Homo sapiens; identical to SEQ ID NO: 5266
  chr15:22893270-22893313
  hyper

SEQ ID NO: 38850 - DNA, 58 bp, Homo sapiens; identical to SEQ ID NO: 5267
  chr15:22893326-22893384
  hyper

SEQ ID NO: 38851 - DNA, 31 bp, Homo sapiens; identical to SEQ ID NO: 5268
  chr15:22893392-22893423
  hyper

SEQ ID NO: 38852 - DNA, 361 bp, Homo sapiens; identical to SEQ ID NO: 5269
  chr15:22893447-22893808
  hyper

SEQ ID NO: 38853 - DNA, 46 bp, Homo sapiens; identical to SEQ ID NO: 5270
  chr15:29966981-29967027
  hyper

SEQ ID NO: 38854 - DNA, 31 bp, Homo sapiens; identical to SEQ ID NO: 5271
  chr15:30113644-30113675
  hyper

SEQ ID NO: 38855 - DNA, 68 bp, Homo sapiens; identical to SEQ ID NO: 5272
  chr15:30113689-30113757
  hyper

SEQ ID NO: 38856 - DNA, 58 bp, Homo sapiens
  chr15:30113809-30113867
  hyper
gtggcaccccaagccccgacccgctgagagccggcttccagcccccgaaccctcactg

SEQ ID NO: 38857 - DNA, 57 bp, Homo sapiens
  chr15:30113984-30114041
  hyper
ccctccccggccgcccccagtgcggcccgcgccgcccccgcccgaggggctccccgc

SEQ ID NO: 38858 - DNA, 31 bp, Homo sapiens; identical to SEQ ID NO: 5274
  chr15:30114043-30114074
  hyper

SEQ ID NO: 38859 - DNA, 35 bp, Homo sapiens; identical to SEQ ID NO: 5275
  chr15:30114349-30114384
  hyper

SEQ ID NO: 38860 - DNA, 98 bp, Homo sapiens; identical to SEQ ID NO: 5276
  chr15:30114665-30114763
  hyper

SEQ ID NO: 38861 - DNA, 59 bp, Homo sapiens; identical to SEQ ID NO: 5277
  chr15:31621525-31621584
  hyper

SEQ ID NO: 38862 - DNA, 141 bp, Homo sapiens; identical to SEQ ID NO: 5278
  chr15:32162834-32162975
  hyper

SEQ ID NO: 38863 - DNA, 178 bp, Homo sapiens; identical to SEQ ID NO: 5279
  chr15:32162989-32163167
  hyper

SEQ ID NO: 38864 - DNA, 31 bp, Homo sapiens; identical to SEQ ID NO: 5280
  chr15:37393697-37393728
  hyper

SEQ ID NO: 38865 - DNA, 35 bp, Homo sapiens; identical to SEQ ID NO: 5281
  chr15:38365201-38365236
  hyper

SEQ ID NO: 38866 - DNA, 31 bp, Homo sapiens; identical to SEQ ID NO: 5282
  chr15:38543335-38543366
  hyper

SEQ ID NO: 38867 - DNA, 31 bp, Homo sapiens; identical to SEQ ID NO: 5283
  chr15:38543406-38543437
  hyper

SEQ ID NO: 38868 - DNA, 31 bp, Homo sapiens; identical to SEQ ID NO: 5284
  chr15:38543603-38543634
  hyper

SEQ ID NO: 38869 - DNA, 36 bp, Homo sapiens; identical to SEQ ID NO: 5285
  chr15:38543654-38543690
  hyper

SEQ ID NO: 38870 - DNA, 31 bp, Homo sapiens; identical to SEQ ID NO: 5286
  chr15:38545321-38545352
  hyper

SEQ ID NO: 38871 - DNA, 31 bp, Homo sapiens; identical to SEQ ID NO: 5287
  chr15:39140581-39140612
  hyper

SEQ ID NO: 38872 - DNA, 57 bp, Homo sapiens; identical to SEQ ID NO: 5289
  chr15:41046992-41047049
  hyper

SEQ ID NO: 38873 - DNA, 31 bp, Homo sapiens; identical to SEQ ID NO: 5290
  chr15:41055852-41055883
  hyper

SEQ ID NO: 38874 - DNA, 84 bp, Homo sapiens; identical to SEQ ID NO: 5291
  chr15:41523077-41523161
  hyper

SEQ ID NO: 38875 - DNA, 77 bp, Homo sapiens; identical to SEQ ID NO: 5293
  chr15:42112222-42112299
  hyper

SEQ ID NO: 38876 - DNA, 31 bp, Homo sapiens; identical to SEQ ID NO: 5294
  chr15:42112324-42112355
  hyper

SEQ ID NO: 38877 - DNA, 31 bp, Homo sapiens; identical to SEQ ID NO: 5295
  chr15:42112392-42112423
  hyper

SEQ ID NO: 38878 - DNA, 2 bp, Homo sapiens
  chr15:42868394-42868396
  hyper
aa

SEQ ID NO: 38879 - DNA, 158 bp, Homo sapiens; identical to SEQ ID NO: 5297
  chr15:44038551-44038709
  hyper

SEQ ID NO: 38880 - DNA, 89 bp, Homo sapiens; identical to SEQ ID NO: 5298
  chr15:44068729-44068818
  hyper

SEQ ID NO: 38881 - DNA, 44 bp, Homo sapiens; identical to SEQ ID NO: 5299
  chr15:44487114-44487158
  hyper

SEQ ID NO: 38882 - DNA, 31 bp, Homo sapiens; identical to SEQ ID NO: 5300
  chr15:44487214-44487245
  hyper

SEQ ID NO: 38883 - DNA, 31 bp, Homo sapiens; identical to SEQ ID NO: 5301
  chr15:48470239-48470270
  hyper

SEQ ID NO: 38884 - DNA, 31 bp, Homo sapiens; identical to SEQ ID NO: 5303
  chr15:49254968-49254999
  hyper

SEQ ID NO: 38885 - DNA, 35 bp, Homo sapiens; identical to SEQ ID NO: 5304
  chr15:49448551-49448586
  hyper

SEQ ID NO: 38886 - DNA, 31 bp, Homo sapiens; identical to SEQ ID NO: 5305
  chr15:51812127-51812158
  hyper

SEQ ID NO: 38887 - DNA, 43 bp, Homo sapiens; identical to SEQ ID NO: 5306
  chr15:52029518-52029561
  hyper

SEQ ID NO: 38888 - DNA, 50 bp, Homo sapiens; identical to SEQ ID NO: 5307
  chr15:52587420-52587470
  hyper

SEQ ID NO: 38889 - DNA, 54 bp, Homo sapiens; identical to SEQ ID NO: 5308
  chr15:52587471-52587525
  hyper

SEQ ID NO: 38890 - DNA, 80 bp, Homo sapiens; identical to SEQ ID NO: 5309
  chr15:52587536-52587616
  hyper

SEQ ID NO: 38891 - DNA, 38 bp, Homo sapiens; identical to SEQ ID NO: 5310
  chr15:52587620-52587658
  hyper

SEQ ID NO: 38892 - DNA, 101 bp, Homo sapiens; identical to SEQ ID NO: 5311
  chr15:52587760-52587861
  hyper

SEQ ID NO: 38893 - DNA, 55 bp, Homo sapiens; identical to SEQ ID NO: 5312
  chr15:52588029-52588084
  hyper

SEQ ID NO: 38894 - DNA, 38 bp, Homo sapiens; identical to SEQ ID NO: 5313
  chr15:52820462-52820500
  hyper

SEQ ID NO: 38895 - DNA, 35 bp, Homo sapiens; identical to SEQ ID NO: 5314
  chr15:52820647-52820682
  hyper

SEQ ID NO: 38896 - DNA, 152 bp, Homo sapiens; identical to SEQ ID NO: 5315
  chr15:52820687-52820839
  hyper

SEQ ID NO: 38897 - DNA, 31 bp, Homo sapiens; identical to SEQ ID NO: 5316
  chr15:52972047-52972078
  hyper

SEQ ID NO: 38898 - DNA, 49 bp, Homo sapiens; identical to SEQ ID NO: 5317
  chr15:55699899-55699948
  hyper

SEQ ID NO: 38899 - DNA, 31 bp, Homo sapiens; identical to SEQ ID NO: 5318
  chr15:55699958-55699989
  hyper

SEQ ID NO: 38900 - DNA, 103 bp, Homo sapiens; identical to SEQ ID NO: 5320
  chr15:56285863-56285966
  hyper

SEQ ID NO: 38901 - DNA, 51 bp, Homo sapiens; identical to SEQ ID NO: 5321
  chr15:56286050-56286101
  hyper

SEQ ID NO: 38902 - DNA, 41 bp, Homo sapiens; identical to SEQ ID NO: 5322
  chr15:56286123-56286164
  hyper

SEQ ID NO: 38903 - DNA, 95 bp, Homo sapiens; identical to SEQ ID NO: 5323
  chr15:56286174-56286269
  hyper

SEQ ID NO: 38904 - DNA, 185 bp, Homo sapiens; identical to SEQ ID NO: 5324
  chr15:57668692-57668877
  hyper

SEQ ID NO: 38905 - DNA, 48 bp, Homo sapiens; identical to SEQ ID NO: 5325
  chr15:57668967-57669015
  hyper

SEQ ID NO: 38906 - DNA, 43 bp, Homo sapiens; identical to SEQ ID NO: 5326
  chr15:57884056-57884099
  hyper

SEQ ID NO: 38907 - DNA, 49 bp, Homo sapiens; identical to SEQ ID NO: 5327
  chr15:59664056-59664105
  hyper

SEQ ID NO: 38908 - DNA, 110 bp, Homo sapiens; identical to SEQ ID NO: 5328
  chr15:59664434-59664544
  hyper

SEQ ID NO: 38909 - DNA, 80 bp, Homo sapiens; identical to SEQ ID NO: 5329
  chr15:59664618-59664698
  hyper

SEQ ID NO: 38910 - DNA, 31 bp, Homo sapiens; identical to SEQ ID NO: 5330
  chr15:59664916-59664947
  hyper

SEQ ID NO: 38911 - DNA, 48 bp, Homo sapiens; identical to SEQ ID NO: 5332
  chr15:62683438-62683486
  hyper

SEQ ID NO: 38912 - DNA, 80 bp, Homo sapiens; identical to SEQ ID NO: 5333
  chr15:62683492-62683572
  hyper

SEQ ID NO: 38913 - DNA, 37 bp, Homo sapiens
  chr15:62684313-62684350
  hyper
ccgcggctgcgtgttctgctctcgcagctcgtagagg

SEQ ID NO: 38914 - DNA, 31 bp, Homo sapiens; identical to SEQ ID NO: 5335
  chr15:63130478-63130509
  hyper

SEQ ID NO: 38915 - DNA, 54 bp, Homo sapiens; identical to SEQ ID NO: 5336
  chr15:63130537-63130591
  hyper

SEQ ID NO: 38916 - DNA, 31 bp, Homo sapiens; identical to SEQ ID NO: 5337
  chr15:63334787-63334818
  hyper

SEQ ID NO: 38917 - DNA, 31 bp, Homo sapiens; identical to SEQ ID NO: 5338
  chr15:63341572-63341603
  hyper

SEQ ID NO: 38918 - DNA, 44 bp, Homo sapiens; identical to SEQ ID NO: 5339
  chr15:63795900-63795944
  hyper

SEQ ID NO: 38919 - DNA, 31 bp, Homo sapiens; identical to SEQ ID NO: 5340
  chr15:63795981-63796012
  hyper

SEQ ID NO: 38920 - DNA, 31 bp, Homo sapiens; identical to SEQ ID NO: 5341
  chr15:63796025-63796056
  hyper

SEQ ID NO: 38921 - DNA, 31 bp, Homo sapiens; identical to SEQ ID NO: 5342
  chr15:64454727-64454758
  hyper

SEQ ID NO: 38922 - DNA, 31 bp, Homo sapiens; identical to SEQ ID NO: 5343
  chr15:66911653-66911684
  hyper

SEQ ID NO: 38923 - DNA, 31 bp, Homo sapiens; identical to SEQ ID NO: 5344
  chr15:66994355-66994386
  hyper

SEQ ID NO: 38924 - DNA, 61 bp, Homo sapiens; identical to SEQ ID NO: 5345
  chr15:66994944-66995005
  hyper

SEQ ID NO: 38925 - DNA, 40 bp, Homo sapiens; identical to SEQ ID NO: 5346
  chr15:66995092-66995132
  hyper

SEQ ID NO: 38926 - DNA, 49 bp, Homo sapiens
  chr15:66995186-66995235
  hyper
cacatttaggggttcgcgcgagcgctttgtgctcatggaccagccgcac

SEQ ID NO: 38927 - DNA, 132 bp, Homo sapiens; identical to SEQ ID NO: 5348
  chr15:66995346-66995478
  hyper

SEQ ID NO: 38928 - DNA, 71 bp, Homo sapiens; identical to SEQ ID NO: 5349
  chr15:66995599-66995670
  hyper

SEQ ID NO: 38929 - DNA, 74 bp, Homo sapiens; identical to SEQ ID NO: 5350
  chr15:66995817-66995891
  hyper

SEQ ID NO: 38930 - DNA, 51 bp, Homo sapiens; identical to SEQ ID NO: 5351
  chr15:66996048-66996099
  hyper

SEQ ID NO: 38931 - DNA, 31 bp, Homo sapiens; identical to SEQ ID NO: 5352
  chr15:67135310-67135341
  hyper

SEQ ID NO: 38932 - DNA, 62 bp, Homo sapiens; identical to SEQ ID NO: 5353
  chr15:67359190-67359252
  hyper

SEQ ID NO: 38933 - DNA, 72 bp, Homo sapiens; identical to SEQ ID NO: 5354
  chr15:68177207-68177279
  hyper

SEQ ID NO: 38934 - DNA, 31 bp, Homo sapiens; identical to SEQ ID NO: 5355
  chr15:68347863-68347894
  hyper

SEQ ID NO: 38935 - DNA, 55 bp, Homo sapiens; identical to SEQ ID NO: 5356
  chr15:68347907-68347962
  hyper

SEQ ID NO: 38936 - DNA, 31 bp, Homo sapiens; identical to SEQ ID NO: 5357
  chr15:69351241-69351272
  hyper

SEQ ID NO: 38937 - DNA, 16 bp, Homo sapiens
  chr15:69366730-69366746
  hyper
tcggggcaggaaagca

SEQ ID NO: 38938 - DNA, 50 bp, Homo sapiens; identical to SEQ ID NO: 5359
  chr15:69366759-69366809
  hyper

SEQ ID NO: 38939 - DNA, 31 bp, Homo sapiens; identical to SEQ ID NO: 5360
  chr15:69453522-69453553
  hyper

SEQ ID NO: 38940 - DNA, 148 bp, Homo sapiens; identical to SEQ ID NO: 5361
  chr15:69453587-69453735
  hyper

SEQ ID NO: 38941 - DNA, 77 bp, Homo sapiens; identical to SEQ ID NO: 5362
  chr15:69453740-69453817
  hyper

SEQ ID NO: 38942 - DNA, 31 bp, Homo sapiens; identical to SEQ ID NO: 5363
  chr15:69453945-69453976
  hyper

SEQ ID NO: 38943 - DNA, 69 bp, Homo sapiens; identical to SEQ ID NO: 5364
  chr15:69591244-69591313
  hyper

SEQ ID NO: 38944 - DNA, 45 bp, Homo sapiens; identical to SEQ ID NO: 5365
  chr15:69591722-69591767
  hyper

SEQ ID NO: 38945 - DNA, 26 bp, Homo sapiens
  chr15:71055980-71056006
  hyper
cgggaatggggcgggacttccctttt

SEQ ID NO: 38946 - DNA, 44 bp, Homo sapiens; identical to SEQ ID NO: 5368
  chr15:71184310-71184354
  hyper

SEQ ID NO: 38947 - DNA, 43 bp, Homo sapiens; identical to SEQ ID NO: 5369
  chr15:71184362-71184405
  hyper

SEQ ID NO: 38948 - DNA, 31 bp, Homo sapiens; identical to SEQ ID NO: 5370
  chr15:71184965-71184996
  hyper

SEQ ID NO: 38949 - DNA, 130 bp, Homo sapiens; identical to SEQ ID NO: 5371
  chr15:71184997-71185127
  hyper

SEQ ID NO: 38950 - DNA, 57 bp, Homo sapiens; identical to SEQ ID NO: 5372
  chr15:71185143-71185200
  hyper

SEQ ID NO: 38951 - DNA, 41 bp, Homo sapiens
  chr15:71185225-71185266
  hyper
ctcctatcatgattcccgggaaatatcgctctgtttctggc

SEQ ID NO: 38952 - DNA, 31 bp, Homo sapiens; identical to SEQ ID NO: 5374
  chr15:71185319-71185350
  hyper

SEQ ID NO: 38953 - DNA, 37 bp, Homo sapiens; identical to SEQ ID NO: 5375
  chr15:71185356-71185393
  hyper

SEQ ID NO: 38954 - DNA, 31 bp, Homo sapiens; identical to SEQ ID NO: 5376
  chr15:71185405-71185436
  hyper

SEQ ID NO: 38955 - DNA, 23 bp, Homo sapiens
  chr15:72564619-72564642
  hyper
gcctccccaggaaagacgctctg

SEQ ID NO: 38956 - DNA, 31 bp, Homo sapiens; identical to SEQ ID NO: 5380
  chr15:72827182-72827213
  hyper

SEQ ID NO: 38957 - DNA, 89 bp, Homo sapiens; identical to SEQ ID NO: 5381
  chr15:73344007-73344096
  hyper

SEQ ID NO: 38958 - DNA, 39 bp, Homo sapiens; identical to SEQ ID NO: 5382
  chr15:73611230-73611269
  hyper

SEQ ID NO: 38959 - DNA, 96 bp, Homo sapiens; identical to SEQ ID NO: 5383
  chr15:73661191-73661287
  hyper

SEQ ID NO: 38960 - DNA, 38 bp, Homo sapiens; identical to SEQ ID NO: 5384
  chr15:73661349-73661387
  hyper

SEQ ID NO: 38961 - DNA, 58 bp, Homo sapiens; identical to SEQ ID NO: 5385
  chr15:73976030-73976088
  hyper

SEQ ID NO: 38962 - DNA, 161 bp, Homo sapiens; identical to SEQ ID NO: 5386
  chr15:73976464-73976625
  hyper

SEQ ID NO: 38963 - DNA, 63 bp, Homo sapiens; identical to SEQ ID NO: 5387
  chr15:73976661-73976724
  hyper

SEQ ID NO: 38964 - DNA, 31 bp, Homo sapiens; identical to SEQ ID NO: 5388
  chr15:73976753-73976784
  hyper

SEQ ID NO: 38965 - DNA, 31 bp, Homo sapiens; identical to SEQ ID NO: 5389
  chr15:73976947-73976978
  hyper

SEQ ID NO: 38966 - DNA, 169 bp, Homo sapiens; identical to SEQ ID NO: 5390
  chr15:73976983-73977152
  hyper

SEQ ID NO: 38967 - DNA, 95 bp, Homo sapiens; identical to SEQ ID NO: 5391
  chr15:73977229-73977324
  hyper

SEQ ID NO: 38968 - DNA, 31 bp, Homo sapiens; identical to SEQ ID NO: 5392
  chr15:73977415-73977446
  hyper

SEQ ID NO: 38969 - DNA, 46 bp, Homo sapiens; identical to SEQ ID NO: 5393
  chr15:74219415-74219461
  hyper

SEQ ID NO: 38970 - DNA, 31 bp, Homo sapiens; identical to SEQ ID NO: 5394
  chr15:74219965-74219996
  hyper

SEQ ID NO: 38971 - DNA, 38 bp, Homo sapiens; identical to SEQ ID NO: 5395
  chr15:74220039-74220077
  hyper

SEQ ID NO: 38972 - DNA, 85 bp, Homo sapiens; identical to SEQ ID NO: 5396
  chr15:74685055-74685140
  hyper

SEQ ID NO: 38973 - DNA, 31 bp, Homo sapiens; identical to SEQ ID NO: 5397
  chr15:74685153-74685184
  hyper

SEQ ID NO: 38974 - DNA, 44 bp, Homo sapiens; identical to SEQ ID NO: 5398
  chr15:74725611-74725655
  hyper

SEQ ID NO: 38975 - DNA, 99 bp, Homo sapiens; identical to SEQ ID NO: 5400
  chr15:75640557-75640656
  hyper

SEQ ID NO: 38976 - DNA, 37 bp, Homo sapiens; identical to SEQ ID NO: 5401
  chr15:75640774-75640811
  hyper

SEQ ID NO: 38977 - DNA, 31 bp, Homo sapiens; identical to SEQ ID NO: 5402
  chr15:75745114-75745145
  hyper

SEQ ID NO: 38978 - DNA, 31 bp, Homo sapiens; identical to SEQ ID NO: 5403
  chr15:75939284-75939315
  hyper

SEQ ID NO: 38979 - DNA, 40 bp, Homo sapiens; identical to SEQ ID NO: 5404
  chr15:75939488-75939528
  hyper

SEQ ID NO: 38980 - DNA, 31 bp, Homo sapiens; identical to SEQ ID NO: 5405
  chr15:75939532-75939563
  hyper

SEQ ID NO: 38981 - DNA, 47 bp, Homo sapiens; identical to SEQ ID NO: 5406
  chr15:75939697-75939744
  hyper

SEQ ID NO: 38982 - DNA, 31 bp, Homo sapiens; identical to SEQ ID NO: 5407
  chr15:75976253-75976284
  hyper

SEQ ID NO: 38983 - DNA, 60 bp, Homo sapiens; identical to SEQ ID NO: 5408
  chr15:75976296-75976356
  hyper

SEQ ID NO: 38984 - DNA, 2 bp, Homo sapiens
  chr15:76628326-76628328
  hyper
gg

SEQ ID NO: 38985 - DNA, 31 bp, Homo sapiens; identical to SEQ ID NO: 5415
  chr15:78112409-78112440
  hyper

SEQ ID NO: 38986 - DNA, 88 bp, Homo sapiens; identical to SEQ ID NO: 5416
  chr15:79237307-79237395
  hyper

SEQ ID NO: 38987 - DNA, 60 bp, Homo sapiens; identical to SEQ ID NO: 5418
  chr15:80988125-80988185
  hyper

SEQ ID NO: 38988 - DNA, 173 bp, Homo sapiens; identical to SEQ ID NO: 5419
  chr15:80988218-80988391
  hyper

SEQ ID NO: 38989 - DNA, 31 bp, Homo sapiens; identical to SEQ ID NO: 5420
  chr15:81071386-81071417
  hyper

SEQ ID NO: 38990 - DNA, 31 bp, Homo sapiens; identical to SEQ ID NO: 5421
  chr15:81071672-81071703
  hyper

SEQ ID NO: 38991 - DNA, 31 bp, Homo sapiens; identical to SEQ ID NO: 5422
  chr15:81071922-81071953
  hyper

SEQ ID NO: 38992 - DNA, 31 bp, Homo sapiens; identical to SEQ ID NO: 5423
  chr15:81071960-81071991
  hyper

SEQ ID NO: 38993 - DNA, 31 bp, Homo sapiens; identical to SEQ ID NO: 5424
  chr15:81072283-81072314
  hyper

SEQ ID NO: 38994 - DNA, 31 bp, Homo sapiens; identical to SEQ ID NO: 5425
  chr15:81072354-81072385
  hyper

SEQ ID NO: 38995 - DNA, 31 bp, Homo sapiens; identical to SEQ ID NO: 5426
  chr15:81294106-81294137
  hyper

SEQ ID NO: 38996 - DNA, 50 bp, Homo sapiens; identical to SEQ ID NO: 5427
  chr15:81294176-81294226
  hyper

SEQ ID NO: 38997 - DNA, 65 bp, Homo sapiens; identical to SEQ ID NO: 5430
  chr15:85525135-85525200
  hyper

SEQ ID NO: 38998 - DNA, 105 bp, Homo sapiens; identical to SEQ ID NO: 5431
  chr15:85525286-85525391
  hyper

SEQ ID NO: 38999 - DNA, 81 bp, Homo sapiens; identical to SEQ ID NO: 5432
  chr15:85525492-85525573
  hyper

SEQ ID NO: 39000 - DNA, 186 bp, Homo sapiens
  chr15:89438594-89438780
  hyper
gggaggtgtggggacccgcagggcacccaaagcggtaagggaggaacccggcccgcacacagccccagaagcccagcgacccctaagccacgtaccgtccccaggcagctcctcgacggctagagctctcgggggccgcgagctgtcccggtccaaggcagcagtctgatttcggggaaattaaaa

SEQ ID NO: 39001 - DNA, 135 bp, Homo sapiens; identical to SEQ ID NO: 5435
  chr15:90456073-90456208
  hyper

SEQ ID NO: 39002 - DNA, 74 bp, Homo sapiens; identical to SEQ ID NO: 5436
  chr15:90792592-90792666
  hyper

SEQ ID NO: 39003 - DNA, 75 bp, Homo sapiens; identical to SEQ ID NO: 5437
  chr15:90792735-90792810
  hyper

SEQ ID NO: 39004 - DNA, 31 bp, Homo sapiens; identical to SEQ ID NO: 5438
  chr15:93655833-93655864
  hyper

SEQ ID NO: 39005 - DNA, 31 bp, Homo sapiens; identical to SEQ ID NO: 5439
  chr15:96873708-96873739
  hyper

SEQ ID NO: 39006 - DNA, 71 bp, Homo sapiens; identical to SEQ ID NO: 5440
  chr15:96873742-96873813
  hyper

SEQ ID NO: 39007 - DNA, 83 bp, Homo sapiens; identical to SEQ ID NO: 5441
  chr15:96873909-96873992
  hyper

SEQ ID NO: 39008 - DNA, 51 bp, Homo sapiens
  chr15:96876487-96876538
  hyper
cgctcggcgcggggcgcgggctccgggttggggcgagccaacgccggggtt

SEQ ID NO: 39009 - DNA, 66 bp, Homo sapiens; identical to SEQ ID NO: 5444
  chr15:96876660-96876726
  hyper

SEQ ID NO: 39010 - DNA, 87 bp, Homo sapiens; identical to SEQ ID NO: 5445
  chr15:96899903-96899990
  hyper

SEQ ID NO: 39011 - DNA, 78 bp, Homo sapiens; identical to SEQ ID NO: 5446
  chr15:98503354-98503432
  hyper

SEQ ID NO: 39012 - DNA, 63 bp, Homo sapiens; identical to SEQ ID NO: 5448
  chr15:98504280-98504343
  hyper

SEQ ID NO: 39013 - DNA, 36 bp, Homo sapiens; identical to SEQ ID NO: 5449
  chr15:99191461-99191497
  hyper

SEQ ID NO: 39014 - DNA, 97 bp, Homo sapiens; identical to SEQ ID NO: 5450
  chr15:99191541-99191638
  hyper

SEQ ID NO: 39015 - DNA, 49 bp, Homo sapiens; identical to SEQ ID NO: 5451
  chr15:99192944-99192993
  hyper

SEQ ID NO: 39016 - DNA, 39 bp, Homo sapiens; identical to SEQ ID NO: 5453
  chr15:99955138-99955177
  hyper

SEQ ID NO: 39017 - DNA, 61 bp, Homo sapiens; identical to SEQ ID NO: 5454
  chr15:100273843-100273904
  hyper

SEQ ID NO: 39018 - DNA, 31 bp, Homo sapiens; identical to SEQ ID NO: 5455
  chr15:100273945-100273976
  hyper

SEQ ID NO: 39019 - DNA, 2 bp, Homo sapiens
  chr15:100346201-100346203
  hyper
gc

SEQ ID NO: 39020 - DNA, 2 bp, Homo sapiens
  chr15:101459069-101459071
  hyper
ta

SEQ ID NO: 39021 - DNA, 20 bp, Homo sapiens
  chr15:101459313-101459333
  hyper
gtgcccgaacctgaaggagg

SEQ ID NO: 39022 - DNA, 31 bp, Homo sapiens
  chr15:101459976-101460007
  hyper
cgggaaagctgggaagcggaggcaagagaca

SEQ ID NO: 39023 - DNA, 134 bp, Homo sapiens; identical to SEQ ID NO: 5461
  chr15:101835657-101835791
  hyper

SEQ ID NO: 39024 - DNA, 55 bp, Homo sapiens; identical to SEQ ID NO: 5462
  chr15:101835797-101835852
  hyper

SEQ ID NO: 39025 - DNA, 47 bp, Homo sapiens; identical to SEQ ID NO: 5464
  chr16:122247-122294
  hyper

SEQ ID NO: 39026 - DNA, 40 bp, Homo sapiens; identical to SEQ ID NO: 5466
  chr16:577639-577679
  hyper

SEQ ID NO: 39027 - DNA, 51 bp, Homo sapiens; identical to SEQ ID NO: 5468
  chr16:717959-718010
  hyper

SEQ ID NO: 39028 - DNA, 112 bp, Homo sapiens; identical to SEQ ID NO: 5469
  chr16:765206-765318
  hyper

SEQ ID NO: 39029 - DNA, 63 bp, Homo sapiens; identical to SEQ ID NO: 5470
  chr16:765585-765648
  hyper

SEQ ID NO: 39030 - DNA, 31 bp, Homo sapiens; identical to SEQ ID NO: 5471
  chr16:771483-771514
  hyper

SEQ ID NO: 39031 - DNA, 31 bp, Homo sapiens; identical to SEQ ID NO: 5472
  chr16:1153581-1153612
  hyper

SEQ ID NO: 39032 - DNA, 59 bp, Homo sapiens; identical to SEQ ID NO: 5473
  chr16:1429111-1429170
  hyper

SEQ ID NO: 39033 - DNA, 153 bp, Homo sapiens; identical to SEQ ID NO: 5474
  chr16:1660448-1660601
  hyper

SEQ ID NO: 39034 - DNA, 155 bp, Homo sapiens; identical to SEQ ID NO: 5475
  chr16:1660659-1660814
  hyper

SEQ ID NO: 39035 - DNA, 31 bp, Homo sapiens; identical to SEQ ID NO: 5476
  chr16:1660852-1660883
  hyper

SEQ ID NO: 39036 - DNA, 53 bp, Homo sapiens; identical to SEQ ID NO: 5477
  chr16:1663979-1664032
  hyper

SEQ ID NO: 39037 - DNA, 116 bp, Homo sapiens; identical to SEQ ID NO: 5478
  chr16:1664480-1664596
  hyper

SEQ ID NO: 39038 - DNA, 31 bp, Homo sapiens; identical to SEQ ID NO: 5479
  chr16:1664614-1664645
  hyper

SEQ ID NO: 39039 - DNA, 56 bp, Homo sapiens; identical to SEQ ID NO: 5480
  chr16:1877590-1877646
  hyper

SEQ ID NO: 39040 - DNA, 31 bp, Homo sapiens; identical to SEQ ID NO: 5481
  chr16:1877672-1877703
  hyper

SEQ ID NO: 39041 - DNA, 75 bp, Homo sapiens; identical to SEQ ID NO: 5482
  chr16:2033651-2033726
  hyper

SEQ ID NO: 39042 - DNA, 2 bp, Homo sapiens
  chr16:2040846-2040848
  hyper
ca

SEQ ID NO: 39043 - DNA, 31 bp, Homo sapiens; identical to SEQ ID NO: 5494
  chr16:2301985-2302016
  hyper

SEQ ID NO: 39044 - DNA, 61 bp, Homo sapiens; identical to SEQ ID NO: 5495
  chr16:2302034-2302095
  hyper

SEQ ID NO: 39045 - DNA, 31 bp, Homo sapiens; identical to SEQ ID NO: 5496
  chr16:2969679-2969710
  hyper

SEQ ID NO: 39046 - DNA, 31 bp, Homo sapiens; identical to SEQ ID NO: 5497
  chr16:3053912-3053943
  hyper

SEQ ID NO: 39047 - DNA, 31 bp, Homo sapiens; identical to SEQ ID NO: 5498
  chr16:3071261-3071292
  hyper

SEQ ID NO: 39048 - DNA, 69 bp, Homo sapiens
  chr16:3078384-3078453
  hyper
ctggcggatggcgcgcagcagctcccgagacagggagtctcgctccagcgagacgcggttgagctgcag

SEQ ID NO: 39049 - DNA, 37 bp, Homo sapiens; identical to SEQ ID NO: 5500
  chr16:3086763-3086800
  hyper

SEQ ID NO: 39050 - DNA, 112 bp, Homo sapiens; identical to SEQ ID NO: 5501
  chr16:3200662-3200774
  hyper

SEQ ID NO: 39051 - DNA, 116 bp, Homo sapiens; identical to SEQ ID NO: 5502
  chr16:3200795-3200911
  hyper

SEQ ID NO: 39052 - DNA, 55 bp, Homo sapiens; identical to SEQ ID NO: 5503
  chr16:3200930-3200985
  hyper

SEQ ID NO: 39053 - DNA, 31 bp, Homo sapiens; identical to SEQ ID NO: 5504
  chr16:3209045-3209076
  hyper

SEQ ID NO: 39054 - DNA, 7 bp, Homo sapiens
  chr16:3209093-3209100
  hyper
ctgcagg

SEQ ID NO: 39055 - DNA, 31 bp, Homo sapiens; identical to SEQ ID NO: 5513
  chr16:3222296-3222327
  hyper

SEQ ID NO: 39056 - DNA, 64 bp, Homo sapiens; identical to SEQ ID NO: 5517
  chr16:3766892-3766956
  hyper

SEQ ID NO: 39057 - DNA, 34 bp, Homo sapiens; identical to SEQ ID NO: 5518
  chr16:3781397-3781431
  hyper

SEQ ID NO: 39058 - DNA, 46 bp, Homo sapiens; identical to SEQ ID NO: 5519
  chr16:3781433-3781479
  hyper

SEQ ID NO: 39059 - DNA, 31 bp, Homo sapiens; identical to SEQ ID NO: 5520
  chr16:3781527-3781558
  hyper

SEQ ID NO: 39060 - DNA, 56 bp, Homo sapiens; identical to SEQ ID NO: 5521
  chr16:3931081-3931137
  hyper

SEQ ID NO: 39061 - DNA, 31 bp, Homo sapiens; identical to SEQ ID NO: 5522
  chr16:3931160-3931191
  hyper

SEQ ID NO: 39062 - DNA, 221 bp, Homo sapiens; identical to SEQ ID NO: 5523
  chr16:4166050-4166271
  hyper

SEQ ID NO: 39063 - DNA, 119 bp, Homo sapiens; identical to SEQ ID NO: 5524
  chr16:4166386-4166505
  hyper

SEQ ID NO: 39064 - DNA, 173 bp, Homo sapiens; identical to SEQ ID NO: 5525
  chr16:4166639-4166812
  hyper

SEQ ID NO: 39065 - DNA, 65 bp, Homo sapiens; identical to SEQ ID NO: 5526
  chr16:4166813-4166878
  hyper

SEQ ID NO: 39066 - DNA, 83 bp, Homo sapiens; identical to SEQ ID NO: 5527
  chr16:4166897-4166980
  hyper

SEQ ID NO: 39067 - DNA, 31 bp, Homo sapiens; identical to SEQ ID NO: 5528
  chr16:4233704-4233735
  hyper

SEQ ID NO: 39068 - DNA, 40 bp, Homo sapiens; identical to SEQ ID NO: 5529
  chr16:4233745-4233785
  hyper

SEQ ID NO: 39069 - DNA, 92 bp, Homo sapiens; identical to SEQ ID NO: 5530
  chr16:4234086-4234178
  hyper

SEQ ID NO: 39070 - DNA, 31 bp, Homo sapiens; identical to SEQ ID NO: 5531
  chr16:4366576-4366607
  hyper

SEQ ID NO: 39071 - DNA, 48 bp, Homo sapiens; identical to SEQ ID NO: 5532
  chr16:5007928-5007976
  hyper

SEQ ID NO: 39072 - DNA, 81 bp, Homo sapiens; identical to SEQ ID NO: 5533
  chr16:5007999-5008080
  hyper

SEQ ID NO: 39073 - DNA, 37 bp, Homo sapiens; identical to SEQ ID NO: 5534
  chr16:5008243-5008280
  hyper

SEQ ID NO: 39074 - DNA, 31 bp, Homo sapiens; identical to SEQ ID NO: 5535
  chr16:5008300-5008331
  hyper

SEQ ID NO: 39075 - DNA, 81 bp, Homo sapiens; identical to SEQ ID NO: 5536
  chr16:5008529-5008610
  hyper

SEQ ID NO: 39076 - DNA, 31 bp, Homo sapiens; identical to SEQ ID NO: 5537
  chr16:5121975-5122006
  hyper

SEQ ID NO: 39077 - DNA, 31 bp, Homo sapiens; identical to SEQ ID NO: 5538
  chr16:7615184-7615215
  hyper

SEQ ID NO: 39078 - DNA, 65 bp, Homo sapiens; identical to SEQ ID NO: 5539
  chr16:8767885-8767950
  hyper

SEQ ID NO: 39079 - DNA, 81 bp, Homo sapiens; identical to SEQ ID NO: 5540
  chr16:8767964-8768045
  hyper

SEQ ID NO: 39080 - DNA, 31 bp, Homo sapiens; identical to SEQ ID NO: 5541
  chr16:8768189-8768220
  hyper

SEQ ID NO: 39081 - DNA, 37 bp, Homo sapiens; identical to SEQ ID NO: 5542
  chr16:8768282-8768319
  hyper

SEQ ID NO: 39082 - DNA, 138 bp, Homo sapiens; identical to SEQ ID NO: 5543
  chr16:8768484-8768622
  hyper

SEQ ID NO: 39083 - DNA, 72 bp, Homo sapiens; identical to SEQ ID NO: 5544
  chr16:9186866-9186938
  hyper

SEQ ID NO: 39084 - DNA, 56 bp, Homo sapiens; identical to SEQ ID NO: 5545
  chr16:9186974-9187030
  hyper

SEQ ID NO: 39085 - DNA, 31 bp, Homo sapiens; identical to SEQ ID NO: 5546
  chr16:9187163-9187194
  hyper

SEQ ID NO: 39086 - DNA, 47 bp, Homo sapiens; identical to SEQ ID NO: 5547
  chr16:9229668-9229715
  hyper

SEQ ID NO: 39087 - DNA, 32 bp, Homo sapiens
  chr16:9229729-9229761
  hyper
ttagatgaggacactgcggatcaagtattcat

SEQ ID NO: 39088 - DNA, 31 bp, Homo sapiens; identical to SEQ ID NO: 5549
  chr16:10674032-10674063
  hyper

SEQ ID NO: 39089 - DNA, 348 bp, Homo sapiens; identical to SEQ ID NO: 5550
  chr16:10674137-10674485
  hyper

SEQ ID NO: 39090 - DNA, 191 bp, Homo sapiens; identical to SEQ ID NO: 5551
  chr16:10674486-10674677
  hyper

SEQ ID NO: 39091 - DNA, 38 bp, Homo sapiens; identical to SEQ ID NO: 5552
  chr16:13877529-13877567
  hyper

SEQ ID NO: 39092 - DNA, 31 bp, Homo sapiens; identical to SEQ ID NO: 5553
  chr16:13877603-13877634
  hyper

SEQ ID NO: 39093 - DNA, 43 bp, Homo sapiens; identical to SEQ ID NO: 5554
  chr16:13877664-13877707
  hyper

SEQ ID NO: 39094 - DNA, 52 bp, Homo sapiens; identical to SEQ ID NO: 5555
  chr16:14396963-14397015
  hyper

SEQ ID NO: 39095 - DNA, 32 bp, Homo sapiens
  chr16:15951337-15951369
  hyper
gagggccggctgtgcagcgtgaagggtaggga

SEQ ID NO: 39096 - DNA, 31 bp, Homo sapiens; identical to SEQ ID NO: 5557
  chr16:16155966-16155997
  hyper

SEQ ID NO: 39097 - DNA, 52 bp, Homo sapiens; identical to SEQ ID NO: 5558
  chr16:16156001-16156053
  hyper

SEQ ID NO: 39098 - DNA, 34 bp, Homo sapiens; identical to SEQ ID NO: 5559
  chr16:18813073-18813107
  hyper

SEQ ID NO: 39099 - DNA, 31 bp, Homo sapiens; identical to SEQ ID NO: 5560
  chr16:18813109-18813140
  hyper

SEQ ID NO: 39100 - DNA, 51 bp, Homo sapiens; identical to SEQ ID NO: 5561
  chr16:18995183-18995234
  hyper

SEQ ID NO: 39101 - DNA, 31 bp, Homo sapiens; identical to SEQ ID NO: 5562
  chr16:19097801-19097832
  hyper

SEQ ID NO: 39102 - DNA, 48 bp, Homo sapiens; identical to SEQ ID NO: 5563
  chr16:20817585-20817633
  hyper

SEQ ID NO: 39103 - DNA, 60 bp, Homo sapiens; identical to SEQ ID NO: 5567
  chr16:23159922-23159982
  hyper

SEQ ID NO: 39104 - DNA, 45 bp, Homo sapiens; identical to SEQ ID NO: 5577
  chr16:24354627-24354672
  hyper

SEQ ID NO: 39105 - DNA, 40 bp, Homo sapiens; identical to SEQ ID NO: 5578
  chr16:27280120-27280160
  hyper

SEQ ID NO: 39106 - DNA, 80 bp, Homo sapiens; identical to SEQ ID NO: 5579
  chr16:29606231-29606311
  hyper

SEQ ID NO: 39107 - DNA, 86 bp, Homo sapiens; identical to SEQ ID NO: 5580
  chr16:29607009-29607095
  hyper

SEQ ID NO: 39108 - DNA, 31 bp, Homo sapiens; identical to SEQ ID NO: 5581
  chr16:29607096-29607127
  hyper

SEQ ID NO: 39109 - DNA, 36 bp, Homo sapiens; identical to SEQ ID NO: 5582
  chr16:29691805-29691841
  hyper

SEQ ID NO: 39110 - DNA, 31 bp, Homo sapiens; identical to SEQ ID NO: 5583
  chr16:29822267-29822298
  hyper

SEQ ID NO: 39111 - DNA, 50 bp, Homo sapiens; identical to SEQ ID NO: 5584
  chr16:29822622-29822672
  hyper

SEQ ID NO: 39112 - DNA, 31 bp, Homo sapiens; identical to SEQ ID NO: 5586
  chr16:29836136-29836167
  hyper

SEQ ID NO: 39113 - DNA, 49 bp, Homo sapiens; identical to SEQ ID NO: 5587
  chr16:29910604-29910653
  hyper

SEQ ID NO: 39114 - DNA, 31 bp, Homo sapiens; identical to SEQ ID NO: 5588
  chr16:29910742-29910773
  hyper

SEQ ID NO: 39115 - DNA, 63 bp, Homo sapiens; identical to SEQ ID NO: 5589
  chr16:29910887-29910950
  hyper

SEQ ID NO: 39116 - DNA, 77 bp, Homo sapiens; identical to SEQ ID NO: 5590
  chr16:30786650-30786727
  hyper

SEQ ID NO: 39117 - DNA, 230 bp, Homo sapiens; identical to SEQ ID NO: 5591
  chr16:30787246-30787476
  hyper

SEQ ID NO: 39118 - DNA, 114 bp, Homo sapiens; identical to SEQ ID NO: 5592
  chr16:30797728-30797842
  hyper

SEQ ID NO: 39119 - DNA, 38 bp, Homo sapiens; identical to SEQ ID NO: 5593
  chr16:30797847-30797885
  hyper

SEQ ID NO: 39120 - DNA, 93 bp, Homo sapiens; identical to SEQ ID NO: 5594
  chr16:30797943-30798036
  hyper

SEQ ID NO: 39121 - DNA, 74 bp, Homo sapiens; identical to SEQ ID NO: 5595
  chr16:30798318-30798392
  hyper

SEQ ID NO: 39122 - DNA, 50 bp, Homo sapiens; identical to SEQ ID NO: 5596
  chr16:30798405-30798455
  hyper

SEQ ID NO: 39123 - DNA, 83 bp, Homo sapiens; identical to SEQ ID NO: 5597
  chr16:30798471-30798554
  hyper

SEQ ID NO: 39124 - DNA, 31 bp, Homo sapiens; identical to SEQ ID NO: 5598
  chr16:30798582-30798613
  hyper

SEQ ID NO: 39125 - DNA, 61 bp, Homo sapiens; identical to SEQ ID NO: 5599
  chr16:30816841-30816902
  hyper

SEQ ID NO: 39126 - DNA, 34 bp, Homo sapiens
  chr16:30817038-30817072
  hyper
cagaggcagtgccgaggaccgaaggaggggaagg

SEQ ID NO: 39127 - DNA, 156 bp, Homo sapiens; identical to SEQ ID NO: 5601
  chr16:30817082-30817238
  hyper

SEQ ID NO: 39128 - DNA, 31 bp, Homo sapiens; identical to SEQ ID NO: 5602
  chr16:30959909-30959940
  hyper

SEQ ID NO: 39129 - DNA, 31 bp, Homo sapiens; identical to SEQ ID NO: 5603
  chr16:30964524-30964555
  hyper

SEQ ID NO: 39130 - DNA, 31 bp, Homo sapiens; identical to SEQ ID NO: 5604
  chr16:31075213-31075244
  hyper

SEQ ID NO: 39131 - DNA, 137 bp, Homo sapiens; identical to SEQ ID NO: 5605
  chr16:31153836-31153973
  hyper

SEQ ID NO: 39132 - DNA, 134 bp, Homo sapiens; identical to SEQ ID NO: 5606
  chr16:31153974-31154108
  hyper

SEQ ID NO: 39133 - DNA, 44 bp, Homo sapiens; identical to SEQ ID NO: 5607
  chr16:31483757-31483801
  hyper

SEQ ID NO: 39134 - DNA, 110 bp, Homo sapiens; identical to SEQ ID NO: 5608
  chr16:50188125-50188235
  hyper

SEQ ID NO: 39135 - DNA, 31 bp, Homo sapiens; identical to SEQ ID NO: 5609
  chr16:51167898-51167929
  hyper

SEQ ID NO: 39136 - DNA, 31 bp, Homo sapiens; identical to SEQ ID NO: 5610
  chr16:52579312-52579343
  hyper

SEQ ID NO: 39137 - DNA, 53 bp, Homo sapiens
  chr16:52580659-52580712
  hyper
ggccgggactggggttcgccggggccgggacccgcctcctcgccgccgctaga

SEQ ID NO: 39138 - DNA, 94 bp, Homo sapiens; identical to SEQ ID NO: 5612
  chr16:54962470-54962564
  hyper

SEQ ID NO: 39139 - DNA, 93 bp, Homo sapiens; identical to SEQ ID NO: 5613
  chr16:54963084-54963177
  hyper

SEQ ID NO: 39140 - DNA, 47 bp, Homo sapiens; identical to SEQ ID NO: 5614
  chr16:54963207-54963254
  hyper

SEQ ID NO: 39141 - DNA, 88 bp, Homo sapiens; identical to SEQ ID NO: 5615
  chr16:54964044-54964132
  hyper

SEQ ID NO: 39142 - DNA, 31 bp, Homo sapiens; identical to SEQ ID NO: 5616
  chr16:55499095-55499126
  hyper

SEQ ID NO: 39143 - DNA, 31 bp, Homo sapiens; identical to SEQ ID NO: 5617
  chr16:55499157-55499188
  hyper

SEQ ID NO: 39144 - DNA, 31 bp, Homo sapiens; identical to SEQ ID NO: 5618
  chr16:55499203-55499234
  hyper

SEQ ID NO: 39145 - DNA, 105 bp, Homo sapiens; identical to SEQ ID NO: 5619
  chr16:56642230-56642335
  hyper

SEQ ID NO: 39146 - DNA, 77 bp, Homo sapiens; identical to SEQ ID NO: 5620
  chr16:56642344-56642421
  hyper

SEQ ID NO: 39147 - DNA, 39 bp, Homo sapiens; identical to SEQ ID NO: 5621
  chr16:57126698-57126737
  hyper

SEQ ID NO: 39148 - DNA, 38 bp, Homo sapiens; identical to SEQ ID NO: 5622
  chr16:57126878-57126916
  hyper

SEQ ID NO: 39149 - DNA, 31 bp, Homo sapiens; identical to SEQ ID NO: 5623
  chr16:57127432-57127463
  hyper

SEQ ID NO: 39150 - DNA, 70 bp, Homo sapiens; identical to SEQ ID NO: 5624
  chr16:57318161-57318231
  hyper

SEQ ID NO: 39151 - DNA, 24 bp, Homo sapiens
  chr16:57318412-57318436
  hyper
tgctggtccgcgtgctaactttcg

SEQ ID NO: 39152 - DNA, 87 bp, Homo sapiens; identical to SEQ ID NO: 5626
  chr16:57318530-57318617
  hyper

SEQ ID NO: 39153 - DNA, 109 bp, Homo sapiens; identical to SEQ ID NO: 5627
  chr16:58059828-58059937
  hyper

SEQ ID NO: 39154 - DNA, 31 bp, Homo sapiens; identical to SEQ ID NO: 5628
  chr16:58060039-58060070
  hyper

SEQ ID NO: 39155 - DNA, 271 bp, Homo sapiens; identical to SEQ ID NO: 5629
  chr16:58060089-58060360
  hyper

SEQ ID NO: 39156 - DNA, 198 bp, Homo sapiens; identical to SEQ ID NO: 5630
  chr16:58060366-58060564
  hyper

SEQ ID NO: 39157 - DNA, 74 bp, Homo sapiens; identical to SEQ ID NO: 5633
  chr16:58060664-58060738
  hyper

SEQ ID NO: 39158 - DNA, 95 bp, Homo sapiens; identical to SEQ ID NO: 5634
  chr16:58060752-58060847
  hyper

SEQ ID NO: 39159 - DNA, 157 bp, Homo sapiens
  chr16:58060848-58061005
  hyper
cggagcaagagctgggcggctgggcaactgcgctcctgcccaggtggcctcccgtctgggtgataccgagccgcgcacggcgggccaggatggaggcggggggatgggtgcaaacggctgaggcagcggactcgggttgcgggggcgctttggcgac

SEQ ID NO: 39160 - DNA, 11 bp, Homo sapiens
  chr16:58061107-58061118
  hyper
gccctggattc

SEQ ID NO: 39161 - DNA, 94 bp, Homo sapiens; identical to SEQ ID NO: 5636
  chr16:58061206-58061300
  hyper

SEQ ID NO: 39162 - DNA, 31 bp, Homo sapiens; identical to SEQ ID NO: 5637
  chr16:58426353-58426384
  hyper

SEQ ID NO: 39163 - DNA, 2 bp, Homo sapiens
  chr16:58497213-58497215
  hyper
gt

SEQ ID NO: 39164 - DNA, 31 bp, Homo sapiens; identical to SEQ ID NO: 5640
  chr16:61445875-61445906
  hyper

SEQ ID NO: 39165 - DNA, 41 bp, Homo sapiens; identical to SEQ ID NO: 5641
  chr16:66460832-66460873
  hyper

SEQ ID NO: 39166 - DNA, 95 bp, Homo sapiens; identical to SEQ ID NO: 5645
  chr16:66730082-66730177
  hyper

SEQ ID NO: 39167 - DNA, 139 bp, Homo sapiens; identical to SEQ ID NO: 5646
  chr16:66730190-66730329
  hyper

SEQ ID NO: 39168 - DNA, 46 bp, Homo sapiens; identical to SEQ ID NO: 5647
  chr16:66730334-66730380
  hyper

SEQ ID NO: 39169 - DNA, 71 bp, Homo sapiens; identical to SEQ ID NO: 5648
  chr16:67184511-67184582
  hyper

SEQ ID NO: 39170 - DNA, 60 bp, Homo sapiens; identical to SEQ ID NO: 5649
  chr16:67204300-67204360
  hyper

SEQ ID NO: 39171 - DNA, 208 bp, Homo sapiens; identical to SEQ ID NO: 5650
  chr16:67204371-67204579
  hyper

SEQ ID NO: 39172 - DNA, 31 bp, Homo sapiens; identical to SEQ ID NO: 5651
  chr16:67280007-67280038
  hyper

SEQ ID NO: 39173 - DNA, 38 bp, Homo sapiens; identical to SEQ ID NO: 5652
  chr16:67280107-67280145
  hyper

SEQ ID NO: 39174 - DNA, 31 bp, Homo sapiens; identical to SEQ ID NO: 5653
  chr16:67280156-67280187
  hyper

SEQ ID NO: 39175 - DNA, 209 bp, Homo sapiens; identical to SEQ ID NO: 5654
  chr16:67465266-67465475
  hyper

SEQ ID NO: 39176 - DNA, 31 bp, Homo sapiens; identical to SEQ ID NO: 5655
  chr16:67465504-67465535
  hyper

SEQ ID NO: 39177 - DNA, 68 bp, Homo sapiens; identical to SEQ ID NO: 5656
  chr16:67465544-67465612
  hyper

SEQ ID NO: 39178 - DNA, 2 bp, Homo sapiens
  chr16:67678708-67678710
  hyper
tg

SEQ ID NO: 39179 - DNA, 153 bp, Homo sapiens
  chr16:67678786-67678939
  hyper
ggcggggtggaagccgggggcaaggacccgctggaggcccgccacacccgcgaccctcccggccacgccactgcccaccccgacgtctaccctggcggagaagctcctgggcgacggggcgggcgggcaggtgggactcggcccccctcccac

SEQ ID NO: 39180 - DNA, 67 bp, Homo sapiens
  chr16:67678975-67679042
  hyper
cggggcggggaggggccgggccgggggcggcctggcaggaagcggcgcgcaccttccgccgccggag

SEQ ID NO: 39181 - DNA, 31 bp, Homo sapiens; identical to SEQ ID NO: 5659
  chr16:67707950-67707981
  hyper

SEQ ID NO: 39182 - DNA, 42 bp, Homo sapiens; identical to SEQ ID NO: 5660
  chr16:67969395-67969437
  hyper

SEQ ID NO: 39183 - DNA, 159 bp, Homo sapiens; identical to SEQ ID NO: 5661
  chr16:67969442-67969601
  hyper

SEQ ID NO: 39184 - DNA, 43 bp, Homo sapiens; identical to SEQ ID NO: 5667
  chr16:68118920-68118963
  hyper

SEQ ID NO: 39185 - DNA, 31 bp, Homo sapiens; identical to SEQ ID NO: 5668
  chr16:68118965-68118996
  hyper

SEQ ID NO: 39186 - DNA, 31 bp, Homo sapiens; identical to SEQ ID NO: 5669
  chr16:68118999-68119030
  hyper

SEQ ID NO: 39187 - DNA, 72 bp, Homo sapiens; identical to SEQ ID NO: 5670
  chr16:68269812-68269884
  hyper

SEQ ID NO: 39188 - DNA, 34 bp, Homo sapiens; identical to SEQ ID NO: 5672
  chr16:68269920-68269954
  hyper

SEQ ID NO: 39189 - DNA, 28 bp, Homo sapiens
  chr16:68270100-68270128
  hyper
cccgcccgtggcgccccgcggggcgggg

SEQ ID NO: 39190 - DNA, 43 bp, Homo sapiens; identical to SEQ ID NO: 5674
  chr16:68271017-68271060
  hyper

SEQ ID NO: 39191 - DNA, 122 bp, Homo sapiens; identical to SEQ ID NO: 5675
  chr16:68271198-68271320
  hyper

SEQ ID NO: 39192 - DNA, 48 bp, Homo sapiens; identical to SEQ ID NO: 5676
  chr16:68271410-68271458
  hyper

SEQ ID NO: 39193 - DNA, 44 bp, Homo sapiens; identical to SEQ ID NO: 5677
  chr16:68271460-68271504
  hyper

SEQ ID NO: 39194 - DNA, 92 bp, Homo sapiens; identical to SEQ ID NO: 5678
  chr16:68564223-68564315
  hyper

SEQ ID NO: 39195 - DNA, 77 bp, Homo sapiens; identical to SEQ ID NO: 5681
  chr16:68679362-68679439
  hyper

SEQ ID NO: 39196 - DNA, 57 bp, Homo sapiens; identical to SEQ ID NO: 5683
  chr16:69139612-69139669
  hyper

SEQ ID NO: 39197 - DNA, 112 bp, Homo sapiens; identical to SEQ ID NO: 5684
  chr16:69139770-69139882
  hyper

SEQ ID NO: 39198 - DNA, 31 bp, Homo sapiens; identical to SEQ ID NO: 5685
  chr16:69139917-69139948
  hyper

SEQ ID NO: 39199 - DNA, 317 bp, Homo sapiens; identical to SEQ ID NO: 5686
  chr16:69139985-69140302
  hyper

SEQ ID NO: 39200 - DNA, 31 bp, Homo sapiens; identical to SEQ ID NO: 5687
  chr16:69140341-69140372
  hyper

SEQ ID NO: 39201 - DNA, 131 bp, Homo sapiens; identical to SEQ ID NO: 5688
  chr16:70719196-70719327
  hyper

SEQ ID NO: 39202 - DNA, 31 bp, Homo sapiens; identical to SEQ ID NO: 5689
  chr16:70719329-70719360
  hyper

SEQ ID NO: 39203 - DNA, 69 bp, Homo sapiens; identical to SEQ ID NO: 5690
  chr16:70719381-70719450
  hyper

SEQ ID NO: 39204 - DNA, 40 bp, Homo sapiens
  chr16:70719470-70719510
  hyper
acgggcgcccagcagacgcaggcaggacgcgctcagacaa

SEQ ID NO: 39205 - DNA, 761 bp, Homo sapiens; identical to SEQ ID NO: 5692
  chr16:70719566-70720327
  hyper

SEQ ID NO: 39206 - DNA, 42 bp, Homo sapiens; identical to SEQ ID NO: 5693
  chr16:70720328-70720370
  hyper

SEQ ID NO: 39207 - DNA, 35 bp, Homo sapiens; identical to SEQ ID NO: 5694
  chr16:71659877-71659912
  hyper

SEQ ID NO: 39208 - DNA, 31 bp, Homo sapiens; identical to SEQ ID NO: 5695
  chr16:71660038-71660069
  hyper

SEQ ID NO: 39209 - DNA, 91 bp, Homo sapiens; identical to SEQ ID NO: 5696
  chr16:71660104-71660195
  hyper

SEQ ID NO: 39210 - DNA, 98 bp, Homo sapiens; identical to SEQ ID NO: 5697
  chr16:71660445-71660543
  hyper

SEQ ID NO: 39211 - DNA, 81 bp, Homo sapiens; identical to SEQ ID NO: 5698
  chr16:71660612-71660693
  hyper

SEQ ID NO: 39212 - DNA, 31 bp, Homo sapiens; identical to SEQ ID NO: 5699
  chr16:71668363-71668394
  hyper

SEQ ID NO: 39213 - DNA, 31 bp, Homo sapiens; identical to SEQ ID NO: 5700
  chr16:73091556-73091587
  hyper

SEQ ID NO: 39214 - DNA, 31 bp, Homo sapiens; identical to SEQ ID NO: 5701
  chr16:73091687-73091718
  hyper

SEQ ID NO: 39215 - DNA, 133 bp, Homo sapiens; identical to SEQ ID NO: 5702
  chr16:73091751-73091884
  hyper

SEQ ID NO: 39216 - DNA, 57 bp, Homo sapiens; identical to SEQ ID NO: 5704
  chr16:73092060-73092117
  hyper

SEQ ID NO: 39217 - DNA, 66 bp, Homo sapiens; identical to SEQ ID NO: 5705
  chr16:73092480-73092546
  hyper

SEQ ID NO: 39218 - DNA, 31 bp, Homo sapiens; identical to SEQ ID NO: 5706
  chr16:74352095-74352126
  hyper

SEQ ID NO: 39219 - DNA, 31 bp, Homo sapiens; identical to SEQ ID NO: 5707
  chr16:74352162-74352193
  hyper

SEQ ID NO: 39220 - DNA, 41 bp, Homo sapiens; identical to SEQ ID NO: 5708
  chr16:75018962-75019003
  hyper

SEQ ID NO: 39221 - DNA, 39 bp, Homo sapiens; identical to SEQ ID NO: 5709
  chr16:75033798-75033837
  hyper

SEQ ID NO: 39222 - DNA, 91 bp, Homo sapiens; identical to SEQ ID NO: 5710
  chr16:75267941-75268032
  hyper

SEQ ID NO: 39223 - DNA, 47 bp, Homo sapiens; identical to SEQ ID NO: 5711
  chr16:75284494-75284541
  hyper

SEQ ID NO: 39224 - DNA, 31 bp, Homo sapiens; identical to SEQ ID NO: 5712
  chr16:75284664-75284695
  hyper

SEQ ID NO: 39225 - DNA, 42 bp, Homo sapiens; identical to SEQ ID NO: 5713
  chr16:75285012-75285054
  hyper

SEQ ID NO: 39226 - DNA, 72 bp, Homo sapiens; identical to SEQ ID NO: 5714
  chr16:75285278-75285350
  hyper

SEQ ID NO: 39227 - DNA, 241 bp, Homo sapiens; identical to SEQ ID NO: 5715
  chr16:75285434-75285675
  hyper

SEQ ID NO: 39228 - DNA, 31 bp, Homo sapiens; identical to SEQ ID NO: 5716
  chr16:75285709-75285740
  hyper

SEQ ID NO: 39229 - DNA, 71 bp, Homo sapiens; identical to SEQ ID NO: 5717
  chr16:75299144-75299215
  hyper

SEQ ID NO: 39230 - DNA, 82 bp, Homo sapiens; identical to SEQ ID NO: 5718
  chr16:75299750-75299832
  hyper

SEQ ID NO: 39231 - DNA, 104 bp, Homo sapiens; identical to SEQ ID NO: 5721
  chr16:79636190-79636294
  hyper

SEQ ID NO: 39232 - DNA, 51 bp, Homo sapiens
  chr16:80575052-80575103
  hyper
gggcccacccaggcacgggcggtccaggggccgcggcggaggctggtggct

SEQ ID NO: 39233 - DNA, 31 bp, Homo sapiens; identical to SEQ ID NO: 5724
  chr16:80837427-80837458
  hyper

SEQ ID NO: 39234 - DNA, 31 bp, Homo sapiens; identical to SEQ ID NO: 5725
  chr16:81625940-81625971
  hyper

SEQ ID NO: 39235 - DNA, 77 bp, Homo sapiens
  chr16:81779772-81779849
  hyper
gtggcacaaacaaggccggcctgctggataaagggaggtagaaacgctttcagccctccccggtgcttcccggttta

SEQ ID NO: 39236 - DNA, 31 bp, Homo sapiens; identical to SEQ ID NO: 5730
  chr16:84179010-84179041
  hyper

SEQ ID NO: 39237 - DNA, 91 bp, Homo sapiens; identical to SEQ ID NO: 5731
  chr16:84179097-84179188
  hyper

SEQ ID NO: 39238 - DNA, 31 bp, Homo sapiens; identical to SEQ ID NO: 5734
  chr16:84652627-84652658
  hyper

SEQ ID NO: 39239 - DNA, 31 bp, Homo sapiens; identical to SEQ ID NO: 5736
  chr16:84853834-84853865
  hyper

SEQ ID NO: 39240 - DNA, 70 bp, Homo sapiens; identical to SEQ ID NO: 5737
  chr16:85202814-85202884
  hyper

SEQ ID NO: 39241 - DNA, 47 bp, Homo sapiens
  chr16:85932252-85932299
  hyper
ttcgcgtccccgtccccgtggaataacgcgcggcgggcatcactgcc

SEQ ID NO: 39242 - DNA, 77 bp, Homo sapiens; identical to SEQ ID NO: 5740
  chr16:87417729-87417806
  hyper

SEQ ID NO: 39243 - DNA, 31 bp, Homo sapiens; identical to SEQ ID NO: 5741
  chr16:87417849-87417880
  hyper

SEQ ID NO: 39244 - DNA, 287 bp, Homo sapiens
  chr16:87417882-87418169
  hyper
gtccattgaaacaacgcgcgttccatcgtctccgccttatggtaaccaaaaggcccgagctgcggagctctgcagggaccttcggggatcccgagctccctgcggaagccccggggagggcttggaggggcggcggccggcgcggcccaagagatccggggatgcgcgcccggtctggaaagggaggccctgccatgcggcgccgcccaaagggcgcctgttcctgcagctgctgggagccgcgcacgcctgctccagctgggctccgccgaggccgctgagcgggg

SEQ ID NO: 39245 - DNA, 12 bp, Homo sapiens
  chr16:87418200-87418212
  hyper
aaggcgtcctct

SEQ ID NO: 39246 - DNA, 6 bp, Homo sapiens
  chr16:87525617-87525623
  hyper
gtgagg

SEQ ID NO: 39247 - DNA, 122 bp, Homo sapiens; identical to SEQ ID NO: 5744
  chr16:87525991-87526113
  hyper

SEQ ID NO: 39248 - DNA, 390 bp, Homo sapiens; identical to SEQ ID NO: 5745
  chr16:87526239-87526629
  hyper

SEQ ID NO: 39249 - DNA, 212 bp, Homo sapiens; identical to SEQ ID NO: 5746
  chr16:87526765-87526977
  hyper

SEQ ID NO: 39250 - DNA, 60 bp, Homo sapiens; identical to SEQ ID NO: 5747
  chr16:87527024-87527084
  hyper

SEQ ID NO: 39251 - DNA, 45 bp, Homo sapiens; identical to SEQ ID NO: 5755
  chr16:88061031-88061076
  hyper

SEQ ID NO: 39252 - DNA, 46 bp, Homo sapiens; identical to SEQ ID NO: 5756
  chr16:88878526-88878572
  hyper

SEQ ID NO: 39253 - DNA, 213 bp, Homo sapiens; identical to SEQ ID NO: 5757
  chr16:88878579-88878792
  hyper

SEQ ID NO: 39254 - DNA, 144 bp, Homo sapiens; identical to SEQ ID NO: 5758
  chr16:88878827-88878971
  hyper

SEQ ID NO: 39255 - DNA, 35 bp, Homo sapiens; identical to SEQ ID NO: 5759
  chr16:88878999-88879034
  hyper

SEQ ID NO: 39256 - DNA, 31 bp, Homo sapiens; identical to SEQ ID NO: 5760
  chr16:88938185-88938216
  hyper

SEQ ID NO: 39257 - DNA, 31 bp, Homo sapiens; identical to SEQ ID NO: 5762
  chr16:89189687-89189718
  hyper

SEQ ID NO: 39258 - DNA, 113 bp, Homo sapiens; identical to SEQ ID NO: 5763
  chr16:89641241-89641354
  hyper

SEQ ID NO: 39259 - DNA, 5 bp, Homo sapiens
  chr16:89641413-89641418
  hyper
cgtgg

SEQ ID NO: 39260 - DNA, 33 bp, Homo sapiens
  chr16:89641704-89641737
  hyper
agccccagacgagcgcggcgcctgcacacaaca

SEQ ID NO: 39261 - DNA, 64 bp, Homo sapiens; identical to SEQ ID NO: 5766
  chr16:89894334-89894398
  hyper

SEQ ID NO: 39262 - DNA, 66 bp, Homo sapiens; identical to SEQ ID NO: 5767
  chr16:89894506-89894572
  hyper

SEQ ID NO: 39263 - DNA, 46 bp, Homo sapiens; identical to SEQ ID NO: 5768
  chr16:89927370-89927416
  hyper

SEQ ID NO: 39264 - DNA, 52 bp, Homo sapiens; identical to SEQ ID NO: 5769
  chr16:89990061-89990113
  hyper

SEQ ID NO: 39265 - DNA, 124 bp, Homo sapiens; identical to SEQ ID NO: 5770
  chr16:90085455-90085579
  hyper

SEQ ID NO: 39266 - DNA, 72 bp, Homo sapiens; identical to SEQ ID NO: 5771
  chr16:90086126-90086198
  hyper

SEQ ID NO: 39267 - DNA, 67 bp, Homo sapiens; identical to SEQ ID NO: 5772
  chr16:90088769-90088836
  hyper

SEQ ID NO: 39268 - DNA, 31 bp, Homo sapiens; identical to SEQ ID NO: 5773
  chr16:90088837-90088868
  hyper

SEQ ID NO: 39269 - DNA, 88 bp, Homo sapiens; identical to SEQ ID NO: 5774
  chr16:90088880-90088968
  hyper

SEQ ID NO: 39270 - DNA, 31 bp, Homo sapiens; identical to SEQ ID NO: 5775
  chr16:90089148-90089179
  hyper

SEQ ID NO: 39271 - DNA, 67 bp, Homo sapiens; identical to SEQ ID NO: 5776
  chr16:90089184-90089251
  hyper

SEQ ID NO: 39272 - DNA, 79 bp, Homo sapiens; identical to SEQ ID NO: 5777
  chr17:635475-635554
  hyper

SEQ ID NO: 39273 - DNA, 138 bp, Homo sapiens; identical to SEQ ID NO: 5778
  chr17:635797-635935
  hyper

SEQ ID NO: 39274 - DNA, 47 bp, Homo sapiens; identical to SEQ ID NO: 5779
  chr17:635959-636006
  hyper

SEQ ID NO: 39275 - DNA, 138 bp, Homo sapiens; identical to SEQ ID NO: 5780
  chr17:636120-636258
  hyper

SEQ ID NO: 39276 - DNA, 85 bp, Homo sapiens; identical to SEQ ID NO: 5781
  chr17:883201-883286
  hyper

SEQ ID NO: 39277 - DNA, 31 bp, Homo sapiens; identical to SEQ ID NO: 5782
  chr17:1011775-1011806
  hyper

SEQ ID NO: 39278 - DNA, 128 bp, Homo sapiens; identical to SEQ ID NO: 5783
  chr17:1011828-1011956
  hyper

SEQ ID NO: 39279 - DNA, 31 bp, Homo sapiens; identical to SEQ ID NO: 5784
  chr17:1011957-1011988
  hyper

SEQ ID NO: 39280 - DNA, 31 bp, Homo sapiens; identical to SEQ ID NO: 5785
  chr17:1132221-1132252
  hyper

SEQ ID NO: 39281 - DNA, 31 bp, Homo sapiens; identical to SEQ ID NO: 5786
  chr17:1132264-1132295
  hyper

SEQ ID NO: 39282 - DNA, 84 bp, Homo sapiens; identical to SEQ ID NO: 5787
  chr17:1613423-1613507
  hyper

SEQ ID NO: 39283 - DNA, 31 bp, Homo sapiens; identical to SEQ ID NO: 5788
  chr17:1613564-1613595
  hyper

SEQ ID NO: 39284 - DNA, 95 bp, Homo sapiens; identical to SEQ ID NO: 5789
  chr17:1613634-1613729
  hyper

SEQ ID NO: 39285 - DNA, 31 bp, Homo sapiens; identical to SEQ ID NO: 5790
  chr17:1613873-1613904
  hyper

SEQ ID NO: 39286 - DNA, 105 bp, Homo sapiens; identical to SEQ ID NO: 5791
  chr17:1613922-1614027
  hyper

SEQ ID NO: 39287 - DNA, 114 bp, Homo sapiens; identical to SEQ ID NO: 5793
  chr17:1929077-1929191
  hyper

SEQ ID NO: 39288 - DNA, 34 bp, Homo sapiens; identical to SEQ ID NO: 5794
  chr17:1929339-1929373
  hyper

SEQ ID NO: 39289 - DNA, 31 bp, Homo sapiens; identical to SEQ ID NO: 5795
  chr17:1945164-1945195
  hyper

SEQ ID NO: 39290 - DNA, 2 bp, Homo sapiens
  chr17:1957479-1957481
  hyper
tt

SEQ ID NO: 39291 - DNA, 31 bp, Homo sapiens; identical to SEQ ID NO: 5799
  chr17:2014997-2015028
  hyper

SEQ ID NO: 39292 - DNA, 51 bp, Homo sapiens; identical to SEQ ID NO: 5800
  chr17:2302238-2302289
  hyper

SEQ ID NO: 39293 - DNA, 302 bp, Homo sapiens; identical to SEQ ID NO: 5802
  chr17:2756746-2757048
  hyper

SEQ ID NO: 39294 - DNA, 95 bp, Homo sapiens; identical to SEQ ID NO: 5803
  chr17:2757205-2757300
  hyper

SEQ ID NO: 39295 - DNA, 31 bp, Homo sapiens; identical to SEQ ID NO: 5804
  chr17:3554659-3554690
  hyper

SEQ ID NO: 39296 - DNA, 39 bp, Homo sapiens; identical to SEQ ID NO: 5806
  chr17:3778975-3779014
  hyper

SEQ ID NO: 39297 - DNA, 31 bp, Homo sapiens; identical to SEQ ID NO: 5807
  chr17:3779015-3779046
  hyper

SEQ ID NO: 39298 - DNA, 41 bp, Homo sapiens; identical to SEQ ID NO: 5808
  chr17:3867425-3867466
  hyper

SEQ ID NO: 39299 - DNA, 31 bp, Homo sapiens; identical to SEQ ID NO: 5809
  chr17:4642753-4642784
  hyper

SEQ ID NO: 39300 - DNA, 43 bp, Homo sapiens; identical to SEQ ID NO: 5810
  chr17:4647511-4647554
  hyper

SEQ ID NO: 39301 - DNA, 40 bp, Homo sapiens; identical to SEQ ID NO: 5811
  chr17:4890352-4890392
  hyper

SEQ ID NO: 39302 - DNA, 80 bp, Homo sapiens; identical to SEQ ID NO: 5812
  chr17:4890400-4890480
  hyper

SEQ ID NO: 39303 - DNA, 37 bp, Homo sapiens; identical to SEQ ID NO: 5813
  chr17:4890483-4890520
  hyper

SEQ ID NO: 39304 - DNA, 80 bp, Homo sapiens; identical to SEQ ID NO: 5814
  chr17:4890522-4890602
  hyper

SEQ ID NO: 39305 - DNA, 31 bp, Homo sapiens; identical to SEQ ID NO: 5815
  chr17:4900808-4900839
  hyper

SEQ ID NO: 39306 - DNA, 31 bp, Homo sapiens; identical to SEQ ID NO: 5816
  chr17:4901560-4901591
  hyper

SEQ ID NO: 39307 - DNA, 35 bp, Homo sapiens; identical to SEQ ID NO: 5817
  chr17:4901644-4901679
  hyper

SEQ ID NO: 39308 - DNA, 31 bp, Homo sapiens; identical to SEQ ID NO: 5818
  chr17:6347034-6347065
  hyper

SEQ ID NO: 39309 - DNA, 266 bp, Homo sapiens; identical to SEQ ID NO: 5819
  chr17:6347511-6347777
  hyper

SEQ ID NO: 39310 - DNA, 2 bp, Homo sapiens
  chr17:6347789-6347791
  hyper
tc

SEQ ID NO: 39311 - DNA, 10 bp, Homo sapiens
  chr17:6347820-6347830
  hyper
tgggcacaag

SEQ ID NO: 39312 - DNA, 59 bp, Homo sapiens; identical to SEQ ID NO: 5821
  chr17:6459171-6459230
  hyper

SEQ ID NO: 39313 - DNA, 120 bp, Homo sapiens; identical to SEQ ID NO: 5822
  chr17:6459295-6459415
  hyper

SEQ ID NO: 39314 - DNA, 81 bp, Homo sapiens; identical to SEQ ID NO: 5823
  chr17:6459568-6459649
  hyper

SEQ ID NO: 39315 - DNA, 31 bp, Homo sapiens; identical to SEQ ID NO: 5825
  chr17:6459791-6459822
  hyper

SEQ ID NO: 39316 - DNA, 31 bp, Homo sapiens; identical to SEQ ID NO: 5826
  chr17:6460088-6460119
  hyper

SEQ ID NO: 39317 - DNA, 31 bp, Homo sapiens; identical to SEQ ID NO: 5827
  chr17:6460250-6460281
  hyper

SEQ ID NO: 39318 - DNA, 57 bp, Homo sapiens; identical to SEQ ID NO: 5830
  chr17:7199819-7199876
  hyper

SEQ ID NO: 39319 - DNA, 58 bp, Homo sapiens; identical to SEQ ID NO: 5831
  chr17:7254510-7254568
  hyper

SEQ ID NO: 39320 - DNA, 64 bp, Homo sapiens; identical to SEQ ID NO: 5832
  chr17:7254941-7255005
  hyper

SEQ ID NO: 39321 - DNA, 122 bp, Homo sapiens; identical to SEQ ID NO: 5833
  chr17:7255020-7255142
  hyper

SEQ ID NO: 39322 - DNA, 396 bp, Homo sapiens; identical to SEQ ID NO: 5834
  chr17:7255306-7255702
  hyper

SEQ ID NO: 39323 - DNA, 123 bp, Homo sapiens; identical to SEQ ID NO: 5835
  chr17:7255719-7255842
  hyper

SEQ ID NO: 39324 - DNA, 137 bp, Homo sapiens; identical to SEQ ID NO: 5836
  chr17:7284207-7284344
  hyper

SEQ ID NO: 39325 - DNA, 56 bp, Homo sapiens; identical to SEQ ID NO: 5837
  chr17:7284471-7284527
  hyper

SEQ ID NO: 39326 - DNA, 31 bp, Homo sapiens; identical to SEQ ID NO: 5838
  chr17:7284668-7284699
  hyper

SEQ ID NO: 39327 - DNA, 31 bp, Homo sapiens; identical to SEQ ID NO: 5839
  chr17:7307051-7307082
  hyper

SEQ ID NO: 39328 - DNA, 31 bp, Homo sapiens; identical to SEQ ID NO: 5840
  chr17:7461585-7461616
  hyper

SEQ ID NO: 39329 - DNA, 49 bp, Homo sapiens; identical to SEQ ID NO: 5841
  chr17:7739846-7739895
  hyper

SEQ ID NO: 39330 - DNA, 31 bp, Homo sapiens; identical to SEQ ID NO: 5842
  chr17:7744982-7745013
  hyper

SEQ ID NO: 39331 - DNA, 56 bp, Homo sapiens; identical to SEQ ID NO: 5843
  chr17:7748402-7748458
  hyper

SEQ ID NO: 39332 - DNA, 42 bp, Homo sapiens; identical to SEQ ID NO: 5844
  chr17:7791234-7791276
  hyper

SEQ ID NO: 39333 - DNA, 31 bp, Homo sapiens; identical to SEQ ID NO: 5845
  chr17:8055128-8055159
  hyper

SEQ ID NO: 39334 - DNA, 2 bp, Homo sapiens
  chr17:8055165-8055167
  hyper
ct

SEQ ID NO: 39335 - DNA, 25 bp, Homo sapiens
  chr17:8055823-8055848
  hyper
ctcttcccggcgcctgattggctag

SEQ ID NO: 39336 - DNA, 31 bp, Homo sapiens; identical to SEQ ID NO: 5851
  chr17:8759639-8759670
  hyper

SEQ ID NO: 39337 - DNA, 121 bp, Homo sapiens; identical to SEQ ID NO: 5852
  chr17:8901425-8901546
  hyper

SEQ ID NO: 39338 - DNA, 31 bp, Homo sapiens; identical to SEQ ID NO: 5853
  chr17:9548172-9548203
  hyper

SEQ ID NO: 39339 - DNA, 31 bp, Homo sapiens; identical to SEQ ID NO: 5854
  chr17:9548355-9548386
  hyper

SEQ ID NO: 39340 - DNA, 110 bp, Homo sapiens; identical to SEQ ID NO: 5855
  chr17:9548724-9548834
  hyper

SEQ ID NO: 39341 - DNA, 333 bp, Homo sapiens; identical to SEQ ID NO: 5856
  chr17:9548970-9549303
  hyper

SEQ ID NO: 39342 - DNA, 58 bp, Homo sapiens; identical to SEQ ID NO: 5858
  chr17:16395228-16395286
  hyper

SEQ ID NO: 39343 - DNA, 68 bp, Homo sapiens; identical to SEQ ID NO: 5859
  chr17:16439047-16439115
  hyper

SEQ ID NO: 39344 - DNA, 31 bp, Homo sapiens; identical to SEQ ID NO: 5860
  chr17:16439118-16439149
  hyper

SEQ ID NO: 39345 - DNA, 31 bp, Homo sapiens; identical to SEQ ID NO: 5862
  chr17:17399854-17399885
  hyper

SEQ ID NO: 39346 - DNA, 207 bp, Homo sapiens; identical to SEQ ID NO: 5863
  chr17:19140729-19140936
  hyper

SEQ ID NO: 39347 - DNA, 69 bp, Homo sapiens; identical to SEQ ID NO: 5864
  chr17:19140942-19141011
  hyper

SEQ ID NO: 39348 - DNA, 38 bp, Homo sapiens; identical to SEQ ID NO: 5865
  chr17:19141020-19141058
  hyper

SEQ ID NO: 39349 - DNA, 112 bp, Homo sapiens; identical to SEQ ID NO: 5866
  chr17:19141267-19141379
  hyper

SEQ ID NO: 39350 - DNA, 46 bp, Homo sapiens; identical to SEQ ID NO: 5867
  chr17:19141602-19141648
  hyper

SEQ ID NO: 39351 - DNA, 31 bp, Homo sapiens; identical to SEQ ID NO: 5868
  chr17:19265421-19265452
  hyper

SEQ ID NO: 39352 - DNA, 31 bp, Homo sapiens; identical to SEQ ID NO: 5869
  chr17:19282088-19282119
  hyper

SEQ ID NO: 39353 - DNA, 194 bp, Homo sapiens; identical to SEQ ID NO: 5870
  chr17:19282131-19282325
  hyper

SEQ ID NO: 39354 - DNA, 31 bp, Homo sapiens; identical to SEQ ID NO: 5871
  chr17:19391541-19391572
  hyper

SEQ ID NO: 39355 - DNA, 31 bp, Homo sapiens; identical to SEQ ID NO: 5872
  chr17:19881494-19881525
  hyper

SEQ ID NO: 39356 - DNA, 31 bp, Homo sapiens; identical to SEQ ID NO: 5873
  chr17:21189751-21189782
  hyper

SEQ ID NO: 39357 - DNA, 31 bp, Homo sapiens; identical to SEQ ID NO: 5874
  chr17:21189791-21189822
  hyper

SEQ ID NO: 39358 - DNA, 45 bp, Homo sapiens; identical to SEQ ID NO: 5875
  chr17:21189828-21189873
  hyper

SEQ ID NO: 39359 - DNA, 31 bp, Homo sapiens; identical to SEQ ID NO: 5876
  chr17:21189883-21189914
  hyper

SEQ ID NO: 39360 - DNA, 31 bp, Homo sapiens; identical to SEQ ID NO: 5877
  chr17:21189933-21189964
  hyper

SEQ ID NO: 39361 - DNA, 31 bp, Homo sapiens; identical to SEQ ID NO: 5878
  chr17:26925397-26925428
  hyper

SEQ ID NO: 39362 - DNA, 31 bp, Homo sapiens; identical to SEQ ID NO: 5883
  chr17:29815732-29815763
  hyper

SEQ ID NO: 39363 - DNA, 90 bp, Homo sapiens; identical to SEQ ID NO: 5884
  chr17:30813421-30813511
  hyper

SEQ ID NO: 39364 - DNA, 31 bp, Homo sapiens; identical to SEQ ID NO: 5885
  chr17:31203739-31203770
  hyper

SEQ ID NO: 39365 - DNA, 58 bp, Homo sapiens; identical to SEQ ID NO: 5886
  chr17:31254913-31254971
  hyper

SEQ ID NO: 39366 - DNA, 38 bp, Homo sapiens; identical to SEQ ID NO: 5887
  chr17:31255334-31255372
  hyper

SEQ ID NO: 39367 - DNA, 31 bp, Homo sapiens; identical to SEQ ID NO: 5888
  chr17:31255478-31255509
  hyper

SEQ ID NO: 39368 - DNA, 31 bp, Homo sapiens; identical to SEQ ID NO: 5889
  chr17:31255618-31255649
  hyper

SEQ ID NO: 39369 - DNA, 58 bp, Homo sapiens; identical to SEQ ID NO: 5890
  chr17:31255654-31255712
  hyper

SEQ ID NO: 39370 - DNA, 31 bp, Homo sapiens; identical to SEQ ID NO: 5895
  chr17:35816364-35816395
  hyper

SEQ ID NO: 39371 - DNA, 46 bp, Homo sapiens; identical to SEQ ID NO: 5901
  chr17:36762362-36762408
  hyper

SEQ ID NO: 39372 - DNA, 31 bp, Homo sapiens; identical to SEQ ID NO: 5902
  chr17:36762777-36762808
  hyper

SEQ ID NO: 39373 - DNA, 34 bp, Homo sapiens; identical to SEQ ID NO: 5903
  chr17:36886753-36886787
  hyper

SEQ ID NO: 39374 - DNA, 83 bp, Homo sapiens; identical to SEQ ID NO: 5904
  chr17:36886817-36886900
  hyper

SEQ ID NO: 39375 - DNA, 31 bp, Homo sapiens; identical to SEQ ID NO: 5905
  chr17:36886912-36886943
  hyper

SEQ ID NO: 39376 - DNA, 31 bp, Homo sapiens; identical to SEQ ID NO: 5906
  chr17:36886945-36886976
  hyper

SEQ ID NO: 39377 - DNA, 38 bp, Homo sapiens; identical to SEQ ID NO: 5907
  chr17:36904349-36904387
  hyper

SEQ ID NO: 39378 - DNA, 62 bp, Homo sapiens; identical to SEQ ID NO: 5908
  chr17:36905150-36905212
  hyper

SEQ ID NO: 39379 - DNA, 227 bp, Homo sapiens
  chr17:36905241-36905468
  hyper
gaggggagtggaggtgcggggtgaggccgggtggggggcctcgccgcggggggatcgggtagctctggcggaggctgcgcccccggcgtgctcgggcagagaagaacggaggcccgctgaggatgggaactcaggctccgggtctgggacacaataatccggccgaaggcgagcggccacactggactaggaaacgaggcgccgggctgtaaggtgggcccgcgcct

SEQ ID NO: 39380 - DNA, 364 bp, Homo sapiens; identical to SEQ ID NO: 5910
  chr17:36905561-36905925
  hyper

SEQ ID NO: 39381 - DNA, 38 bp, Homo sapiens; identical to SEQ ID NO: 5911
  chr17:36905928-36905966
  hyper

SEQ ID NO: 39382 - DNA, 83 bp, Homo sapiens; identical to SEQ ID NO: 5912
  chr17:36906153-36906236
  hyper

SEQ ID NO: 39383 - DNA, 31 bp, Homo sapiens; identical to SEQ ID NO: 5913
  chr17:36906247-36906278
  hyper

SEQ ID NO: 39384 - DNA, 31 bp, Homo sapiens; identical to SEQ ID NO: 5920
  chr17:37762909-37762940
  hyper

SEQ ID NO: 39385 - DNA, 56 bp, Homo sapiens; identical to SEQ ID NO: 5921
  chr17:37774744-37774800
  hyper

SEQ ID NO: 39386 - DNA, 75 bp, Homo sapiens; identical to SEQ ID NO: 5922
  chr17:37774835-37774910
  hyper

SEQ ID NO: 39387 - DNA, 31 bp, Homo sapiens; identical to SEQ ID NO: 5923
  chr17:37775053-37775084
  hyper

SEQ ID NO: 39388 - DNA, 44 bp, Homo sapiens; identical to SEQ ID NO: 5924
  chr17:37793984-37794028
  hyper

SEQ ID NO: 39389 - DNA, 2 bp, Homo sapiens
  chr17:37794034-37794036
  hyper
gt

SEQ ID NO: 39390 - DNA, 31 bp, Homo sapiens; identical to SEQ ID NO: 5926
  chr17:37844562-37844593
  hyper

SEQ ID NO: 39391 - DNA, 31 bp, Homo sapiens; identical to SEQ ID NO: 5927
  chr17:37895237-37895268
  hyper

SEQ ID NO: 39392 - DNA, 62 bp, Homo sapiens; identical to SEQ ID NO: 5928
  chr17:37895727-37895789
  hyper

SEQ ID NO: 39393 - DNA, 39 bp, Homo sapiens; identical to SEQ ID NO: 5929
  chr17:38210875-38210914
  hyper

SEQ ID NO: 39394 - DNA, 40 bp, Homo sapiens; identical to SEQ ID NO: 5930
  chr17:38228512-38228552
  hyper

SEQ ID NO: 39395 - DNA, 38 bp, Homo sapiens; identical to SEQ ID NO: 5931
  chr17:38228860-38228898
  hyper

SEQ ID NO: 39396 - DNA, 23 bp, Homo sapiens
  chr17:38347442-38347465
  hyper
tattttccaccccttccgccccc

SEQ ID NO: 39397 - DNA, 2 bp, Homo sapiens
  chr17:38478594-38478596
  hyper
gg

SEQ ID NO: 39398 - DNA, 31 bp, Homo sapiens; identical to SEQ ID NO: 5936
  chr17:38498601-38498632
  hyper

SEQ ID NO: 39399 - DNA, 48 bp, Homo sapiens; identical to SEQ ID NO: 5937
  chr17:38498897-38498945
  hyper

SEQ ID NO: 39400 - DNA, 47 bp, Homo sapiens; identical to SEQ ID NO: 5938
  chr17:39684386-39684433
  hyper

SEQ ID NO: 39401 - DNA, 31 bp, Homo sapiens; identical to SEQ ID NO: 5941
  chr17:40429066-40429097
  hyper

SEQ ID NO: 39402 - DNA, 2 bp, Homo sapiens
  chr17:40464189-40464191
  hyper
ta

SEQ ID NO: 39403 - DNA, 54 bp, Homo sapiens; identical to SEQ ID NO: 5947
  chr17:40575291-40575345
  hyper

SEQ ID NO: 39404 - DNA, 31 bp, Homo sapiens; identical to SEQ ID NO: 5948
  chr17:40575351-40575382
  hyper

SEQ ID NO: 39405 - DNA, 40 bp, Homo sapiens; identical to SEQ ID NO: 5949
  chr17:40950713-40950753
  hyper

SEQ ID NO: 39406 - DNA, 49 bp, Homo sapiens; identical to SEQ ID NO: 5950
  chr17:40950807-40950856
  hyper

SEQ ID NO: 39407 - DNA, 30 bp, Homo sapiens
  chr17:41723872-41723902
  hyper
gatagcccagaggaccgcagaggcttgaat

SEQ ID NO: 39408 - DNA, 170 bp, Homo sapiens; identical to SEQ ID NO: 5952
  chr17:41910162-41910332
  hyper

SEQ ID NO: 39409 - DNA, 147 bp, Homo sapiens; identical to SEQ ID NO: 5953
  chr17:41910477-41910624
  hyper

SEQ ID NO: 39410 - DNA, 130 bp, Homo sapiens; identical to SEQ ID NO: 5955
  chr17:41910700-41910830
  hyper

SEQ ID NO: 39411 - DNA, 54 bp, Homo sapiens; identical to SEQ ID NO: 5956
  chr17:41910836-41910890
  hyper

SEQ ID NO: 39412 - DNA, 80 bp, Homo sapiens; identical to SEQ ID NO: 5957
  chr17:42091881-42091961
  hyper

SEQ ID NO: 39413 - DNA, 50 bp, Homo sapiens; identical to SEQ ID NO: 5958
  chr17:42092015-42092065
  hyper

SEQ ID NO: 39414 - DNA, 31 bp, Homo sapiens; identical to SEQ ID NO: 5959
  chr17:42092093-42092124
  hyper

SEQ ID NO: 39415 - DNA, 2 bp, Homo sapiens
  chr17:42092127-42092129
  hyper
tt

SEQ ID NO: 39416 - DNA, 60 bp, Homo sapiens
  chr17:42092357-42092417
  hyper
cagagaagcaggcgcggggatgggacacgcagcttccgggtcaagcgctttttctttttc

SEQ ID NO: 39417 - DNA, 2 bp, Homo sapiens
  chr17:42287798-42287800
  hyper
cc

SEQ ID NO: 39418 - DNA, 67 bp, Homo sapiens
  chr17:42287874-42287941
  hyper
cacccccagggggcgcgcgctccccgcgcagcagcccaggcgctcccgccggcgggcagaagcatgg

SEQ ID NO: 39419 - DNA, 59 bp, Homo sapiens; identical to SEQ ID NO: 5963
  chr17:42287943-42288002
  hyper

SEQ ID NO: 39420 - DNA, 31 bp, Homo sapiens; identical to SEQ ID NO: 5964
  chr17:42288062-42288093
  hyper

SEQ ID NO: 39421 - DNA, 22 bp, Homo sapiens
  chr17:42402751-42402773
  hyper
ccccgccccggccgcgcgcggc

SEQ ID NO: 39422 - DNA, 71 bp, Homo sapiens
  chr17:42402917-42402988
  hyper
ggctacccgccgagacttgaaaacttcgcggcgacttctctcgccggccttagcatcgcccccatttttca

SEQ ID NO: 39423 - DNA, 31 bp, Homo sapiens; identical to SEQ ID NO: 5970
  chr17:43209588-43209619
  hyper

SEQ ID NO: 39424 - DNA, 31 bp, Homo sapiens; identical to SEQ ID NO: 5971
  chr17:43278126-43278157
  hyper

SEQ ID NO: 39425 - DNA, 163 bp, Homo sapiens; identical to SEQ ID NO: 5972
  chr17:43298738-43298901
  hyper

SEQ ID NO: 39426 - DNA, 31 bp, Homo sapiens; identical to SEQ ID NO: 5973
  chr17:43324280-43324311
  hyper

SEQ ID NO: 39427 - DNA, 40 bp, Homo sapiens; identical to SEQ ID NO: 5974
  chr17:43324313-43324353
  hyper

SEQ ID NO: 39428 - DNA, 434 bp, Homo sapiens; identical to SEQ ID NO: 5975
  chr17:43324812-43325246
  hyper

SEQ ID NO: 39429 - DNA, 291 bp, Homo sapiens; identical to SEQ ID NO: 5976
  chr17:43325380-43325671
  hyper

SEQ ID NO: 39430 - DNA, 1 bp, Homo sapiens
  chr17:43339109-43339110
  hyper
g

SEQ ID NO: 39431 - DNA, 31 bp, Homo sapiens; identical to SEQ ID NO: 5978
  chr17:45609731-45609762
  hyper

SEQ ID NO: 39432 - DNA, 76 bp, Homo sapiens; identical to SEQ ID NO: 5982
  chr17:46124667-46124743
  hyper

SEQ ID NO: 39433 - DNA, 38 bp, Homo sapiens; identical to SEQ ID NO: 5983
  chr17:46124754-46124792
  hyper

SEQ ID NO: 39434 - DNA, 31 bp, Homo sapiens; identical to SEQ ID NO: 5984
  chr17:46124804-46124835
  hyper

SEQ ID NO: 39435 - DNA, 2 bp, Homo sapiens
  chr17:46124900-46124902
  hyper
aa

SEQ ID NO: 39436 - DNA, 95 bp, Homo sapiens
  chr17:46125148-46125243
  hyper
ttggggtaccggtttccgccgccagcacccaagatggcggcacgagcgtcgcaaccacaagaaccacatgcttcgtgtcccgcctcagcattctc

SEQ ID NO: 39437 - DNA, 51 bp, Homo sapiens; identical to SEQ ID NO: 5998
  chr17:46755804-46755855
  hyper

SEQ ID NO: 39438 - DNA, 77 bp, Homo sapiens; identical to SEQ ID NO: 5999
  chr17:46755921-46755998
  hyper

SEQ ID NO: 39439 - DNA, 31 bp, Homo sapiens; identical to SEQ ID NO: 6000
  chr17:46829858-46829889
  hyper

SEQ ID NO: 39440 - DNA, 60 bp, Homo sapiens
  chr17:46829920-46829980
  hyper
ggagagtctctcagcccggtttgggagtaaacccaaaaccgttcattcgtcagggaatgc

SEQ ID NO: 39441 - DNA, 31 bp, Homo sapiens; identical to SEQ ID NO: 6005
  chr17:47307938-47307969
  hyper

SEQ ID NO: 39442 - DNA, 31 bp, Homo sapiens; identical to SEQ ID NO: 6007
  chr17:47440023-47440054
  hyper

SEQ ID NO: 39443 - DNA, 1 bp, Homo sapiens
  chr17:47865437-47865438
  hyper
g

SEQ ID NO: 39444 - DNA, 84 bp, Homo sapiens; identical to SEQ ID NO: 6011
  chr17:47865613-47865697
  hyper

SEQ ID NO: 39445 - DNA, 58 bp, Homo sapiens; identical to SEQ ID NO: 6012
  chr17:47979496-47979554
  hyper

SEQ ID NO: 39446 - DNA, 90 bp, Homo sapiens
  chr17:48207629-48207719
  hyper
tcattcaacaaacgtccgccgagcagccggggcgccgaggctggaggggacagcggtgaacagaacccccgccccctaactgcgctcaag

SEQ ID NO: 39447 - DNA, 40 bp, Homo sapiens
  chr17:48207748-48207788
  hyper
gtggggaggccctcacgagcctgggcgccatgggcccagc

SEQ ID NO: 39448 - DNA, 44 bp, Homo sapiens; identical to SEQ ID NO: 6014
  chr17:48207804-48207848
  hyper

SEQ ID NO: 39449 - DNA, 2 bp, Homo sapiens
  chr17:48619095-48619097
  hyper
tt

SEQ ID NO: 39450 - DNA, 120 bp, Homo sapiens
  chr17:48619736-48619856
  hyper
ccaagtggactttttgcggggtgtggcggccgggtctcgaccacagcgtggatcaccggctgtttaggaaactgcagctgcacaacgtggggtgcaaaactgccccgcttcctttacagc

SEQ ID NO: 39451 - DNA, 48 bp, Homo sapiens; identical to SEQ ID NO: 6017
  chr17:48619866-48619914
  hyper

SEQ ID NO: 39452 - DNA, 31 bp, Homo sapiens; identical to SEQ ID NO: 6018
  chr17:48619916-48619947
  hyper

SEQ ID NO: 39453 - DNA, 31 bp, Homo sapiens; identical to SEQ ID NO: 6019
  chr17:48712405-48712436
  hyper

SEQ ID NO: 39454 - DNA, 38 bp, Homo sapiens; identical to SEQ ID NO: 6020
  chr17:48997200-48997238
  hyper

SEQ ID NO: 39455 - DNA, 31 bp, Homo sapiens; identical to SEQ ID NO: 6021
  chr17:49027999-49028030
  hyper

SEQ ID NO: 39456 - DNA, 31 bp, Homo sapiens; identical to SEQ ID NO: 6022
  chr17:49028084-49028115
  hyper

SEQ ID NO: 39457 - DNA, 55 bp, Homo sapiens; identical to SEQ ID NO: 6023
  chr17:52977560-52977615
  hyper

SEQ ID NO: 39458 - DNA, 46 bp, Homo sapiens; identical to SEQ ID NO: 6024
  chr17:52977653-52977699
  hyper

SEQ ID NO: 39459 - DNA, 62 bp, Homo sapiens; identical to SEQ ID NO: 6025
  chr17:52977752-52977814
  hyper

SEQ ID NO: 39460 - DNA, 211 bp, Homo sapiens; identical to SEQ ID NO: 6026
  chr17:52977850-52978061
  hyper

SEQ ID NO: 39461 - DNA, 31 bp, Homo sapiens; identical to SEQ ID NO: 6027
  chr17:52978566-52978597
  hyper

SEQ ID NO: 39462 - DNA, 153 bp, Homo sapiens; identical to SEQ ID NO: 6030
  chr17:56032159-56032312
  hyper

SEQ ID NO: 39463 - DNA, 63 bp, Homo sapiens; identical to SEQ ID NO: 6031
  chr17:56032482-56032545
  hyper

SEQ ID NO: 39464 - DNA, 43 bp, Homo sapiens; identical to SEQ ID NO: 6032
  chr17:56296379-56296422
  hyper

SEQ ID NO: 39465 - DNA, 31 bp, Homo sapiens; identical to SEQ ID NO: 6033
  chr17:56296427-56296458
  hyper

SEQ ID NO: 39466 - DNA, 87 bp, Homo sapiens; identical to SEQ ID NO: 6034
  chr17:56296472-56296559
  hyper

SEQ ID NO: 39467 - DNA, 34 bp, Homo sapiens; identical to SEQ ID NO: 6035
  chr17:56296611-56296645
  hyper

SEQ ID NO: 39468 - DNA, 31 bp, Homo sapiens; identical to SEQ ID NO: 6036
  chr17:56401799-56401830
  hyper

SEQ ID NO: 39469 - DNA, 41 bp, Homo sapiens; identical to SEQ ID NO: 6037
  chr17:56402169-56402210
  hyper

SEQ ID NO: 39470 - DNA, 93 bp, Homo sapiens; identical to SEQ ID NO: 6038
  chr17:56402236-56402329
  hyper

SEQ ID NO: 39471 - DNA, 51 bp, Homo sapiens; identical to SEQ ID NO: 6045
  chr17:58498602-58498653
  hyper

SEQ ID NO: 39472 - DNA, 9 bp, Homo sapiens
  chr17:59467418-59467427
  hyper
gcccctgct

SEQ ID NO: 39473 - DNA, 39 bp, Homo sapiens; identical to SEQ ID NO: 6050
  chr17:59469780-59469819
  hyper

SEQ ID NO: 39474 - DNA, 2 bp, Homo sapiens
  chr17:59535525-59535527
  hyper
tg

SEQ ID NO: 39475 - DNA, 44 bp, Homo sapiens; identical to SEQ ID NO: 6053
  chr17:60781449-60781493
  hyper

SEQ ID NO: 39476 - DNA, 62 bp, Homo sapiens; identical to SEQ ID NO: 6054
  chr17:60781523-60781585
  hyper

SEQ ID NO: 39477 - DNA, 55 bp, Homo sapiens; identical to SEQ ID NO: 6055
  chr17:61043209-61043264
  hyper

SEQ ID NO: 39478 - DNA, 62 bp, Homo sapiens; identical to SEQ ID NO: 6056
  chr17:61043853-61043915
  hyper

SEQ ID NO: 39479 - DNA, 52 bp, Homo sapiens; identical to SEQ ID NO: 6057
  chr17:61043927-61043979
  hyper

SEQ ID NO: 39480 - DNA, 31 bp, Homo sapiens; identical to SEQ ID NO: 6058
  chr17:61044458-61044489
  hyper

SEQ ID NO: 39481 - DNA, 76 bp, Homo sapiens; identical to SEQ ID NO: 6059
  chr17:61522993-61523069
  hyper

SEQ ID NO: 39482 - DNA, 31 bp, Homo sapiens; identical to SEQ ID NO: 6063
  chr17:61921252-61921283
  hyper

SEQ ID NO: 39483 - DNA, 31 bp, Homo sapiens; identical to SEQ ID NO: 6064
  chr17:63555851-63555882
  hyper

SEQ ID NO: 39484 - DNA, 65 bp, Homo sapiens; identical to SEQ ID NO: 6065
  chr17:63555886-63555951
  hyper

SEQ ID NO: 39485 - DNA, 85 bp, Homo sapiens; identical to SEQ ID NO: 6066
  chr17:63556317-63556402
  hyper

SEQ ID NO: 39486 - DNA, 105 bp, Homo sapiens; identical to SEQ ID NO: 6067
  chr17:63556591-63556696
  hyper

SEQ ID NO: 39487 - DNA, 152 bp, Homo sapiens; identical to SEQ ID NO: 6068
  chr17:63556784-63556936
  hyper

SEQ ID NO: 39488 - DNA, 36 bp, Homo sapiens; identical to SEQ ID NO: 6069
  chr17:63556996-63557032
  hyper

SEQ ID NO: 39489 - DNA, 51 bp, Homo sapiens; identical to SEQ ID NO: 6070
  chr17:63557343-63557394
  hyper

SEQ ID NO: 39490 - DNA, 31 bp, Homo sapiens; identical to SEQ ID NO: 6071
  chr17:63557793-63557824
  hyper

SEQ ID NO: 39491 - DNA, 31 bp, Homo sapiens; identical to SEQ ID NO: 6072
  chr17:64298538-64298569
  hyper

SEQ ID NO: 39492 - DNA, 57 bp, Homo sapiens; identical to SEQ ID NO: 6073
  chr17:65242141-65242198
  hyper

SEQ ID NO: 39493 - DNA, 2 bp, Homo sapiens
  chr17:66434323-66434325
  hyper
tt

SEQ ID NO: 39494 - DNA, 31 bp, Homo sapiens; identical to SEQ ID NO: 6075
  chr17:66434432-66434463
  hyper

SEQ ID NO: 39495 - DNA, 34 bp, Homo sapiens; identical to SEQ ID NO: 6076
  chr17:67410750-67410784
  hyper

SEQ ID NO: 39496 - DNA, 36 bp, Homo sapiens; identical to SEQ ID NO: 6078
  chr17:70116990-70117026
  hyper

SEQ ID NO: 39497 - DNA, 31 bp, Homo sapiens; identical to SEQ ID NO: 6079
  chr17:70117038-70117069
  hyper

SEQ ID NO: 39498 - DNA, 2 bp, Homo sapiens
  chr17:71161117-71161119
  hyper
aa

SEQ ID NO: 39499 - DNA, 35 bp, Homo sapiens; identical to SEQ ID NO: 6083
  chr17:71306520-71306555
  hyper

SEQ ID NO: 39500 - DNA, 39 bp, Homo sapiens; identical to SEQ ID NO: 6084
  chr17:71306580-71306619
  hyper

SEQ ID NO: 39501 - DNA, 111 bp, Homo sapiens; identical to SEQ ID NO: 6085
  chr17:71306651-71306762
  hyper

SEQ ID NO: 39502 - DNA, 314 bp, Homo sapiens; identical to SEQ ID NO: 6086
  chr17:71306966-71307280
  hyper

SEQ ID NO: 39503 - DNA, 55 bp, Homo sapiens; identical to SEQ ID NO: 6087
  chr17:71307339-71307394
  hyper

SEQ ID NO: 39504 - DNA, 31 bp, Homo sapiens; identical to SEQ ID NO: 6088
  chr17:71307397-71307428
  hyper

SEQ ID NO: 39505 - DNA, 212 bp, Homo sapiens; identical to SEQ ID NO: 6089
  chr17:71307437-71307649
  hyper

SEQ ID NO: 39506 - DNA, 81 bp, Homo sapiens; identical to SEQ ID NO: 6090
  chr17:71307699-71307780
  hyper

SEQ ID NO: 39507 - DNA, 189 bp, Homo sapiens; identical to SEQ ID NO: 6091
  chr17:71307781-71307970
  hyper

SEQ ID NO: 39508 - DNA, 38 bp, Homo sapiens; identical to SEQ ID NO: 6092
  chr17:71307971-71308009
  hyper

SEQ ID NO: 39509 - DNA, 76 bp, Homo sapiens; identical to SEQ ID NO: 6093
  chr17:71308017-71308093
  hyper

SEQ ID NO: 39510 - DNA, 44 bp, Homo sapiens; identical to SEQ ID NO: 6094
  chr17:71308207-71308251
  hyper

SEQ ID NO: 39511 - DNA, 41 bp, Homo sapiens; identical to SEQ ID NO: 6095
  chr17:71308378-71308419
  hyper

SEQ ID NO: 39512 - DNA, 145 bp, Homo sapiens; identical to SEQ ID NO: 6096
  chr17:71308422-71308567
  hyper

SEQ ID NO: 39513 - DNA, 31 bp, Homo sapiens; identical to SEQ ID NO: 6097
  chr17:72210147-72210178
  hyper

SEQ ID NO: 39514 - DNA, 31 bp, Homo sapiens; identical to SEQ ID NO: 6098
  chr17:72427015-72427046
  hyper

SEQ ID NO: 39515 - DNA, 70 bp, Homo sapiens
  chr17:72427594-72427664
  hyper
tgaaggctaattaggacaagtcggagcagggaacggggacgccgggaggggagagcgcgctccgagttgg

SEQ ID NO: 39516 - DNA, 2 bp, Homo sapiens
  chr17:72427812-72427814
  hyper
gg

SEQ ID NO: 39517 - DNA, 66 bp, Homo sapiens; identical to SEQ ID NO: 6101
  chr17:72428235-72428301
  hyper

SEQ ID NO: 39518 - DNA, 1 bp, Homo sapiens
  chr17:72428331-72428332
  hyper
c

SEQ ID NO: 39519 - DNA, 50 bp, Homo sapiens
  chr17:72428489-72428539
  hyper
cggtcccagggagaggcaggccctgcgtcccggcccgggccccgccatcc

SEQ ID NO: 39520 - DNA, 177 bp, Homo sapiens; identical to SEQ ID NO: 6104
  chr17:72449938-72450115
  hyper

SEQ ID NO: 39521 - DNA, 106 bp, Homo sapiens; identical to SEQ ID NO: 6105
  chr17:72450206-72450312
  hyper

SEQ ID NO: 39522 - DNA, 154 bp, Homo sapiens; identical to SEQ ID NO: 6107
  chr17:72450353-72450507
  hyper

SEQ ID NO: 39523 - DNA, 31 bp, Homo sapiens; identical to SEQ ID NO: 6108
  chr17:72450548-72450579
  hyper

SEQ ID NO: 39524 - DNA, 78 bp, Homo sapiens; identical to SEQ ID NO: 6109
  chr17:72450589-72450667
  hyper

SEQ ID NO: 39525 - DNA, 48 bp, Homo sapiens; identical to SEQ ID NO: 6110
  chr17:72968520-72968568
  hyper

SEQ ID NO: 39526 - DNA, 43 bp, Homo sapiens; identical to SEQ ID NO: 6111
  chr17:72983605-72983648
  hyper

SEQ ID NO: 39527 - DNA, 37 bp, Homo sapiens; identical to SEQ ID NO: 6112
  chr17:72983650-72983687
  hyper

SEQ ID NO: 39528 - DNA, 76 bp, Homo sapiens; identical to SEQ ID NO: 6113
  chr17:72983764-72983840
  hyper

SEQ ID NO: 39529 - DNA, 63 bp, Homo sapiens; identical to SEQ ID NO: 6114
  chr17:72983858-72983921
  hyper

SEQ ID NO: 39530 - DNA, 417 bp, Homo sapiens; identical to SEQ ID NO: 6115
  chr17:72983946-72984363
  hyper

SEQ ID NO: 39531 - DNA, 145 bp, Homo sapiens; identical to SEQ ID NO: 6116
  chr17:72984365-72984510
  hyper

SEQ ID NO: 39532 - DNA, 31 bp, Homo sapiens; identical to SEQ ID NO: 6117
  chr17:73422367-73422398
  hyper

SEQ ID NO: 39533 - DNA, 31 bp, Homo sapiens; identical to SEQ ID NO: 6118
  chr17:73422420-73422451
  hyper

SEQ ID NO: 39534 - DNA, 171 bp, Homo sapiens; identical to SEQ ID NO: 6119
  chr17:73511276-73511447
  hyper

SEQ ID NO: 39535 - DNA, 34 bp, Homo sapiens; identical to SEQ ID NO: 6120
  chr17:73521009-73521043
  hyper

SEQ ID NO: 39536 - DNA, 31 bp, Homo sapiens
  chr17:73522382-73522413
  hyper
tgtgcctcctaatccccggacgcaggaagcc

SEQ ID NO: 39537 - DNA, 71 bp, Homo sapiens; identical to SEQ ID NO: 6122
  chr17:73522482-73522553
  hyper

SEQ ID NO: 39538 - DNA, 50 bp, Homo sapiens
  chr17:73585893-73585943
  hyper
agtgaggggtgcaggacgagtggggaaggggtgtccgggcttcgtcgcgg

SEQ ID NO: 39539 - DNA, 46 bp, Homo sapiens; identical to SEQ ID NO: 6125
  chr17:73874666-73874712
  hyper

SEQ ID NO: 39540 - DNA, 42 bp, Homo sapiens; identical to SEQ ID NO: 6126
  chr17:74137493-74137535
  hyper

SEQ ID NO: 39541 - DNA, 68 bp, Homo sapiens; identical to SEQ ID NO: 6127
  chr17:74236406-74236474
  hyper

SEQ ID NO: 39542 - DNA, 106 bp, Homo sapiens; identical to SEQ ID NO: 6128
  chr17:74236843-74236949
  hyper

SEQ ID NO: 39543 - DNA, 70 bp, Homo sapiens; identical to SEQ ID NO: 6129
  chr17:74381537-74381607
  hyper

SEQ ID NO: 39544 - DNA, 31 bp, Homo sapiens; identical to SEQ ID NO: 6130
  chr17:74381618-74381649
  hyper

SEQ ID NO: 39545 - DNA, 57 bp, Homo sapiens; identical to SEQ ID NO: 6131
  chr17:75082777-75082834
  hyper

SEQ ID NO: 39546 - DNA, 31 bp, Homo sapiens; identical to SEQ ID NO: 6132
  chr17:75082860-75082891
  hyper

SEQ ID NO: 39547 - DNA, 31 bp, Homo sapiens; identical to SEQ ID NO: 6136
  chr17:75392295-75392326
  hyper

SEQ ID NO: 39548 - DNA, 74 bp, Homo sapiens; identical to SEQ ID NO: 6137
  chr17:76349230-76349304
  hyper

SEQ ID NO: 39549 - DNA, 31 bp, Homo sapiens; identical to SEQ ID NO: 6138
  chr17:76588312-76588343
  hyper

SEQ ID NO: 39550 - DNA, 51 bp, Homo sapiens; identical to SEQ ID NO: 6139
  chr17:76588409-76588460
  hyper

SEQ ID NO: 39551 - DNA, 112 bp, Homo sapiens; identical to SEQ ID NO: 6140
  chr17:76921137-76921249
  hyper

SEQ ID NO: 39552 - DNA, 65 bp, Homo sapiens; identical to SEQ ID NO: 6141
  chr17:76921271-76921336
  hyper

SEQ ID NO: 39553 - DNA, 69 bp, Homo sapiens; identical to SEQ ID NO: 6142
  chr17:76921483-76921552
  hyper

SEQ ID NO: 39554 - DNA, 45 bp, Homo sapiens; identical to SEQ ID NO: 6143
  chr17:76967523-76967568
  hyper

SEQ ID NO: 39555 - DNA, 81 bp, Homo sapiens; identical to SEQ ID NO: 6144
  chr17:77070948-77071029
  hyper

SEQ ID NO: 39556 - DNA, 63 bp, Homo sapiens; identical to SEQ ID NO: 6145
  chr17:77071239-77071302
  hyper

SEQ ID NO: 39557 - DNA, 165 bp, Homo sapiens; identical to SEQ ID NO: 6146
  chr17:77071338-77071503
  hyper

SEQ ID NO: 39558 - DNA, 76 bp, Homo sapiens; identical to SEQ ID NO: 6147
  chr17:77771455-77771531
  hyper

SEQ ID NO: 39559 - DNA, 38 bp, Homo sapiens; identical to SEQ ID NO: 6148
  chr17:77771550-77771588
  hyper

SEQ ID NO: 39560 - DNA, 38 bp, Homo sapiens; identical to SEQ ID NO: 6149
  chr17:77771592-77771630
  hyper

SEQ ID NO: 39561 - DNA, 46 bp, Homo sapiens; identical to SEQ ID NO: 6150
  chr17:77774930-77774976
  hyper

SEQ ID NO: 39562 - DNA, 154 bp, Homo sapiens; identical to SEQ ID NO: 6154
  chr17:77813599-77813753
  hyper

SEQ ID NO: 39563 - DNA, 31 bp, Homo sapiens; identical to SEQ ID NO: 6155
  chr17:77813829-77813860
  hyper

SEQ ID NO: 39564 - DNA, 31 bp, Homo sapiens; identical to SEQ ID NO: 6156
  chr17:77813865-77813896
  hyper

SEQ ID NO: 39565 - DNA, 31 bp, Homo sapiens; identical to SEQ ID NO: 6157
  chr17:77813919-77813950
  hyper

SEQ ID NO: 39566 - DNA, 31 bp, Homo sapiens; identical to SEQ ID NO: 6158
  chr17:78009417-78009448
  hyper

SEQ ID NO: 39567 - DNA, 47 bp, Homo sapiens; identical to SEQ ID NO: 6159
  chr17:78009471-78009518
  hyper

SEQ ID NO: 39568 - DNA, 31 bp, Homo sapiens; identical to SEQ ID NO: 6160
  chr17:78009923-78009954
  hyper

SEQ ID NO: 39569 - DNA, 61 bp, Homo sapiens; identical to SEQ ID NO: 6161
  chr17:78010155-78010216
  hyper

SEQ ID NO: 39570 - DNA, 268 bp, Homo sapiens; identical to SEQ ID NO: 6162
  chr17:78010235-78010503
  hyper

SEQ ID NO: 39571 - DNA, 2 bp, Homo sapiens
  chr17:78010864-78010866
  hyper
cg

SEQ ID NO: 39572 - DNA, 31 bp, Homo sapiens; identical to SEQ ID NO: 6165
  chr17:78388503-78388534
  hyper

SEQ ID NO: 39573 - DNA, 34 bp, Homo sapiens; identical to SEQ ID NO: 6166
  chr17:78388648-78388682
  hyper

SEQ ID NO: 39574 - DNA, 91 bp, Homo sapiens; identical to SEQ ID NO: 6167
  chr17:78389460-78389551
  hyper

SEQ ID NO: 39575 - DNA, 190 bp, Homo sapiens; identical to SEQ ID NO: 6168
  chr17:78428376-78428566
  hyper

SEQ ID NO: 39576 - DNA, 50 bp, Homo sapiens; identical to SEQ ID NO: 6169
  chr17:78428637-78428687
  hyper

SEQ ID NO: 39577 - DNA, 48 bp, Homo sapiens; identical to SEQ ID NO: 6170
  chr17:78954935-78954983
  hyper

SEQ ID NO: 39578 - DNA, 31 bp, Homo sapiens; identical to SEQ ID NO: 6171
  chr17:78955670-78955701
  hyper

SEQ ID NO: 39579 - DNA, 256 bp, Homo sapiens; identical to SEQ ID NO: 6172
  chr17:79008305-79008561
  hyper

SEQ ID NO: 39580 - DNA, 266 bp, Homo sapiens; identical to SEQ ID NO: 6173
  chr17:79008840-79009106
  hyper

SEQ ID NO: 39581 - DNA, 31 bp, Homo sapiens; identical to SEQ ID NO: 6174
  chr17:79009132-79009163
  hyper

SEQ ID NO: 39582 - DNA, 138 bp, Homo sapiens; identical to SEQ ID NO: 6175
  chr17:79009227-79009365
  hyper

SEQ ID NO: 39583 - DNA, 101 bp, Homo sapiens; identical to SEQ ID NO: 6176
  chr17:79009389-79009490
  hyper

SEQ ID NO: 39584 - DNA, 31 bp, Homo sapiens; identical to SEQ ID NO: 6177
  chr17:79197096-79197127
  hyper

SEQ ID NO: 39585 - DNA, 37 bp, Homo sapiens; identical to SEQ ID NO: 6178
  chr17:79318212-79318249
  hyper

SEQ ID NO: 39586 - DNA, 31 bp, Homo sapiens; identical to SEQ ID NO: 6179
  chr17:79319123-79319154
  hyper

SEQ ID NO: 39587 - DNA, 52 bp, Homo sapiens; identical to SEQ ID NO: 6180
  chr17:79319252-79319304
  hyper

SEQ ID NO: 39588 - DNA, 47 bp, Homo sapiens; identical to SEQ ID NO: 6181
  chr17:79762707-79762754
  hyper

SEQ ID NO: 39589 - DNA, 31 bp, Homo sapiens; identical to SEQ ID NO: 6182
  chr17:79791534-79791565
  hyper

SEQ ID NO: 39590 - DNA, 37 bp, Homo sapiens; identical to SEQ ID NO: 6183
  chr17:79886040-79886077
  hyper

SEQ ID NO: 39591 - DNA, 35 bp, Homo sapiens; identical to SEQ ID NO: 6184
  chr17:79918401-79918436
  hyper

SEQ ID NO: 39592 - DNA, 34 bp, Homo sapiens; identical to SEQ ID NO: 6185
  chr17:79946603-79946637
  hyper

SEQ ID NO: 39593 - DNA, 31 bp, Homo sapiens; identical to SEQ ID NO: 6186
  chr17:80010342-80010373
  hyper

SEQ ID NO: 39594 - DNA, 69 bp, Homo sapiens
  chr17:80277697-80277766
  hyper
tgcgtgtgtgcagagacgggtgcgcgactccatgcgtgtgtgcagaaacgggtgcatgtggacacgtgt

SEQ ID NO: 39595 - DNA, 2 bp, Homo sapiens
  chr17:80655504-80655506
  hyper
gc

SEQ ID NO: 39596 - DNA, 76 bp, Homo sapiens
  chr17:80655727-80655803
  hyper
cttccgcacgcgagtcacctgtgctccttcctctcccccggacacgcgggacccctggcctcgggaccggaccctg

SEQ ID NO: 39597 - DNA, 337 bp, Homo sapiens; identical to SEQ ID NO: 6190
  chr17:80655901-80656238
  hyper

SEQ ID NO: 39598 - DNA, 140 bp, Homo sapiens; identical to SEQ ID NO: 6191
  chr17:80656360-80656500
  hyper

SEQ ID NO: 39599 - DNA, 139 bp, Homo sapiens; identical to SEQ ID NO: 6192
  chr17:80656563-80656702
  hyper

SEQ ID NO: 39600 - DNA, 250 bp, Homo sapiens; identical to SEQ ID NO: 6193
  chr17:80656731-80656981
  hyper

SEQ ID NO: 39601 - DNA, 47 bp, Homo sapiens
  chr17:80657001-80657048
  hyper
cccaccagggagacctcgggtgcctggccgggtggggctcggggtcg

SEQ ID NO: 39602 - DNA, 36 bp, Homo sapiens; identical to SEQ ID NO: 6196
  chr17:80693227-80693263
  hyper

SEQ ID NO: 39603 - DNA, 42 bp, Homo sapiens
  chr17:80693276-80693318
  hyper
gagctcaagccccagcgcgcccgcgaagagctgcgcggactc

SEQ ID NO: 39604 - DNA, 37 bp, Homo sapiens; identical to SEQ ID NO: 6199
  chr17:81009161-81009198
  hyper

SEQ ID NO: 39605 - DNA, 58 bp, Homo sapiens; identical to SEQ ID NO: 6200
  chr17:81036701-81036759
  hyper

SEQ ID NO: 39606 - DNA, 41 bp, Homo sapiens; identical to SEQ ID NO: 6201
  chr17:81036921-81036962
  hyper

SEQ ID NO: 39607 - DNA, 31 bp, Homo sapiens; identical to SEQ ID NO: 6202
  chr17:81037127-81037158
  hyper

SEQ ID NO: 39608 - DNA, 50 bp, Homo sapiens; identical to SEQ ID NO: 6203
  chr17:81038241-81038291
  hyper

SEQ ID NO: 39609 - DNA, 60 bp, Homo sapiens; identical to SEQ ID NO: 6204
  chr18:712015-712075
  hyper

SEQ ID NO: 39610 - DNA, 36 bp, Homo sapiens; identical to SEQ ID NO: 6205
  chr18:712306-712342
  hyper

SEQ ID NO: 39611 - DNA, 72 bp, Homo sapiens; identical to SEQ ID NO: 6206
  chr18:712366-712438
  hyper

SEQ ID NO: 39612 - DNA, 31 bp, Homo sapiens; identical to SEQ ID NO: 6207
  chr18:811589-811620
  hyper

SEQ ID NO: 39613 - DNA, 80 bp, Homo sapiens; identical to SEQ ID NO: 6208
  chr18:811633-811713
  hyper

SEQ ID NO: 39614 - DNA, 31 bp, Homo sapiens; identical to SEQ ID NO: 6209
  chr18:811720-811751
  hyper

SEQ ID NO: 39615 - DNA, 110 bp, Homo sapiens; identical to SEQ ID NO: 6210
  chr18:811862-811972
  hyper

SEQ ID NO: 39616 - DNA, 199 bp, Homo sapiens; identical to SEQ ID NO: 6211
  chr18:811973-812172
  hyper

SEQ ID NO: 39617 - DNA, 31 bp, Homo sapiens; identical to SEQ ID NO: 6212
  chr18:812283-812314
  hyper

SEQ ID NO: 39618 - DNA, 234 bp, Homo sapiens; identical to SEQ ID NO: 6213
  chr18:812346-812580
  hyper

SEQ ID NO: 39619 - DNA, 88 bp, Homo sapiens; identical to SEQ ID NO: 6214
  chr18:812611-812699
  hyper

SEQ ID NO: 39620 - DNA, 51 bp, Homo sapiens; identical to SEQ ID NO: 6215
  chr18:2571377-2571428
  hyper

SEQ ID NO: 39621 - DNA, 36 bp, Homo sapiens; identical to SEQ ID NO: 6221
  chr18:3262088-3262124
  hyper

SEQ ID NO: 39622 - DNA, 43 bp, Homo sapiens; identical to SEQ ID NO: 6222
  chr18:3447897-3447940
  hyper

SEQ ID NO: 39623 - DNA, 235 bp, Homo sapiens; identical to SEQ ID NO: 6223
  chr18:3448077-3448312
  hyper

SEQ ID NO: 39624 - DNA, 70 bp, Homo sapiens; identical to SEQ ID NO: 6224
  chr18:3448323-3448393
  hyper

SEQ ID NO: 39625 - DNA, 127 bp, Homo sapiens; identical to SEQ ID NO: 6225
  chr18:3448402-3448529
  hyper

SEQ ID NO: 39626 - DNA, 36 bp, Homo sapiens; identical to SEQ ID NO: 6226
  chr18:3448759-3448795
  hyper

SEQ ID NO: 39627 - DNA, 31 bp, Homo sapiens; identical to SEQ ID NO: 6227
  chr18:3449164-3449195
  hyper

SEQ ID NO: 39628 - DNA, 571 bp, Homo sapiens; identical to SEQ ID NO: 6228
  chr18:3449232-3449803
  hyper

SEQ ID NO: 39629 - DNA, 57 bp, Homo sapiens; identical to SEQ ID NO: 6229
  chr18:3449827-3449884
  hyper

SEQ ID NO: 39630 - DNA, 411 bp, Homo sapiens; identical to SEQ ID NO: 6230
  chr18:3449885-3450296
  hyper

SEQ ID NO: 39631 - DNA, 174 bp, Homo sapiens; identical to SEQ ID NO: 6231
  chr18:3450306-3450480
  hyper

SEQ ID NO: 39632 - DNA, 452 bp, Homo sapiens; identical to SEQ ID NO: 6232
  chr18:3450493-3450945
  hyper

SEQ ID NO: 39633 - DNA, 64 bp, Homo sapiens; identical to SEQ ID NO: 6233
  chr18:3450951-3451015
  hyper

SEQ ID NO: 39634 - DNA, 70 bp, Homo sapiens; identical to SEQ ID NO: 6234
  chr18:3451023-3451093
  hyper

SEQ ID NO: 39635 - DNA, 31 bp, Homo sapiens; identical to SEQ ID NO: 6235
  chr18:3451259-3451290
  hyper

SEQ ID NO: 39636 - DNA, 100 bp, Homo sapiens; identical to SEQ ID NO: 6236
  chr18:3451294-3451394
  hyper

SEQ ID NO: 39637 - DNA, 40 bp, Homo sapiens; identical to SEQ ID NO: 6237
  chr18:3451458-3451498
  hyper

SEQ ID NO: 39638 - DNA, 77 bp, Homo sapiens; identical to SEQ ID NO: 6238
  chr18:3451508-3451585
  hyper

SEQ ID NO: 39639 - DNA, 116 bp, Homo sapiens; identical to SEQ ID NO: 6239
  chr18:3451589-3451705
  hyper

SEQ ID NO: 39640 - DNA, 193 bp, Homo sapiens; identical to SEQ ID NO: 6240
  chr18:3451708-3451901
  hyper

SEQ ID NO: 39641 - DNA, 56 bp, Homo sapiens; identical to SEQ ID NO: 6241
  chr18:3451904-3451960
  hyper

SEQ ID NO: 39642 - DNA, 64 bp, Homo sapiens; identical to SEQ ID NO: 6242
  chr18:3451971-3452035
  hyper

SEQ ID NO: 39643 - DNA, 43 bp, Homo sapiens; identical to SEQ ID NO: 6243
  chr18:3452053-3452096
  hyper

SEQ ID NO: 39644 - DNA, 161 bp, Homo sapiens; identical to SEQ ID NO: 6244
  chr18:3452103-3452264
  hyper

SEQ ID NO: 39645 - DNA, 31 bp, Homo sapiens; identical to SEQ ID NO: 6245
  chr18:6414307-6414338
  hyper

SEQ ID NO: 39646 - DNA, 49 bp, Homo sapiens; identical to SEQ ID NO: 6246
  chr18:8705986-8706035
  hyper

SEQ ID NO: 39647 - DNA, 150 bp, Homo sapiens; identical to SEQ ID NO: 6247
  chr18:8706036-8706186
  hyper

SEQ ID NO: 39648 - DNA, 44 bp, Homo sapiens; identical to SEQ ID NO: 6248
  chr18:8748271-8748315
  hyper

SEQ ID NO: 39649 - DNA, 31 bp, Homo sapiens; identical to SEQ ID NO: 6249
  chr18:9474875-9474906
  hyper

SEQ ID NO: 39650 - DNA, 34 bp, Homo sapiens; identical to SEQ ID NO: 6250
  chr18:9474912-9474946
  hyper

SEQ ID NO: 39651 - DNA, 31 bp, Homo sapiens; identical to SEQ ID NO: 6251
  chr18:12859860-12859891
  hyper

SEQ ID NO: 39652 - DNA, 123 bp, Homo sapiens; identical to SEQ ID NO: 6253
  chr18:19748905-19749028
  hyper

SEQ ID NO: 39653 - DNA, 31 bp, Homo sapiens; identical to SEQ ID NO: 6254
  chr18:19749057-19749088
  hyper

SEQ ID NO: 39654 - DNA, 45 bp, Homo sapiens; identical to SEQ ID NO: 6255
  chr18:19749137-19749182
  hyper

SEQ ID NO: 39655 - DNA, 31 bp, Homo sapiens; identical to SEQ ID NO: 6256
  chr18:19749359-19749390
  hyper

SEQ ID NO: 39656 - DNA, 46 bp, Homo sapiens; identical to SEQ ID NO: 6257
  chr18:19749776-19749822
  hyper

SEQ ID NO: 39657 - DNA, 72 bp, Homo sapiens; identical to SEQ ID NO: 6258
  chr18:19750138-19750210
  hyper

SEQ ID NO: 39658 - DNA, 31 bp, Homo sapiens; identical to SEQ ID NO: 6259
  chr18:19750578-19750609
  hyper

SEQ ID NO: 39659 - DNA, 75 bp, Homo sapiens; identical to SEQ ID NO: 6260
  chr18:20715562-20715637
  hyper

SEQ ID NO: 39660 - DNA, 60 bp, Homo sapiens; identical to SEQ ID NO: 6261
  chr18:20716060-20716120
  hyper

SEQ ID NO: 39661 - DNA, 44 bp, Homo sapiens; identical to SEQ ID NO: 6262
  chr18:20716263-20716307
  hyper

SEQ ID NO: 39662 - DNA, 46 bp, Homo sapiens; identical to SEQ ID NO: 6263
  chr18:21242240-21242286
  hyper

SEQ ID NO: 39663 - DNA, 88 bp, Homo sapiens; identical to SEQ ID NO: 6264
  chr18:21242502-21242590
  hyper

SEQ ID NO: 39664 - DNA, 89 bp, Homo sapiens; identical to SEQ ID NO: 6265
  chr18:21242592-21242681
  hyper

SEQ ID NO: 39665 - DNA, 31 bp, Homo sapiens; identical to SEQ ID NO: 6266
  chr18:21242718-21242749
  hyper

SEQ ID NO: 39666 - DNA, 30 bp, Homo sapiens
  chr18:21242787-21242817
  hyper
gcagaggggcggcctccgacgccgcgcgct

SEQ ID NO: 39667 - DNA, 116 bp, Homo sapiens
  chr18:21242871-21242987
  hyper
gcgcgggggcgcgcgcgcgcgcacactacacatggggtgtcgcgtggacgcgctccaggacctgccacacacgcgcgtgcacaaacaccccaaactccgcacgcactgtgcacttt

SEQ ID NO: 39668 - DNA, 31 bp, Homo sapiens; identical to SEQ ID NO: 6268
  chr18:21269148-21269179
  hyper

SEQ ID NO: 39669 - DNA, 139 bp, Homo sapiens; identical to SEQ ID NO: 6269
  chr18:21269206-21269345
  hyper

SEQ ID NO: 39670 - DNA, 31 bp, Homo sapiens; identical to SEQ ID NO: 6271
  chr18:21269776-21269807
  hyper

SEQ ID NO: 39671 - DNA, 31 bp, Homo sapiens; identical to SEQ ID NO: 6272
  chr18:21393784-21393815
  hyper

SEQ ID NO: 39672 - DNA, 248 bp, Homo sapiens; identical to SEQ ID NO: 6273
  chr18:21594466-21594714
  hyper

SEQ ID NO: 39673 - DNA, 31 bp, Homo sapiens; identical to SEQ ID NO: 6274
  chr18:21851789-21851820
  hyper

SEQ ID NO: 39674 - DNA, 173 bp, Homo sapiens; identical to SEQ ID NO: 6275
  chr18:21851936-21852109
  hyper

SEQ ID NO: 39675 - DNA, 51 bp, Homo sapiens; identical to SEQ ID NO: 6276
  chr18:21977789-21977840
  hyper

SEQ ID NO: 39676 - DNA, 31 bp, Homo sapiens; identical to SEQ ID NO: 6277
  chr18:22006300-22006331
  hyper

SEQ ID NO: 39677 - DNA, 131 bp, Homo sapiens; identical to SEQ ID NO: 6278
  chr18:22006338-22006469
  hyper

SEQ ID NO: 39678 - DNA, 31 bp, Homo sapiens; identical to SEQ ID NO: 6279
  chr18:22006517-22006548
  hyper

SEQ ID NO: 39679 - DNA, 69 bp, Homo sapiens; identical to SEQ ID NO: 6280
  chr18:22006774-22006843
  hyper

SEQ ID NO: 39680 - DNA, 31 bp, Homo sapiens; identical to SEQ ID NO: 6282
  chr18:22653838-22653869
  hyper

SEQ ID NO: 39681 - DNA, 45 bp, Homo sapiens; identical to SEQ ID NO: 6283
  chr18:24129702-24129747
  hyper

SEQ ID NO: 39682 - DNA, 41 bp, Homo sapiens; identical to SEQ ID NO: 6284
  chr18:24129775-24129816
  hyper

SEQ ID NO: 39683 - DNA, 31 bp, Homo sapiens; identical to SEQ ID NO: 6285
  chr18:24236253-24236284
  hyper

SEQ ID NO: 39684 - DNA, 31 bp, Homo sapiens; identical to SEQ ID NO: 6286
  chr18:28681273-28681304
  hyper

SEQ ID NO: 39685 - DNA, 31 bp, Homo sapiens; identical to SEQ ID NO: 6287
  chr18:28681776-28681807
  hyper

SEQ ID NO: 39686 - DNA, 36 bp, Homo sapiens; identical to SEQ ID NO: 6288
  chr18:29077880-29077916
  hyper

SEQ ID NO: 39687 - DNA, 59 bp, Homo sapiens
  chr18:29078073-29078132
  hyper
acgggaagacagccctcggggcggggagggagagggtggccgggccggggggaggccgg

SEQ ID NO: 39688 - DNA, 63 bp, Homo sapiens; identical to SEQ ID NO: 6290
  chr18:29078257-29078320
  hyper

SEQ ID NO: 39689 - DNA, 31 bp, Homo sapiens; identical to SEQ ID NO: 6291
  chr18:29078423-29078454
  hyper

SEQ ID NO: 39690 - DNA, 37 bp, Homo sapiens; identical to SEQ ID NO: 6292
  chr18:29265159-29265196
  hyper

SEQ ID NO: 39691 - DNA, 132 bp, Homo sapiens; identical to SEQ ID NO: 6293
  chr18:30050220-30050352
  hyper

SEQ ID NO: 39692 - DNA, 357 bp, Homo sapiens; identical to SEQ ID NO: 6294
  chr18:30050357-30050714
  hyper

SEQ ID NO: 39693 - DNA, 46 bp, Homo sapiens; identical to SEQ ID NO: 6295
  chr18:30050715-30050761
  hyper

SEQ ID NO: 39694 - DNA, 40 bp, Homo sapiens; identical to SEQ ID NO: 6296
  chr18:30050762-30050802
  hyper

SEQ ID NO: 39695 - DNA, 99 bp, Homo sapiens; identical to SEQ ID NO: 6297
  chr18:30050987-30051086
  hyper

SEQ ID NO: 39696 - DNA, 31 bp, Homo sapiens; identical to SEQ ID NO: 6298
  chr18:30051112-30051143
  hyper

SEQ ID NO: 39697 - DNA, 35 bp, Homo sapiens; identical to SEQ ID NO: 6299
  chr18:30051166-30051201
  hyper

SEQ ID NO: 39698 - DNA, 31 bp, Homo sapiens; identical to SEQ ID NO: 6300
  chr18:30051251-30051282
  hyper

SEQ ID NO: 39699 - DNA, 50 bp, Homo sapiens; identical to SEQ ID NO: 6301
  chr18:30051291-30051341
  hyper

SEQ ID NO: 39700 - DNA, 50 bp, Homo sapiens; identical to SEQ ID NO: 6303
  chr18:30351620-30351670
  hyper

SEQ ID NO: 39701 - DNA, 26 bp, Homo sapiens
  chr18:30352257-30352283
  hyper
ctaccctccctcgcgctccctccgcc

SEQ ID NO: 39702 - DNA, 31 bp, Homo sapiens; identical to SEQ ID NO: 6305
  chr18:33077969-33078000
  hyper

SEQ ID NO: 39703 - DNA, 35 bp, Homo sapiens; identical to SEQ ID NO: 6306
  chr18:33078013-33078048
  hyper

SEQ ID NO: 39704 - DNA, 61 bp, Homo sapiens; identical to SEQ ID NO: 6307
  chr18:33766768-33766829
  hyper

SEQ ID NO: 39705 - DNA, 44 bp, Homo sapiens; identical to SEQ ID NO: 6308
  chr18:33766845-33766889
  hyper

SEQ ID NO: 39706 - DNA, 64 bp, Homo sapiens; identical to SEQ ID NO: 6309
  chr18:33766897-33766961
  hyper

SEQ ID NO: 39707 - DNA, 31 bp, Homo sapiens; identical to SEQ ID NO: 6310
  chr18:33766964-33766995
  hyper

SEQ ID NO: 39708 - DNA, 183 bp, Homo sapiens; identical to SEQ ID NO: 6311
  chr18:33767006-33767189
  hyper

SEQ ID NO: 39709 - DNA, 2 bp, Homo sapiens
  chr18:33767424-33767426
  hyper
gt

SEQ ID NO: 39710 - DNA, 31 bp, Homo sapiens; identical to SEQ ID NO: 6313
  chr18:39172255-39172286
  hyper

SEQ ID NO: 39711 - DNA, 54 bp, Homo sapiens; identical to SEQ ID NO: 6314
  chr18:42258997-42259051
  hyper

SEQ ID NO: 39712 - DNA, 58 bp, Homo sapiens; identical to SEQ ID NO: 6315
  chr18:42259072-42259130
  hyper

SEQ ID NO: 39713 - DNA, 106 bp, Homo sapiens; identical to SEQ ID NO: 6317
  chr18:42260145-42260251
  hyper

SEQ ID NO: 39714 - DNA, 31 bp, Homo sapiens; identical to SEQ ID NO: 6318
  chr18:42260319-42260350
  hyper

SEQ ID NO: 39715 - DNA, 40 bp, Homo sapiens; identical to SEQ ID NO: 6319
  chr18:42260531-42260571
  hyper

SEQ ID NO: 39716 - DNA, 55 bp, Homo sapiens; identical to SEQ ID NO: 6320
  chr18:43547677-43547732
  hyper

SEQ ID NO: 39717 - DNA, 31 bp, Homo sapiens; identical to SEQ ID NO: 6321
  chr18:43547741-43547772
  hyper

SEQ ID NO: 39718 - DNA, 31 bp, Homo sapiens; identical to SEQ ID NO: 6322
  chr18:43547789-43547820
  hyper

SEQ ID NO: 39719 - DNA, 34 bp, Homo sapiens; identical to SEQ ID NO: 6323
  chr18:43924113-43924147
  hyper

SEQ ID NO: 39720 - DNA, 31 bp, Homo sapiens; identical to SEQ ID NO: 6324
  chr18:45534405-45534436
  hyper

SEQ ID NO: 39721 - DNA, 32 bp, Homo sapiens
  chr18:45662552-45662584
  hyper
gcgctccagtgggtgacgccggcccgggcgcc

SEQ ID NO: 39722 - DNA, 39 bp, Homo sapiens; identical to SEQ ID NO: 6326
  chr18:45663251-45663290
  hyper

SEQ ID NO: 39723 - DNA, 107 bp, Homo sapiens; identical to SEQ ID NO: 6327
  chr18:45687996-45688103
  hyper

SEQ ID NO: 39724 - DNA, 83 bp, Homo sapiens; identical to SEQ ID NO: 6328
  chr18:45688153-45688236
  hyper

SEQ ID NO: 39725 - DNA, 31 bp, Homo sapiens; identical to SEQ ID NO: 6329
  chr18:45935490-45935521
  hyper

SEQ ID NO: 39726 - DNA, 39 bp, Homo sapiens; identical to SEQ ID NO: 6330
  chr18:45935602-45935641
  hyper

SEQ ID NO: 39727 - DNA, 103 bp, Homo sapiens; identical to SEQ ID NO: 6331
  chr18:45935847-45935950
  hyper

SEQ ID NO: 39728 - DNA, 141 bp, Homo sapiens; identical to SEQ ID NO: 6332
  chr18:45936025-45936166
  hyper

SEQ ID NO: 39729 - DNA, 471 bp, Homo sapiens; identical to SEQ ID NO: 6333
  chr18:45936197-45936668
  hyper

SEQ ID NO: 39730 - DNA, 31 bp, Homo sapiens; identical to SEQ ID NO: 6334
  chr18:45936826-45936857
  hyper

SEQ ID NO: 39731 - DNA, 44 bp, Homo sapiens; identical to SEQ ID NO: 6335
  chr18:45936897-45936941
  hyper

SEQ ID NO: 39732 - DNA, 52 bp, Homo sapiens; identical to SEQ ID NO: 6336
  chr18:45936946-45936998
  hyper

SEQ ID NO: 39733 - DNA, 41 bp, Homo sapiens; identical to SEQ ID NO: 6337
  chr18:45937002-45937043
  hyper

SEQ ID NO: 39734 - DNA, 62 bp, Homo sapiens; identical to SEQ ID NO: 6338
  chr18:45937125-45937187
  hyper

SEQ ID NO: 39735 - DNA, 274 bp, Homo sapiens; identical to SEQ ID NO: 6339
  chr18:46065115-46065389
  hyper

SEQ ID NO: 39736 - DNA, 52 bp, Homo sapiens; identical to SEQ ID NO: 6340
  chr18:46065663-46065715
  hyper

SEQ ID NO: 39737 - DNA, 96 bp, Homo sapiens; identical to SEQ ID NO: 6341
  chr18:46065718-46065814
  hyper

SEQ ID NO: 39738 - DNA, 87 bp, Homo sapiens; identical to SEQ ID NO: 6342
  chr18:46065840-46065927
  hyper

SEQ ID NO: 39739 - DNA, 55 bp, Homo sapiens; identical to SEQ ID NO: 6343
  chr18:46065928-46065983
  hyper

SEQ ID NO: 39740 - DNA, 131 bp, Homo sapiens; identical to SEQ ID NO: 6344
  chr18:46066028-46066159
  hyper

SEQ ID NO: 39741 - DNA, 234 bp, Homo sapiens; identical to SEQ ID NO: 6345
  chr18:46066173-46066407
  hyper

SEQ ID NO: 39742 - DNA, 70 bp, Homo sapiens; identical to SEQ ID NO: 6346
  chr18:46066469-46066539
  hyper

SEQ ID NO: 39743 - DNA, 71 bp, Homo sapiens; identical to SEQ ID NO: 6347
  chr18:46066545-46066616
  hyper

SEQ ID NO: 39744 - DNA, 62 bp, Homo sapiens; identical to SEQ ID NO: 6348
  chr18:46066632-46066694
  hyper

SEQ ID NO: 39745 - DNA, 86 bp, Homo sapiens; identical to SEQ ID NO: 6349
  chr18:46066771-46066857
  hyper

SEQ ID NO: 39746 - DNA, 54 bp, Homo sapiens; identical to SEQ ID NO: 6350
  chr18:46066902-46066956
  hyper

SEQ ID NO: 39747 - DNA, 82 bp, Homo sapiens; identical to SEQ ID NO: 6351
  chr18:46067001-46067083
  hyper

SEQ ID NO: 39748 - DNA, 36 bp, Homo sapiens; identical to SEQ ID NO: 6352
  chr18:46067208-46067244
  hyper

SEQ ID NO: 39749 - DNA, 124 bp, Homo sapiens; identical to SEQ ID NO: 6353
  chr18:46067437-46067561
  hyper

SEQ ID NO: 39750 - DNA, 153 bp, Homo sapiens; identical to SEQ ID NO: 6354
  chr18:46067570-46067723
  hyper

SEQ ID NO: 39751 - DNA, 38 bp, Homo sapiens; identical to SEQ ID NO: 6355
  chr18:46186358-46186396
  hyper

SEQ ID NO: 39752 - DNA, 31 bp, Homo sapiens; identical to SEQ ID NO: 6356
  chr18:46186410-46186441
  hyper

SEQ ID NO: 39753 - DNA, 31 bp, Homo sapiens; identical to SEQ ID NO: 6357
  chr18:46476386-46476417
  hyper

SEQ ID NO: 39754 - DNA, 61 bp, Homo sapiens; identical to SEQ ID NO: 6358
  chr18:47339427-47339488
  hyper

SEQ ID NO: 39755 - DNA, 31 bp, Homo sapiens; identical to SEQ ID NO: 6359
  chr18:47339536-47339567
  hyper

SEQ ID NO: 39756 - DNA, 2 bp, Homo sapiens
  chr18:47339605-47339607
  hyper
aa

SEQ ID NO: 39757 - DNA, 6 bp, Homo sapiens
  chr18:47339758-47339764
  hyper
gcggcg

SEQ ID NO: 39758 - DNA, 41 bp, Homo sapiens; identical to SEQ ID NO: 6362
  chr18:47720920-47720961
  hyper

SEQ ID NO: 39759 - DNA, 398 bp, Homo sapiens; identical to SEQ ID NO: 6363
  chr18:47720984-47721382
  hyper

SEQ ID NO: 39760 - DNA, 61 bp, Homo sapiens; identical to SEQ ID NO: 6364
  chr18:47721459-47721520
  hyper

SEQ ID NO: 39761 - DNA, 60 bp, Homo sapiens; identical to SEQ ID NO: 6365
  chr18:47721676-47721736
  hyper

SEQ ID NO: 39762 - DNA, 31 bp, Homo sapiens; identical to SEQ ID NO: 6370
  chr18:52495743-52495774
  hyper

SEQ ID NO: 39763 - DNA, 40 bp, Homo sapiens; identical to SEQ ID NO: 6371
  chr18:52495779-52495819
  hyper

SEQ ID NO: 39764 - DNA, 41 bp, Homo sapiens; identical to SEQ ID NO: 6372
  chr18:52495821-52495862
  hyper

SEQ ID NO: 39765 - DNA, 2 bp, Homo sapiens
  chr18:52495892-52495894
  hyper
ct

SEQ ID NO: 39766 - DNA, 31 bp, Homo sapiens; identical to SEQ ID NO: 6377
  chr18:55102712-55102743
  hyper

SEQ ID NO: 39767 - DNA, 50 bp, Homo sapiens; identical to SEQ ID NO: 6378
  chr18:55469741-55469791
  hyper

SEQ ID NO: 39768 - DNA, 56 bp, Homo sapiens; identical to SEQ ID NO: 6379
  chr18:55469798-55469854
  hyper

SEQ ID NO: 39769 - DNA, 55 bp, Homo sapiens; identical to SEQ ID NO: 6380
  chr18:55469976-55470031
  hyper

SEQ ID NO: 39770 - DNA, 58 bp, Homo sapiens; identical to SEQ ID NO: 6381
  chr18:55470276-55470334
  hyper

SEQ ID NO: 39771 - DNA, 37 bp, Homo sapiens; identical to SEQ ID NO: 6382
  chr18:55470591-55470628
  hyper

SEQ ID NO: 39772 - DNA, 31 bp, Homo sapiens; identical to SEQ ID NO: 6383
  chr18:56976091-56976122
  hyper

SEQ ID NO: 39773 - DNA, 44 bp, Homo sapiens; identical to SEQ ID NO: 6385
  chr18:59500716-59500760
  hyper

SEQ ID NO: 39774 - DNA, 51 bp, Homo sapiens; identical to SEQ ID NO: 6386
  chr18:59500828-59500879
  hyper

SEQ ID NO: 39775 - DNA, 40 bp, Homo sapiens; identical to SEQ ID NO: 6387
  chr18:59992690-59992730
  hyper

SEQ ID NO: 39776 - DNA, 114 bp, Homo sapiens; identical to SEQ ID NO: 6388
  chr18:59992967-59993081
  hyper

SEQ ID NO: 39777 - DNA, 69 bp, Homo sapiens; identical to SEQ ID NO: 6389
  chr18:60189546-60189615
  hyper

SEQ ID NO: 39778 - DNA, 79 bp, Homo sapiens; identical to SEQ ID NO: 6390
  chr18:60189626-60189705
  hyper

SEQ ID NO: 39779 - DNA, 88 bp, Homo sapiens; identical to SEQ ID NO: 6391
  chr18:60189824-60189912
  hyper

SEQ ID NO: 39780 - DNA, 79 bp, Homo sapiens; identical to SEQ ID NO: 6392
  chr18:60190084-60190163
  hyper

SEQ ID NO: 39781 - DNA, 188 bp, Homo sapiens; identical to SEQ ID NO: 6393
  chr18:60190165-60190353
  hyper

SEQ ID NO: 39782 - DNA, 57 bp, Homo sapiens; identical to SEQ ID NO: 6394
  chr18:60190443-60190500
  hyper

SEQ ID NO: 39783 - DNA, 204 bp, Homo sapiens; identical to SEQ ID NO: 6395
  chr18:60190610-60190814
  hyper

SEQ ID NO: 39784 - DNA, 518 bp, Homo sapiens; identical to SEQ ID NO: 6396
  chr18:60190846-60191364
  hyper

SEQ ID NO: 39785 - DNA, 60 bp, Homo sapiens; identical to SEQ ID NO: 6397
  chr18:60191440-60191500
  hyper

SEQ ID NO: 39786 - DNA, 193 bp, Homo sapiens; identical to SEQ ID NO: 6398
  chr18:60191503-60191696
  hyper

SEQ ID NO: 39787 - DNA, 96 bp, Homo sapiens; identical to SEQ ID NO: 6399
  chr18:60191978-60192074
  hyper

SEQ ID NO: 39788 - DNA, 31 bp, Homo sapiens; identical to SEQ ID NO: 6400
  chr18:60193831-60193862
  hyper

SEQ ID NO: 39789 - DNA, 92 bp, Homo sapiens; identical to SEQ ID NO: 6401
  chr18:60194121-60194213
  hyper

SEQ ID NO: 39790 - DNA, 117 bp, Homo sapiens; identical to SEQ ID NO: 6402
  chr18:60382938-60383055
  hyper

SEQ ID NO: 39791 - DNA, 55 bp, Homo sapiens; identical to SEQ ID NO: 6403
  chr18:60383085-60383140
  hyper

SEQ ID NO: 39792 - DNA, 464 bp, Homo sapiens; identical to SEQ ID NO: 6404
  chr18:60383150-60383614
  hyper

SEQ ID NO: 39793 - DNA, 57 bp, Homo sapiens; identical to SEQ ID NO: 6405
  chr18:60383661-60383718
  hyper

SEQ ID NO: 39794 - DNA, 159 bp, Homo sapiens; identical to SEQ ID NO: 6406
  chr18:60384006-60384165
  hyper

SEQ ID NO: 39795 - DNA, 31 bp, Homo sapiens; identical to SEQ ID NO: 6408
  chr18:60986009-60986040
  hyper

SEQ ID NO: 39796 - DNA, 31 bp, Homo sapiens; identical to SEQ ID NO: 6409
  chr18:61604083-61604114
  hyper

SEQ ID NO: 39797 - DNA, 72 bp, Homo sapiens; identical to SEQ ID NO: 6410
  chr18:61604118-61604190
  hyper

SEQ ID NO: 39798 - DNA, 80 bp, Homo sapiens; identical to SEQ ID NO: 6411
  chr18:67955796-67955876
  hyper

SEQ ID NO: 39799 - DNA, 31 bp, Homo sapiens; identical to SEQ ID NO: 6412
  chr18:67955915-67955946
  hyper

SEQ ID NO: 39800 - DNA, 60 bp, Homo sapiens; identical to SEQ ID NO: 6413
  chr18:67956753-67956813
  hyper

SEQ ID NO: 39801 - DNA, 93 bp, Homo sapiens; identical to SEQ ID NO: 6414
  chr18:67956838-67956931
  hyper

SEQ ID NO: 39802 - DNA, 42 bp, Homo sapiens; identical to SEQ ID NO: 6416
  chr18:71958660-71958702
  hyper

SEQ ID NO: 39803 - DNA, 31 bp, Homo sapiens; identical to SEQ ID NO: 6417
  chr18:71958753-71958784
  hyper

SEQ ID NO: 39804 - DNA, 62 bp, Homo sapiens; identical to SEQ ID NO: 6418
  chr18:72124497-72124559
  hyper

SEQ ID NO: 39805 - DNA, 61 bp, Homo sapiens; identical to SEQ ID NO: 6419
  chr18:74202734-74202795
  hyper

SEQ ID NO: 39806 - DNA, 62 bp, Homo sapiens; identical to SEQ ID NO: 6420
  chr18:74202913-74202975
  hyper

SEQ ID NO: 39807 - DNA, 50 bp, Homo sapiens; identical to SEQ ID NO: 6421
  chr18:74203666-74203716
  hyper

SEQ ID NO: 39808 - DNA, 85 bp, Homo sapiens; identical to SEQ ID NO: 6422
  chr18:74203722-74203807
  hyper

SEQ ID NO: 39809 - DNA, 48 bp, Homo sapiens; identical to SEQ ID NO: 6423
  chr18:74204048-74204096
  hyper

SEQ ID NO: 39810 - DNA, 31 bp, Homo sapiens; identical to SEQ ID NO: 6424
  chr18:74204103-74204134
  hyper

SEQ ID NO: 39811 - DNA, 31 bp, Homo sapiens; identical to SEQ ID NO: 6425
  chr18:74204793-74204824
  hyper

SEQ ID NO: 39812 - DNA, 43 bp, Homo sapiens; identical to SEQ ID NO: 6426
  chr18:74206781-74206824
  hyper

SEQ ID NO: 39813 - DNA, 60 bp, Homo sapiens; identical to SEQ ID NO: 6427
  chr18:74207201-74207261
  hyper

SEQ ID NO: 39814 - DNA, 31 bp, Homo sapiens; identical to SEQ ID NO: 6428
  chr18:74207277-74207308
  hyper

SEQ ID NO: 39815 - DNA, 37 bp, Homo sapiens; identical to SEQ ID NO: 6429
  chr18:74207312-74207349
  hyper

SEQ ID NO: 39816 - DNA, 57 bp, Homo sapiens
  chr18:77160022-77160079
  hyper
ctggtgccgctcgtggggtcccgacgcccctacccccgggtccggaggagcctgcgc

SEQ ID NO: 39817 - DNA, 65 bp, Homo sapiens; identical to SEQ ID NO: 6432
  chr18:77160677-77160742
  hyper

SEQ ID NO: 39818 - DNA, 31 bp, Homo sapiens; identical to SEQ ID NO: 6433
  chr18:77710900-77710931
  hyper

SEQ ID NO: 39819 - DNA, 36 bp, Homo sapiens; identical to SEQ ID NO: 6434
  chr18:77712072-77712108
  hyper

SEQ ID NO: 39820 - DNA, 36 bp, Homo sapiens; identical to SEQ ID NO: 6435
  chr18:77724458-77724494
  hyper

SEQ ID NO: 39821 - DNA, 136 bp, Homo sapiens; identical to SEQ ID NO: 6436
  chr18:77794467-77794603
  hyper

SEQ ID NO: 39822 - DNA, 31 bp, Homo sapiens; identical to SEQ ID NO: 6437
  chr18:77867027-77867058
  hyper

SEQ ID NO: 39823 - DNA, 67 bp, Homo sapiens; identical to SEQ ID NO: 6438
  chr19:290868-290935
  hyper

SEQ ID NO: 39824 - DNA, 31 bp, Homo sapiens; identical to SEQ ID NO: 6440
  chr19:452244-452275
  hyper

SEQ ID NO: 39825 - DNA, 170 bp, Homo sapiens; identical to SEQ ID NO: 6441
  chr19:460129-460299
  hyper

SEQ ID NO: 39826 - DNA, 36 bp, Homo sapiens; identical to SEQ ID NO: 6442
  chr19:460568-460604
  hyper

SEQ ID NO: 39827 - DNA, 45 bp, Homo sapiens
  chr19:460631-460676
  hyper
gcggcggcggcgtccccggaccccgccgccccccgcccgccccgc

SEQ ID NO: 39828 - DNA, 92 bp, Homo sapiens; identical to SEQ ID NO: 6444
  chr19:460856-460948
  hyper

SEQ ID NO: 39829 - DNA, 35 bp, Homo sapiens; identical to SEQ ID NO: 6445
  chr19:461084-461119
  hyper

SEQ ID NO: 39830 - DNA, 68 bp, Homo sapiens; identical to SEQ ID NO: 6446
  chr19:461499-461567
  hyper

SEQ ID NO: 39831 - DNA, 37 bp, Homo sapiens; identical to SEQ ID NO: 6447
  chr19:461594-461631
  hyper

SEQ ID NO: 39832 - DNA, 31 bp, Homo sapiens; identical to SEQ ID NO: 6448
  chr19:461907-461938
  hyper

SEQ ID NO: 39833 - DNA, 31 bp, Homo sapiens; identical to SEQ ID NO: 6449
  chr19:462004-462035
  hyper

SEQ ID NO: 39834 - DNA, 41 bp, Homo sapiens; identical to SEQ ID NO: 6450
  chr19:507105-507146
  hyper

SEQ ID NO: 39835 - DNA, 48 bp, Homo sapiens; identical to SEQ ID NO: 6451
  chr19:603684-603732
  hyper

SEQ ID NO: 39836 - DNA, 2 bp, Homo sapiens
  chr19:603815-603817
  hyper
ac

SEQ ID NO: 39837 - DNA, 99 bp, Homo sapiens; identical to SEQ ID NO: 6453
  chr19:603850-603949
  hyper

SEQ ID NO: 39838 - DNA, 2 bp, Homo sapiens
  chr19:661585-661587
  hyper
ct

SEQ ID NO: 39839 - DNA, 63 bp, Homo sapiens; identical to SEQ ID NO: 6456
  chr19:661730-661793
  hyper

SEQ ID NO: 39840 - DNA, 31 bp, Homo sapiens; identical to SEQ ID NO: 6457
  chr19:661845-661876
  hyper

SEQ ID NO: 39841 - DNA, 31 bp, Homo sapiens; identical to SEQ ID NO: 6458
  chr19:663759-663790
  hyper

SEQ ID NO: 39842 - DNA, 48 bp, Homo sapiens; identical to SEQ ID NO: 6459
  chr19:676321-676369
  hyper

SEQ ID NO: 39843 - DNA, 31 bp, Homo sapiens; identical to SEQ ID NO: 6460
  chr19:676379-676410
  hyper

SEQ ID NO: 39844 - DNA, 132 bp, Homo sapiens; identical to SEQ ID NO: 6461
  chr19:680399-680531
  hyper

SEQ ID NO: 39845 - DNA, 182 bp, Homo sapiens; identical to SEQ ID NO: 6463
  chr19:813431-813613
  hyper

SEQ ID NO: 39846 - DNA, 71 bp, Homo sapiens
  chr19:813626-813697
  hyper
ttggccatggggctgcgcggggccagcaggtccacgtccacgctggcgcgcttcaggctgcccagcgaggt

SEQ ID NO: 39847 - DNA, 30 bp, Homo sapiens
  chr19:813830-813860
  hyper
gcgggggccggggccgcgggcttctctgca

SEQ ID NO: 39848 - DNA, 31 bp, Homo sapiens; identical to SEQ ID NO: 6465
  chr19:814390-814421
  hyper

SEQ ID NO: 39849 - DNA, 2 bp, Homo sapiens
  chr19:814428-814430
  hyper
ct

SEQ ID NO: 39850 - DNA, 47 bp, Homo sapiens; identical to SEQ ID NO: 6467
  chr19:942339-942386
  hyper

SEQ ID NO: 39851 - DNA, 37 bp, Homo sapiens; identical to SEQ ID NO: 6468
  chr19:1041003-1041040
  hyper

SEQ ID NO: 39852 - DNA, 80 bp, Homo sapiens; identical to SEQ ID NO: 6469
  chr19:1173280-1173360
  hyper

SEQ ID NO: 39853 - DNA, 39 bp, Homo sapiens; identical to SEQ ID NO: 6470
  chr19:1173362-1173401
  hyper

SEQ ID NO: 39854 - DNA, 31 bp, Homo sapiens; identical to SEQ ID NO: 6471
  chr19:1285674-1285705
  hyper

SEQ ID NO: 39855 - DNA, 31 bp, Homo sapiens; identical to SEQ ID NO: 6472
  chr19:1401652-1401683
  hyper

SEQ ID NO: 39856 - DNA, 14 bp, Homo sapiens
  chr19:1401687-1401701
  hyper
ctcggtgccccctc

SEQ ID NO: 39857 - DNA, 31 bp, Homo sapiens; identical to SEQ ID NO: 6474
  chr19:1444963-1444994
  hyper

SEQ ID NO: 39858 - DNA, 187 bp, Homo sapiens; identical to SEQ ID NO: 6475
  chr19:1491115-1491302
  hyper

SEQ ID NO: 39859 - DNA, 73 bp, Homo sapiens
  chr19:1491308-1491381
  hyper
aaaggaacctggtcaccgaagtgctgggggcgctggaggccaagaccggggtggagaagcggtatctggctgc

SEQ ID NO: 39860 - DNA, 37 bp, Homo sapiens
  chr19:1491429-1491466
  hyper
catgggcctgggggtcgcagaccggactccttccccg

SEQ ID NO: 39861 - DNA, 59 bp, Homo sapiens; identical to SEQ ID NO: 6477
  chr19:1491666-1491725
  hyper

SEQ ID NO: 39862 - DNA, 315 bp, Homo sapiens; identical to SEQ ID NO: 6478
  chr19:1567148-1567463
  hyper

SEQ ID NO: 39863 - DNA, 61 bp, Homo sapiens
  chr19:1567464-1567525
  hyper
tggcgacccacgatctcggcgacgtgctcggagctgggcaccgggacgcactcggtcatgt

SEQ ID NO: 39864 - DNA, 99 bp, Homo sapiens
  chr19:1567554-1567653
  hyper
ctcatctggtcggccagcagcgtcgggggccccagggccgcggggtggggcgcgaagcccgcgaacacgtcggggggcgacggccggggcggcggcggc

SEQ ID NO: 39865 - DNA, 31 bp, Homo sapiens; identical to SEQ ID NO: 6480
  chr19:1676084-1676115
  hyper

SEQ ID NO: 39866 - DNA, 79 bp, Homo sapiens; identical to SEQ ID NO: 6481
  chr19:1748598-1748677
  hyper

SEQ ID NO: 39867 - DNA, 49 bp, Homo sapiens; identical to SEQ ID NO: 6482
  chr19:1748798-1748847
  hyper

SEQ ID NO: 39868 - DNA, 39 bp, Homo sapiens
  chr19:1749556-1749595
  hyper
caacccctccgctccccggccagccgcggccgcccagcc

SEQ ID NO: 39869 - DNA, 31 bp, Homo sapiens; identical to SEQ ID NO: 6485
  chr19:1826719-1826750
  hyper

SEQ ID NO: 39870 - DNA, 31 bp, Homo sapiens
  chr19:1856932-1856963
  hyper
aggaggagcaggttgccggggtggggggggc

SEQ ID NO: 39871 - DNA, 26 bp, Homo sapiens
  chr19:1979018-1979044
  hyper
catcccgtaccgcgagcacaagagcc

SEQ ID NO: 39872 - DNA, 31 bp, Homo sapiens; identical to SEQ ID NO: 6490
  chr19:1979061-1979092
  hyper

SEQ ID NO: 39873 - DNA, 58 bp, Homo sapiens; identical to SEQ ID NO: 6491
  chr19:2168976-2169034
  hyper

SEQ ID NO: 39874 - DNA, 53 bp, Homo sapiens; identical to SEQ ID NO: 6492
  chr19:2169048-2169101
  hyper

SEQ ID NO: 39875 - DNA, 68 bp, Homo sapiens; identical to SEQ ID NO: 6493
  chr19:2169109-2169177
  hyper

SEQ ID NO: 39876 - DNA, 55 bp, Homo sapiens; identical to SEQ ID NO: 6494
  chr19:2169178-2169233
  hyper

SEQ ID NO: 39877 - DNA, 31 bp, Homo sapiens; identical to SEQ ID NO: 6495
  chr19:2169270-2169301
  hyper

SEQ ID NO: 39878 - DNA, 40 bp, Homo sapiens; identical to SEQ ID NO: 6497
  chr19:2273805-2273845
  hyper

SEQ ID NO: 39879 - DNA, 84 bp, Homo sapiens; identical to SEQ ID NO: 6498
  chr19:2273846-2273930
  hyper

SEQ ID NO: 39880 - DNA, 22 bp, Homo sapiens
  chr19:2273960-2273982
  hyper
gaggaaaggaggaactcgaaaa

SEQ ID NO: 39881 - DNA, 31 bp, Homo sapiens; identical to SEQ ID NO: 6505
  chr19:2329160-2329191
  hyper

SEQ ID NO: 39882 - DNA, 31 bp, Homo sapiens; identical to SEQ ID NO: 6506
  chr19:2431505-2431536
  hyper

SEQ ID NO: 39883 - DNA, 53 bp, Homo sapiens; identical to SEQ ID NO: 6507
  chr19:2462944-2462997
  hyper

SEQ ID NO: 39884 - DNA, 31 bp, Homo sapiens; identical to SEQ ID NO: 6508
  chr19:2488866-2488897
  hyper

SEQ ID NO: 39885 - DNA, 45 bp, Homo sapiens; identical to SEQ ID NO: 6509
  chr19:2579150-2579195
  hyper

SEQ ID NO: 39886 - DNA, 31 bp, Homo sapiens; identical to SEQ ID NO: 6510
  chr19:2579204-2579235
  hyper

SEQ ID NO: 39887 - DNA, 35 bp, Homo sapiens; identical to SEQ ID NO: 6511
  chr19:2579328-2579363
  hyper

SEQ ID NO: 39888 - DNA, 31 bp, Homo sapiens; identical to SEQ ID NO: 6512
  chr19:2579371-2579402
  hyper

SEQ ID NO: 39889 - DNA, 34 bp, Homo sapiens; identical to SEQ ID NO: 6513
  chr19:2579725-2579759
  hyper

SEQ ID NO: 39890 - DNA, 43 bp, Homo sapiens; identical to SEQ ID NO: 6514
  chr19:2944613-2944656
  hyper

SEQ ID NO: 39891 - DNA, 126 bp, Homo sapiens; identical to SEQ ID NO: 6515
  chr19:2944666-2944792
  hyper

SEQ ID NO: 39892 - DNA, 194 bp, Homo sapiens; identical to SEQ ID NO: 6516
  chr19:2944798-2944992
  hyper

SEQ ID NO: 39893 - DNA, 31 bp, Homo sapiens; identical to SEQ ID NO: 6517
  chr19:2945126-2945157
  hyper

SEQ ID NO: 39894 - DNA, 50 bp, Homo sapiens; identical to SEQ ID NO: 6518
  chr19:2945185-2945235
  hyper

SEQ ID NO: 39895 - DNA, 79 bp, Homo sapiens; identical to SEQ ID NO: 6519
  chr19:2945370-2945449
  hyper

SEQ ID NO: 39896 - DNA, 62 bp, Homo sapiens; identical to SEQ ID NO: 6520
  chr19:2950417-2950479
  hyper

SEQ ID NO: 39897 - DNA, 39 bp, Homo sapiens; identical to SEQ ID NO: 6521
  chr19:2950537-2950576
  hyper

SEQ ID NO: 39898 - DNA, 75 bp, Homo sapiens; identical to SEQ ID NO: 6522
  chr19:2950579-2950654
  hyper

SEQ ID NO: 39899 - DNA, 31 bp, Homo sapiens; identical to SEQ ID NO: 6523
  chr19:2950849-2950880
  hyper

SEQ ID NO: 39900 - DNA, 95 bp, Homo sapiens; identical to SEQ ID NO: 6524
  chr19:2950907-2951002
  hyper

SEQ ID NO: 39901 - DNA, 31 bp, Homo sapiens; identical to SEQ ID NO: 6525
  chr19:2951019-2951050
  hyper

SEQ ID NO: 39902 - DNA, 31 bp, Homo sapiens; identical to SEQ ID NO: 6526
  chr19:2977420-2977451
  hyper

SEQ ID NO: 39903 - DNA, 60 bp, Homo sapiens; identical to SEQ ID NO: 6527
  chr19:2977453-2977513
  hyper

SEQ ID NO: 39904 - DNA, 88 bp, Homo sapiens; identical to SEQ ID NO: 6528
  chr19:3094303-3094391
  hyper

SEQ ID NO: 39905 - DNA, 53 bp, Homo sapiens; identical to SEQ ID NO: 6529
  chr19:3094776-3094829
  hyper

SEQ ID NO: 39906 - DNA, 55 bp, Homo sapiens; identical to SEQ ID NO: 6533
  chr19:3367361-3367416
  hyper

SEQ ID NO: 39907 - DNA, 31 bp, Homo sapiens; identical to SEQ ID NO: 6534
  chr19:3404294-3404325
  hyper

SEQ ID NO: 39908 - DNA, 58 bp, Homo sapiens; identical to SEQ ID NO: 6535
  chr19:3573236-3573294
  hyper

SEQ ID NO: 39909 - DNA, 2 bp, Homo sapiens
  chr19:4054304-4054306
  hyper
gg

SEQ ID NO: 39910 - DNA, 7 bp, Homo sapiens
  chr19:4054380-4054387
  hyper
acagcga

SEQ ID NO: 39911 - DNA, 18 bp, Homo sapiens
  chr19:4054418-4054436
  hyper
tggccgttctgcgtggcg

SEQ ID NO: 39912 - DNA, 136 bp, Homo sapiens
  chr19:4054917-4055053
  hyper
ccacgttggctgtgctgacggtgagcgtggccgtgtaggcgaagtccatgagcgcggtgagcgcctcggcgctgacgaagtcgatctcgtacacgttctgctggtccaccacggcgcccgacgtgaacagcttctt

SEQ ID NO: 39913 - DNA, 47 bp, Homo sapiens; identical to SEQ ID NO: 6540
  chr19:4064372-4064419
  hyper

SEQ ID NO: 39914 - DNA, 59 bp, Homo sapiens; identical to SEQ ID NO: 6541
  chr19:4064871-4064930
  hyper

SEQ ID NO: 39915 - DNA, 31 bp, Homo sapiens; identical to SEQ ID NO: 6542
  chr19:4064938-4064969
  hyper

SEQ ID NO: 39916 - DNA, 137 bp, Homo sapiens; identical to SEQ ID NO: 6543
  chr19:4432849-4432986
  hyper

SEQ ID NO: 39917 - DNA, 45 bp, Homo sapiens; identical to SEQ ID NO: 6545
  chr19:5536815-5536860
  hyper

SEQ ID NO: 39918 - DNA, 31 bp, Homo sapiens; identical to SEQ ID NO: 6546
  chr19:5804011-5804042
  hyper

SEQ ID NO: 39919 - DNA, 43 bp, Homo sapiens; identical to SEQ ID NO: 6547
  chr19:5804851-5804894
  hyper

SEQ ID NO: 39920 - DNA, 567 bp, Homo sapiens; identical to SEQ ID NO: 6548
  chr19:6110323-6110890
  hyper

SEQ ID NO: 39921 - DNA, 31 bp, Homo sapiens; identical to SEQ ID NO: 6549
  chr19:6110900-6110931
  hyper

SEQ ID NO: 39922 - DNA, 26 bp, Homo sapiens
  chr19:6393961-6393987
  hyper
gcatgcacacatcccccgaatcatgg

SEQ ID NO: 39923 - DNA, 31 bp, Homo sapiens; identical to SEQ ID NO: 6551
  chr19:6459633-6459664
  hyper

SEQ ID NO: 39924 - DNA, 155 bp, Homo sapiens; identical to SEQ ID NO: 6552
  chr19:6464134-6464289
  hyper

SEQ ID NO: 39925 - DNA, 31 bp, Homo sapiens; identical to SEQ ID NO: 6553
  chr19:6464304-6464335
  hyper

SEQ ID NO: 39926 - DNA, 76 bp, Homo sapiens; identical to SEQ ID NO: 6554
  chr19:6464627-6464703
  hyper

SEQ ID NO: 39927 - DNA, 35 bp, Homo sapiens; identical to SEQ ID NO: 6555
  chr19:6590244-6590279
  hyper

SEQ ID NO: 39928 - DNA, 2 bp, Homo sapiens
  chr19:6590324-6590326
  hyper
ag

SEQ ID NO: 39929 - DNA, 204 bp, Homo sapiens
  chr19:6590881-6591085
  hyper
agcctgtgcgaagcgctggatgcacaccacgaggcagatcaccaagcccgcgaccaatgggaccaaagcagcccgcaggacgcacccatagggcctgcgccgcaccgagcagcccgaaccctcctccggcatcgccgcggcgatcacctccgctagcgcaggaggggcgatgggggcgcggagcgctgccgagaaggaaggaag

SEQ ID NO: 39930 - DNA, 44 bp, Homo sapiens; identical to SEQ ID NO: 6561
  chr19:6591087-6591131
  hyper

SEQ ID NO: 39931 - DNA, 31 bp, Homo sapiens; identical to SEQ ID NO: 6562
  chr19:6591154-6591185
  hyper

SEQ ID NO: 39932 - DNA, 34 bp, Homo sapiens; identical to SEQ ID NO: 6563
  chr19:6862816-6862850
  hyper

SEQ ID NO: 39933 - DNA, 2 bp, Homo sapiens
  chr19:6862980-6862982
  hyper
gc

SEQ ID NO: 39934 - DNA, 31 bp, Homo sapiens; identical to SEQ ID NO: 6565
  chr19:7098895-7098926
  hyper

SEQ ID NO: 39935 - DNA, 193 bp, Homo sapiens; identical to SEQ ID NO: 6567
  chr19:7293748-7293941
  hyper

SEQ ID NO: 39936 - DNA, 31 bp, Homo sapiens; identical to SEQ ID NO: 6568
  chr19:7294068-7294099
  hyper

SEQ ID NO: 39937 - DNA, 54 bp, Homo sapiens; identical to SEQ ID NO: 6569
  chr19:7294178-7294232
  hyper

SEQ ID NO: 39938 - DNA, 31 bp, Homo sapiens; identical to SEQ ID NO: 6570
  chr19:7294289-7294320
  hyper

SEQ ID NO: 39939 - DNA, 185 bp, Homo sapiens; identical to SEQ ID NO: 6571
  chr19:7294496-7294681
  hyper

SEQ ID NO: 39940 - DNA, 99 bp, Homo sapiens; identical to SEQ ID NO: 6572
  chr19:7294866-7294965
  hyper

SEQ ID NO: 39941 - DNA, 50 bp, Homo sapiens; identical to SEQ ID NO: 6573
  chr19:7294966-7295016
  hyper

SEQ ID NO: 39942 - DNA, 87 bp, Homo sapiens; identical to SEQ ID NO: 6574
  chr19:7295034-7295121
  hyper

SEQ ID NO: 39943 - DNA, 81 bp, Homo sapiens; identical to SEQ ID NO: 6575
  chr19:7459680-7459761
  hyper

SEQ ID NO: 39944 - DNA, 137 bp, Homo sapiens; identical to SEQ ID NO: 6576
  chr19:7459763-7459900
  hyper

SEQ ID NO: 39945 - DNA, 90 bp, Homo sapiens; identical to SEQ ID NO: 6577
  chr19:7460065-7460155
  hyper

SEQ ID NO: 39946 - DNA, 123 bp, Homo sapiens; identical to SEQ ID NO: 6578
  chr19:7460171-7460294
  hyper

SEQ ID NO: 39947 - DNA, 66 bp, Homo sapiens; identical to SEQ ID NO: 6579
  chr19:7460310-7460376
  hyper

SEQ ID NO: 39948 - DNA, 31 bp, Homo sapiens; identical to SEQ ID NO: 6580
  chr19:7460385-7460416
  hyper

SEQ ID NO: 39949 - DNA, 45 bp, Homo sapiens; identical to SEQ ID NO: 6581
  chr19:7460445-7460490
  hyper

SEQ ID NO: 39950 - DNA, 50 bp, Homo sapiens; identical to SEQ ID NO: 6582
  chr19:7460506-7460556
  hyper

SEQ ID NO: 39951 - DNA, 31 bp, Homo sapiens; identical to SEQ ID NO: 6583
  chr19:7553841-7553872
  hyper

SEQ ID NO: 39952 - DNA, 61 bp, Homo sapiens; identical to SEQ ID NO: 6584
  chr19:7580808-7580869
  hyper

SEQ ID NO: 39953 - DNA, 31 bp, Homo sapiens; identical to SEQ ID NO: 6585
  chr19:7588102-7588133
  hyper

SEQ ID NO: 39954 - DNA, 35 bp, Homo sapiens
  chr19:7615962-7615997
  hyper
cttgggtcacatcaaacgccggtacccgcaggtgc

SEQ ID NO: 39955 - DNA, 130 bp, Homo sapiens; identical to SEQ ID NO: 6587
  chr19:7660714-7660844
  hyper

SEQ ID NO: 39956 - DNA, 52 bp, Homo sapiens; identical to SEQ ID NO: 6588
  chr19:7660882-7660934
  hyper

SEQ ID NO: 39957 - DNA, 64 bp, Homo sapiens; identical to SEQ ID NO: 6589
  chr19:7661304-7661368
  hyper

SEQ ID NO: 39958 - DNA, 31 bp, Homo sapiens; identical to SEQ ID NO: 6590
  chr19:7762517-7762548
  hyper

SEQ ID NO: 39959 - DNA, 81 bp, Homo sapiens; identical to SEQ ID NO: 6591
  chr19:7990125-7990206
  hyper

SEQ ID NO: 39960 - DNA, 115 bp, Homo sapiens; identical to SEQ ID NO: 6592
  chr19:7990893-7991008
  hyper

SEQ ID NO: 39961 - DNA, 82 bp, Homo sapiens; identical to SEQ ID NO: 6593
  chr19:7991079-7991161
  hyper

SEQ ID NO: 39962 - DNA, 54 bp, Homo sapiens
  chr19:8067287-8067341
  hyper
actctccagagcctagcgggggcccaggacacagcagcggagcagggagagtcg

SEQ ID NO: 39963 - DNA, 31 bp, Homo sapiens; identical to SEQ ID NO: 6595
  chr19:8067371-8067402
  hyper

SEQ ID NO: 39964 - DNA, 31 bp, Homo sapiens; identical to SEQ ID NO: 6596
  chr19:8213983-8214014
  hyper

SEQ ID NO: 39965 - DNA, 190 bp, Homo sapiens; identical to SEQ ID NO: 6597
  chr19:8274531-8274721
  hyper

SEQ ID NO: 39966 - DNA, 31 bp, Homo sapiens; identical to SEQ ID NO: 6598
  chr19:8579004-8579035
  hyper

SEQ ID NO: 39967 - DNA, 74 bp, Homo sapiens; identical to SEQ ID NO: 6599
  chr19:8579158-8579232
  hyper

SEQ ID NO: 39968 - DNA, 31 bp, Homo sapiens; identical to SEQ ID NO: 6600
  chr19:9267730-9267761
  hyper

SEQ ID NO: 39969 - DNA, 31 bp, Homo sapiens; identical to SEQ ID NO: 6601
  chr19:9879693-9879724
  hyper

SEQ ID NO: 39970 - DNA, 31 bp, Homo sapiens; identical to SEQ ID NO: 6602
  chr19:9896567-9896598
  hyper

SEQ ID NO: 39971 - DNA, 31 bp, Homo sapiens; identical to SEQ ID NO: 6603
  chr19:10120919-10120950
  hyper

SEQ ID NO: 39972 - DNA, 62 bp, Homo sapiens; identical to SEQ ID NO: 6604
  chr19:10197476-10197538
  hyper

SEQ ID NO: 39973 - DNA, 49 bp, Homo sapiens; identical to SEQ ID NO: 6605
  chr19:10197545-10197594
  hyper

SEQ ID NO: 39974 - DNA, 44 bp, Homo sapiens; identical to SEQ ID NO: 6606
  chr19:10197599-10197643
  hyper

SEQ ID NO: 39975 - DNA, 24 bp, Homo sapiens
  chr19:10197649-10197673
  hyper
gtatcctccaagaaggcgggggct

SEQ ID NO: 39976 - DNA, 18 bp, Homo sapiens
  chr19:10197819-10197837
  hyper
ccccggaggtcccagcct

SEQ ID NO: 39977 - DNA, 72 bp, Homo sapiens; identical to SEQ ID NO: 6608
  chr19:10207019-10207091
  hyper

SEQ ID NO: 39978 - DNA, 38 bp, Homo sapiens; identical to SEQ ID NO: 6609
  chr19:10363216-10363254
  hyper

SEQ ID NO: 39979 - DNA, 39 bp, Homo sapiens; identical to SEQ ID NO: 6610
  chr19:10380737-10380776
  hyper

SEQ ID NO: 39980 - DNA, 76 bp, Homo sapiens; identical to SEQ ID NO: 6611
  chr19:10381114-10381190
  hyper

SEQ ID NO: 39981 - DNA, 40 bp, Homo sapiens
  chr19:10397587-10397627
  hyper
ctctccagggtggagtcgaggaggcggggctgcgggcctc

SEQ ID NO: 39982 - DNA, 31 bp, Homo sapiens; identical to SEQ ID NO: 6620
  chr19:10426144-10426175
  hyper

SEQ ID NO: 39983 - DNA, 50 bp, Homo sapiens; identical to SEQ ID NO: 6621
  chr19:10529657-10529707
  hyper

SEQ ID NO: 39984 - DNA, 45 bp, Homo sapiens; identical to SEQ ID NO: 6622
  chr19:10529915-10529960
  hyper

SEQ ID NO: 39985 - DNA, 31 bp, Homo sapiens; identical to SEQ ID NO: 6623
  chr19:10529970-10530001
  hyper

SEQ ID NO: 39986 - DNA, 68 bp, Homo sapiens; identical to SEQ ID NO: 6624
  chr19:10530026-10530094
  hyper

SEQ ID NO: 39987 - DNA, 17 bp, Homo sapiens
  chr19:10530117-10530134
  hyper
ggctcgcctgtttactc

SEQ ID NO: 39988 - DNA, 31 bp, Homo sapiens; identical to SEQ ID NO: 6626
  chr19:10691748-10691779
  hyper

SEQ ID NO: 39989 - DNA, 81 bp, Homo sapiens
  chr19:10691799-10691880
  hyper
tggctgcaatactggccgtgatcagcagatggtgagcgagcgcttatttcaaaacgggctgcgattctcttaagtccccac

SEQ ID NO: 39990 - DNA, 6 bp, Homo sapiens
  chr19:10692064-10692070
  hyper
tgacct

SEQ ID NO: 39991 - DNA, 31 bp, Homo sapiens; identical to SEQ ID NO: 6631
  chr19:10762250-10762281
  hyper

SEQ ID NO: 39992 - DNA, 54 bp, Homo sapiens; identical to SEQ ID NO: 6632
  chr19:10812676-10812730
  hyper

SEQ ID NO: 39993 - DNA, 67 bp, Homo sapiens; identical to SEQ ID NO: 6633
  chr19:10812780-10812847
  hyper

SEQ ID NO: 39994 - DNA, 201 bp, Homo sapiens; identical to SEQ ID NO: 6634
  chr19:11200921-11201122
  hyper

SEQ ID NO: 39995 - DNA, 89 bp, Homo sapiens; identical to SEQ ID NO: 6635
  chr19:11201126-11201215
  hyper

SEQ ID NO: 39996 - DNA, 31 bp, Homo sapiens; identical to SEQ ID NO: 6636
  chr19:11201271-11201302
  hyper

SEQ ID NO: 39997 - DNA, 31 bp, Homo sapiens; identical to SEQ ID NO: 6637
  chr19:11225129-11225160
  hyper

SEQ ID NO: 39998 - DNA, 70 bp, Homo sapiens; identical to SEQ ID NO: 6638
  chr19:11253287-11253357
  hyper

SEQ ID NO: 39999 - DNA, 172 bp, Homo sapiens; identical to SEQ ID NO: 6639
  chr19:11308101-11308273
  hyper

SEQ ID NO: 40000 - DNA, 43 bp, Homo sapiens; identical to SEQ ID NO: 6640
  chr19:11373071-11373114
  hyper

SEQ ID NO: 40001 - DNA, 31 bp, Homo sapiens; identical to SEQ ID NO: 6641
  chr19:11399747-11399778
  hyper

SEQ ID NO: 40002 - DNA, 175 bp, Homo sapiens; identical to SEQ ID NO: 6642
  chr19:11465992-11466167
  hyper

SEQ ID NO: 40003 - DNA, 31 bp, Homo sapiens; identical to SEQ ID NO: 6643
  chr19:11466333-11466364
  hyper

SEQ ID NO: 40004 - DNA, 31 bp, Homo sapiens; identical to SEQ ID NO: 6644
  chr19:11466379-11466410
  hyper

SEQ ID NO: 40005 - DNA, 2 bp, Homo sapiens
  chr19:12146543-12146545
  hyper
ag

SEQ ID NO: 40006 - DNA, 154 bp, Homo sapiens; identical to SEQ ID NO: 6646
  chr19:12806991-12807145
  hyper

SEQ ID NO: 40007 - DNA, 96 bp, Homo sapiens; identical to SEQ ID NO: 6647
  chr19:12807176-12807272
  hyper

SEQ ID NO: 40008 - DNA, 69 bp, Homo sapiens; identical to SEQ ID NO: 6648
  chr19:12885825-12885894
  hyper

SEQ ID NO: 40009 - DNA, 81 bp, Homo sapiens; identical to SEQ ID NO: 6649
  chr19:12885899-12885980
  hyper

SEQ ID NO: 40010 - DNA, 31 bp, Homo sapiens; identical to SEQ ID NO: 6650
  chr19:12897558-12897589
  hyper

SEQ ID NO: 40011 - DNA, 50 bp, Homo sapiens; identical to SEQ ID NO: 6651
  chr19:12899528-12899578
  hyper

SEQ ID NO: 40012 - DNA, 122 bp, Homo sapiens; identical to SEQ ID NO: 6652
  chr19:12912809-12912931
  hyper

SEQ ID NO: 40013 - DNA, 94 bp, Homo sapiens; identical to SEQ ID NO: 6653
  chr19:13094455-13094549
  hyper

SEQ ID NO: 40014 - DNA, 31 bp, Homo sapiens; identical to SEQ ID NO: 6654
  chr19:13094556-13094587
  hyper

SEQ ID NO: 40015 - DNA, 135 bp, Homo sapiens; identical to SEQ ID NO: 6655
  chr19:13106027-13106162
  hyper

SEQ ID NO: 40016 - DNA, 128 bp, Homo sapiens; identical to SEQ ID NO: 6656
  chr19:13106342-13106470
  hyper

SEQ ID NO: 40017 - DNA, 125 bp, Homo sapiens; identical to SEQ ID NO: 6657
  chr19:13106528-13106653
  hyper

SEQ ID NO: 40018 - DNA, 97 bp, Homo sapiens; identical to SEQ ID NO: 6658
  chr19:13106773-13106870
  hyper

SEQ ID NO: 40019 - DNA, 31 bp, Homo sapiens; identical to SEQ ID NO: 6659
  chr19:13107273-13107304
  hyper

SEQ ID NO: 40020 - DNA, 31 bp, Homo sapiens; identical to SEQ ID NO: 6660
  chr19:13207359-13207390
  hyper

SEQ ID NO: 40021 - DNA, 2 bp, Homo sapiens
  chr19:13208429-13208431
  hyper
ct

SEQ ID NO: 40022 - DNA, 82 bp, Homo sapiens; identical to SEQ ID NO: 6665
  chr19:13263792-13263874
  hyper

SEQ ID NO: 40023 - DNA, 69 bp, Homo sapiens; identical to SEQ ID NO: 6666
  chr19:13264168-13264237
  hyper

SEQ ID NO: 40024 - DNA, 31 bp, Homo sapiens; identical to SEQ ID NO: 6667
  chr19:13264554-13264585
  hyper

SEQ ID NO: 40025 - DNA, 136 bp, Homo sapiens; identical to SEQ ID NO: 6668
  chr19:13266907-13267043
  hyper

SEQ ID NO: 40026 - DNA, 63 bp, Homo sapiens; identical to SEQ ID NO: 6669
  chr19:13274018-13274081
  hyper

SEQ ID NO: 40027 - DNA, 63 bp, Homo sapiens; identical to SEQ ID NO: 6670
  chr19:13954424-13954487
  hyper

SEQ ID NO: 40028 - DNA, 74 bp, Homo sapiens; identical to SEQ ID NO: 6671
  chr19:13961396-13961470
  hyper

SEQ ID NO: 40029 - DNA, 31 bp, Homo sapiens; identical to SEQ ID NO: 6672
  chr19:13961694-13961725
  hyper

SEQ ID NO: 40030 - DNA, 55 bp, Homo sapiens; identical to SEQ ID NO: 6673
  chr19:13983739-13983794
  hyper

SEQ ID NO: 40031 - DNA, 31 bp, Homo sapiens; identical to SEQ ID NO: 6674
  chr19:14074199-14074230
  hyper

SEQ ID NO: 40032 - DNA, 31 bp, Homo sapiens; identical to SEQ ID NO: 6675
  chr19:14205671-14205702
  hyper

SEQ ID NO: 40033 - DNA, 49 bp, Homo sapiens; identical to SEQ ID NO: 6676
  chr19:14316560-14316609
  hyper

SEQ ID NO: 40034 - DNA, 58 bp, Homo sapiens; identical to SEQ ID NO: 6677
  chr19:14607123-14607181
  hyper

SEQ ID NO: 40035 - DNA, 57 bp, Homo sapiens; identical to SEQ ID NO: 6680
  chr19:15306338-15306395
  hyper

SEQ ID NO: 40036 - DNA, 31 bp, Homo sapiens; identical to SEQ ID NO: 6681
  chr19:15306560-15306591
  hyper

SEQ ID NO: 40037 - DNA, 95 bp, Homo sapiens; identical to SEQ ID NO: 6682
  chr19:15310945-15311040
  hyper

SEQ ID NO: 40038 - DNA, 31 bp, Homo sapiens; identical to SEQ ID NO: 6683
  chr19:15311095-15311126
  hyper

SEQ ID NO: 40039 - DNA, 81 bp, Homo sapiens; identical to SEQ ID NO: 6684
  chr19:15311152-15311233
  hyper

SEQ ID NO: 40040 - DNA, 74 bp, Homo sapiens
  chr19:16186890-16186964
  hyper
taaaagggacagaggacgagctggataaatattccgaggacctgaaggacgcgcaggagaagctggagctcacg

SEQ ID NO: 40041 - DNA, 52 bp, Homo sapiens
  chr19:16187000-16187052
  hyper
gggagcccgcggcggggccaggccggagccccggggccgggaaggcggggag

SEQ ID NO: 40042 - DNA, 31 bp, Homo sapiens; identical to SEQ ID NO: 6686
  chr19:16187105-16187136
  hyper

SEQ ID NO: 40043 - DNA, 31 bp, Homo sapiens; identical to SEQ ID NO: 6687
  chr19:16187138-16187169
  hyper

SEQ ID NO: 40044 - DNA, 343 bp, Homo sapiens; identical to SEQ ID NO: 6688
  chr19:16187276-16187619
  hyper

SEQ ID NO: 40045 - DNA, 240 bp, Homo sapiens; identical to SEQ ID NO: 6690
  chr19:16187798-16188038
  hyper

SEQ ID NO: 40046 - DNA, 94 bp, Homo sapiens; identical to SEQ ID NO: 6691
  chr19:16188179-16188273
  hyper

SEQ ID NO: 40047 - DNA, 37 bp, Homo sapiens; identical to SEQ ID NO: 6692
  chr19:16222616-16222653
  hyper

SEQ ID NO: 40048 - DNA, 99 bp, Homo sapiens; identical to SEQ ID NO: 6693
  chr19:17355756-17355855
  hyper

SEQ ID NO: 40049 - DNA, 31 bp, Homo sapiens; identical to SEQ ID NO: 6698
  chr19:17531153-17531184
  hyper

SEQ ID NO: 40050 - DNA, 31 bp, Homo sapiens; identical to SEQ ID NO: 6699
  chr19:17958427-17958458
  hyper

SEQ ID NO: 40051 - DNA, 2 bp, Homo sapiens
  chr19:17958474-17958476
  hyper
tc

SEQ ID NO: 40052 - DNA, 31 bp, Homo sapiens; identical to SEQ ID NO: 6702
  chr19:18059917-18059948
  hyper

SEQ ID NO: 40053 - DNA, 31 bp, Homo sapiens; identical to SEQ ID NO: 6704
  chr19:18119199-18119230
  hyper

SEQ ID NO: 40054 - DNA, 22 bp, Homo sapiens
  chr19:18271975-18271997
  hyper
ggcgcgccgggccctgcggggt

SEQ ID NO: 40055 - DNA, 92 bp, Homo sapiens; identical to SEQ ID NO: 6706
  chr19:18335422-18335514
  hyper

SEQ ID NO: 40056 - DNA, 71 bp, Homo sapiens; identical to SEQ ID NO: 6707
  chr19:18335607-18335678
  hyper

SEQ ID NO: 40057 - DNA, 22 bp, Homo sapiens
  chr19:18336349-18336371
  hyper
ttcggcgcggaccaagcgcagg

SEQ ID NO: 40058 - DNA, 31 bp, Homo sapiens; identical to SEQ ID NO: 6712
  chr19:18811453-18811484
  hyper

SEQ ID NO: 40059 - DNA, 1 bp, Homo sapiens
  chr19:19651126-19651127
  hyper
c

SEQ ID NO: 40060 - DNA, 31 bp, Homo sapiens; identical to SEQ ID NO: 6716
  chr19:21664417-21664448
  hyper

SEQ ID NO: 40061 - DNA, 31 bp, Homo sapiens; identical to SEQ ID NO: 6717
  chr19:30730220-30730251
  hyper

SEQ ID NO: 40062 - DNA, 39 bp, Homo sapiens; identical to SEQ ID NO: 6718
  chr19:33555230-33555269
  hyper

SEQ ID NO: 40063 - DNA, 69 bp, Homo sapiens; identical to SEQ ID NO: 6719
  chr19:33555490-33555559
  hyper

SEQ ID NO: 40064 - DNA, 35 bp, Homo sapiens; identical to SEQ ID NO: 6720
  chr19:33555747-33555782
  hyper

SEQ ID NO: 40065 - DNA, 86 bp, Homo sapiens; identical to SEQ ID NO: 6721
  chr19:33555883-33555969
  hyper

SEQ ID NO: 40066 - DNA, 75 bp, Homo sapiens
  chr19:33685236-33685311
  hyper
acagacccacggacgctctaccggcggcacccggccgggcgggctgggcgcagcgcggggcggcccggggacgcc

SEQ ID NO: 40067 - DNA, 65 bp, Homo sapiens; identical to SEQ ID NO: 6723
  chr19:33685330-33685395
  hyper

SEQ ID NO: 40068 - DNA, 18 bp, Homo sapiens
  chr19:33686020-33686038
  hyper
cttcgtgcaggcggcagc

SEQ ID NO: 40069 - DNA, 27 bp, Homo sapiens
  chr19:33792630-33792657
  hyper
cgtgggcggcggcgtggggtgaccggg

SEQ ID NO: 40070 - DNA, 461 bp, Homo sapiens; identical to SEQ ID NO: 6726
  chr19:33792664-33793125
  hyper

SEQ ID NO: 40071 - DNA, 44 bp, Homo sapiens; identical to SEQ ID NO: 6727
  chr19:33793282-33793326
  hyper

SEQ ID NO: 40072 - DNA, 298 bp, Homo sapiens; identical to SEQ ID NO: 6728
  chr19:33793356-33793654
  hyper

SEQ ID NO: 40073 - DNA, 38 bp, Homo sapiens; identical to SEQ ID NO: 6729
  chr19:33793669-33793707
  hyper

SEQ ID NO: 40074 - DNA, 132 bp, Homo sapiens; identical to SEQ ID NO: 6730
  chr19:33793732-33793864
  hyper

SEQ ID NO: 40075 - DNA, 8 bp, Homo sapiens
  chr19:33793869-33793877
  hyper
agaaccag

SEQ ID NO: 40076 - DNA, 41 bp, Homo sapiens
  chr19:33793960-33794001
  hyper
gagaggtcctgagcgcggtggctctgcgtctcctagctctg

SEQ ID NO: 40077 - DNA, 98 bp, Homo sapiens; identical to SEQ ID NO: 6732
  chr19:33794010-33794108
  hyper

SEQ ID NO: 40078 - DNA, 31 bp, Homo sapiens; identical to SEQ ID NO: 6733
  chr19:35490572-35490603
  hyper

SEQ ID NO: 40079 - DNA, 31 bp, Homo sapiens; identical to SEQ ID NO: 6734
  chr19:35490607-35490638
  hyper

SEQ ID NO: 40080 - DNA, 42 bp, Homo sapiens; identical to SEQ ID NO: 6735
  chr19:35738943-35738985
  hyper

SEQ ID NO: 40081 - DNA, 40 bp, Homo sapiens; identical to SEQ ID NO: 6736
  chr19:36123861-36123901
  hyper

SEQ ID NO: 40082 - DNA, 31 bp, Homo sapiens; identical to SEQ ID NO: 6737
  chr19:36123966-36123997
  hyper

SEQ ID NO: 40083 - DNA, 82 bp, Homo sapiens; identical to SEQ ID NO: 6738
  chr19:36427252-36427334
  hyper

SEQ ID NO: 40084 - DNA, 69 bp, Homo sapiens; identical to SEQ ID NO: 6739
  chr19:36427553-36427622
  hyper

SEQ ID NO: 40085 - DNA, 31 bp, Homo sapiens; identical to SEQ ID NO: 6740
  chr19:36544541-36544572
  hyper

SEQ ID NO: 40086 - DNA, 58 bp, Homo sapiens; identical to SEQ ID NO: 6744
  chr19:38398220-38398278
  hyper

SEQ ID NO: 40087 - DNA, 31 bp, Homo sapiens; identical to SEQ ID NO: 6745
  chr19:38417473-38417504
  hyper

SEQ ID NO: 40088 - DNA, 42 bp, Homo sapiens
  chr19:38853193-38853235
  hyper
tccggacgcagtcagaactcggtctgcgcgggaccagagtgg

SEQ ID NO: 40089 - DNA, 31 bp, Homo sapiens; identical to SEQ ID NO: 6747
  chr19:38943562-38943593
  hyper

SEQ ID NO: 40090 - DNA, 31 bp, Homo sapiens; identical to SEQ ID NO: 6748
  chr19:39139549-39139580
  hyper

SEQ ID NO: 40091 - DNA, 31 bp, Homo sapiens; identical to SEQ ID NO: 6749
  chr19:39139586-39139617
  hyper

SEQ ID NO: 40092 - DNA, 85 bp, Homo sapiens; identical to SEQ ID NO: 6750
  chr19:39139648-39139733
  hyper

SEQ ID NO: 40093 - DNA, 31 bp, Homo sapiens; identical to SEQ ID NO: 6751
  chr19:39139745-39139776
  hyper

SEQ ID NO: 40094 - DNA, 31 bp, Homo sapiens; identical to SEQ ID NO: 6752
  chr19:39140556-39140587
  hyper

SEQ ID NO: 40095 - DNA, 31 bp, Homo sapiens; identical to SEQ ID NO: 6753
  chr19:39140589-39140620
  hyper

SEQ ID NO: 40096 - DNA, 31 bp, Homo sapiens; identical to SEQ ID NO: 6754
  chr19:39379455-39379486
  hyper

SEQ ID NO: 40097 - DNA, 70 bp, Homo sapiens; identical to SEQ ID NO: 6755
  chr19:39818897-39818967
  hyper

SEQ ID NO: 40098 - DNA, 31 bp, Homo sapiens; identical to SEQ ID NO: 6756
  chr19:39818984-39819015
  hyper

SEQ ID NO: 40099 - DNA, 44 bp, Homo sapiens; identical to SEQ ID NO: 6757
  chr19:40939938-40939982
  hyper

SEQ ID NO: 40100 - DNA, 31 bp, Homo sapiens; identical to SEQ ID NO: 6758
  chr19:41103204-41103235
  hyper

SEQ ID NO: 40101 - DNA, 54 bp, Homo sapiens; identical to SEQ ID NO: 6759
  chr19:41119081-41119135
  hyper

SEQ ID NO: 40102 - DNA, 31 bp, Homo sapiens
  chr19:41119147-41119178
  hyper
ggttccagggcaaagccggctggaaaggtgg

SEQ ID NO: 40103 - DNA, 47 bp, Homo sapiens; identical to SEQ ID NO: 6763
  chr19:41120295-41120342
  hyper

SEQ ID NO: 40104 - DNA, 46 bp, Homo sapiens; identical to SEQ ID NO: 6764
  chr19:41223421-41223467
  hyper

SEQ ID NO: 40105 - DNA, 31 bp, Homo sapiens; identical to SEQ ID NO: 6765
  chr19:41223497-41223528
  hyper

SEQ ID NO: 40106 - DNA, 54 bp, Homo sapiens; identical to SEQ ID NO: 6766
  chr19:41732032-41732086
  hyper

SEQ ID NO: 40107 - DNA, 87 bp, Homo sapiens; identical to SEQ ID NO: 6767
  chr19:41732204-41732291
  hyper

SEQ ID NO: 40108 - DNA, 37 bp, Homo sapiens; identical to SEQ ID NO: 6768
  chr19:41831044-41831081
  hyper

SEQ ID NO: 40109 - DNA, 51 bp, Homo sapiens; identical to SEQ ID NO: 6769
  chr19:41832011-41832062
  hyper

SEQ ID NO: 40110 - DNA, 34 bp, Homo sapiens; identical to SEQ ID NO: 6770
  chr19:41882552-41882586
  hyper

SEQ ID NO: 40111 - DNA, 2 bp, Homo sapiens
  chr19:42028282-42028284
  hyper
at

SEQ ID NO: 40112 - DNA, 49 bp, Homo sapiens; identical to SEQ ID NO: 6774
  chr19:42257255-42257304
  hyper

SEQ ID NO: 40113 - DNA, 46 bp, Homo sapiens; identical to SEQ ID NO: 6775
  chr19:42636785-42636831
  hyper

SEQ ID NO: 40114 - DNA, 31 bp, Homo sapiens; identical to SEQ ID NO: 6779
  chr19:43866888-43866919
  hyper

SEQ ID NO: 40115 - DNA, 74 bp, Homo sapiens; identical to SEQ ID NO: 6780
  chr19:44143853-44143927
  hyper

SEQ ID NO: 40116 - DNA, 39 bp, Homo sapiens; identical to SEQ ID NO: 6781
  chr19:44144096-44144135
  hyper

SEQ ID NO: 40117 - DNA, 70 bp, Homo sapiens; identical to SEQ ID NO: 6782
  chr19:44144185-44144255
  hyper

SEQ ID NO: 40118 - DNA, 95 bp, Homo sapiens; identical to SEQ ID NO: 6783
  chr19:44144257-44144352
  hyper

SEQ ID NO: 40119 - DNA, 49 bp, Homo sapiens; identical to SEQ ID NO: 6784
  chr19:44144359-44144408
  hyper

SEQ ID NO: 40120 - DNA, 31 bp, Homo sapiens; identical to SEQ ID NO: 6785
  chr19:44506685-44506716
  hyper

SEQ ID NO: 40121 - DNA, 35 bp, Homo sapiens; identical to SEQ ID NO: 6786
  chr19:44506747-44506782
  hyper

SEQ ID NO: 40122 - DNA, 110 bp, Homo sapiens; identical to SEQ ID NO: 6787
  chr19:44506787-44506897
  hyper

SEQ ID NO: 40123 - DNA, 73 bp, Homo sapiens; identical to SEQ ID NO: 6788
  chr19:44507928-44508001
  hyper

SEQ ID NO: 40124 - DNA, 79 bp, Homo sapiens; identical to SEQ ID NO: 6789
  chr19:44617148-44617227
  hyper

SEQ ID NO: 40125 - DNA, 31 bp, Homo sapiens; identical to SEQ ID NO: 6790
  chr19:44617243-44617274
  hyper

SEQ ID NO: 40126 - DNA, 31 bp, Homo sapiens; identical to SEQ ID NO: 6791
  chr19:44617275-44617306
  hyper

SEQ ID NO: 40127 - DNA, 68 bp, Homo sapiens; identical to SEQ ID NO: 6792
  chr19:44617331-44617399
  hyper

SEQ ID NO: 40128 - DNA, 31 bp, Homo sapiens; identical to SEQ ID NO: 6793
  chr19:44645442-44645473
  hyper

SEQ ID NO: 40129 - DNA, 39 bp, Homo sapiens
  chr19:44645478-44645517
  hyper
cacattccctaccaagcgctcagcgatataggattcgtt

SEQ ID NO: 40130 - DNA, 52 bp, Homo sapiens; identical to SEQ ID NO: 6795
  chr19:44645834-44645886
  hyper

SEQ ID NO: 40131 - DNA, 31 bp, Homo sapiens; identical to SEQ ID NO: 6796
  chr19:44646151-44646182
  hyper

SEQ ID NO: 40132 - DNA, 209 bp, Homo sapiens; identical to SEQ ID NO: 6797
  chr19:44808915-44809124
  hyper

SEQ ID NO: 40133 - DNA, 31 bp, Homo sapiens; identical to SEQ ID NO: 6798
  chr19:44809130-44809161
  hyper

SEQ ID NO: 40134 - DNA, 301 bp, Homo sapiens; identical to SEQ ID NO: 6799
  chr19:45004315-45004616
  hyper

SEQ ID NO: 40135 - DNA, 60 bp, Homo sapiens; identical to SEQ ID NO: 6800
  chr19:45004619-45004679
  hyper

SEQ ID NO: 40136 - DNA, 110 bp, Homo sapiens; identical to SEQ ID NO: 6801
  chr19:45004771-45004881
  hyper

SEQ ID NO: 40137 - DNA, 31 bp, Homo sapiens; identical to SEQ ID NO: 6802
  chr19:45004885-45004916
  hyper

SEQ ID NO: 40138 - DNA, 53 bp, Homo sapiens; identical to SEQ ID NO: 6803
  chr19:45281277-45281330
  hyper

SEQ ID NO: 40139 - DNA, 54 bp, Homo sapiens; identical to SEQ ID NO: 6804
  chr19:45281358-45281412
  hyper

SEQ ID NO: 40140 - DNA, 31 bp, Homo sapiens; identical to SEQ ID NO: 6805
  chr19:45287821-45287852
  hyper

SEQ ID NO: 40141 - DNA, 31 bp, Homo sapiens; identical to SEQ ID NO: 6806
  chr19:45300245-45300276
  hyper

SEQ ID NO: 40142 - DNA, 47 bp, Homo sapiens; identical to SEQ ID NO: 6807
  chr19:45312125-45312172
  hyper

SEQ ID NO: 40143 - DNA, 31 bp, Homo sapiens; identical to SEQ ID NO: 6808
  chr19:45312174-45312205
  hyper

SEQ ID NO: 40144 - DNA, 35 bp, Homo sapiens; identical to SEQ ID NO: 6809
  chr19:45312232-45312267
  hyper

SEQ ID NO: 40145 - DNA, 31 bp, Homo sapiens; identical to SEQ ID NO: 6810
  chr19:45312293-45312324
  hyper

SEQ ID NO: 40146 - DNA, 53 bp, Homo sapiens; identical to SEQ ID NO: 6811
  chr19:45347905-45347958
  hyper

SEQ ID NO: 40147 - DNA, 41 bp, Homo sapiens; identical to SEQ ID NO: 6812
  chr19:45348022-45348063
  hyper

SEQ ID NO: 40148 - DNA, 56 bp, Homo sapiens; identical to SEQ ID NO: 6813
  chr19:45348185-45348241
  hyper

SEQ ID NO: 40149 - DNA, 31 bp, Homo sapiens; identical to SEQ ID NO: 6814
  chr19:45348243-45348274
  hyper

SEQ ID NO: 40150 - DNA, 31 bp, Homo sapiens; identical to SEQ ID NO: 6815
  chr19:45348807-45348838
  hyper

SEQ ID NO: 40151 - DNA, 117 bp, Homo sapiens; identical to SEQ ID NO: 6816
  chr19:45348954-45349071
  hyper

SEQ ID NO: 40152 - DNA, 495 bp, Homo sapiens; identical to SEQ ID NO: 6817
  chr19:45349504-45349999
  hyper

SEQ ID NO: 40153 - DNA, 56 bp, Homo sapiens; identical to SEQ ID NO: 6818
  chr19:45350001-45350057
  hyper

SEQ ID NO: 40154 - DNA, 42 bp, Homo sapiens; identical to SEQ ID NO: 6819
  chr19:45350286-45350328
  hyper

SEQ ID NO: 40155 - DNA, 62 bp, Homo sapiens; identical to SEQ ID NO: 6820
  chr19:45844195-45844257
  hyper

SEQ ID NO: 40156 - DNA, 47 bp, Homo sapiens; identical to SEQ ID NO: 6822
  chr19:45908809-45908856
  hyper

SEQ ID NO: 40157 - DNA, 31 bp, Homo sapiens; identical to SEQ ID NO: 6823
  chr19:45959072-45959103
  hyper

SEQ ID NO: 40158 - DNA, 59 bp, Homo sapiens; identical to SEQ ID NO: 6824
  chr19:45959173-45959232
  hyper

SEQ ID NO: 40159 - DNA, 102 bp, Homo sapiens; identical to SEQ ID NO: 6825
  chr19:45959233-45959335
  hyper

SEQ ID NO: 40160 - DNA, 70 bp, Homo sapiens; identical to SEQ ID NO: 6826
  chr19:46271266-46271336
  hyper

SEQ ID NO: 40161 - DNA, 108 bp, Homo sapiens; identical to SEQ ID NO: 6827
  chr19:46271507-46271615
  hyper

SEQ ID NO: 40162 - DNA, 34 bp, Homo sapiens; identical to SEQ ID NO: 6828
  chr19:46273812-46273846
  hyper

SEQ ID NO: 40163 - DNA, 56 bp, Homo sapiens; identical to SEQ ID NO: 6837
  chr19:47363285-47363341
  hyper

SEQ ID NO: 40164 - DNA, 31 bp, Homo sapiens; identical to SEQ ID NO: 6838
  chr19:47363344-47363375
  hyper

SEQ ID NO: 40165 - DNA, 31 bp, Homo sapiens; identical to SEQ ID NO: 6840
  chr19:47494585-47494616
  hyper

SEQ ID NO: 40166 - DNA, 31 bp, Homo sapiens; identical to SEQ ID NO: 6841
  chr19:47516068-47516099
  hyper

SEQ ID NO: 40167 - DNA, 31 bp, Homo sapiens; identical to SEQ ID NO: 6843
  chr19:47729938-47729969
  hyper

SEQ ID NO: 40168 - DNA, 31 bp, Homo sapiens; identical to SEQ ID NO: 6844
  chr19:47738880-47738911
  hyper

SEQ ID NO: 40169 - DNA, 31 bp, Homo sapiens; identical to SEQ ID NO: 6846
  chr19:48823670-48823701
  hyper

SEQ ID NO: 40170 - DNA, 31 bp, Homo sapiens; identical to SEQ ID NO: 6847
  chr19:48823705-48823736
  hyper

SEQ ID NO: 40171 - DNA, 50 bp, Homo sapiens; identical to SEQ ID NO: 6849
  chr19:48994397-48994447
  hyper

SEQ ID NO: 40172 - DNA, 53 bp, Homo sapiens; identical to SEQ ID NO: 6850
  chr19:48994528-48994581
  hyper

SEQ ID NO: 40173 - DNA, 31 bp, Homo sapiens; identical to SEQ ID NO: 6851
  chr19:48996514-48996545
  hyper

SEQ ID NO: 40174 - DNA, 31 bp, Homo sapiens; identical to SEQ ID NO: 6852
  chr19:48996832-48996863
  hyper

SEQ ID NO: 40175 - DNA, 103 bp, Homo sapiens
  chr19:48996913-48997016
  hyper
ccgcgaccccgaaaccgcgccctctcgggttccgcacctggtcgaagaggtagacggtcacgtccccgtggaaggagaccatcttgcgcttcctctccagctc

SEQ ID NO: 40176 - DNA, 31 bp, Homo sapiens; identical to SEQ ID NO: 6854
  chr19:49466992-49467023
  hyper

SEQ ID NO: 40177 - DNA, 167 bp, Homo sapiens; identical to SEQ ID NO: 6855
  chr19:49467144-49467311
  hyper

SEQ ID NO: 40178 - DNA, 56 bp, Homo sapiens; identical to SEQ ID NO: 6856
  chr19:49577261-49577317
  hyper

SEQ ID NO: 40179 - DNA, 31 bp, Homo sapiens; identical to SEQ ID NO: 6857
  chr19:49577377-49577408
  hyper

SEQ ID NO: 40180 - DNA, 35 bp, Homo sapiens; identical to SEQ ID NO: 6858
  chr19:49577420-49577455
  hyper

SEQ ID NO: 40181 - DNA, 334 bp, Homo sapiens; identical to SEQ ID NO: 6859
  chr19:49660927-49661261
  hyper

SEQ ID NO: 40182 - DNA, 93 bp, Homo sapiens; identical to SEQ ID NO: 6860
  chr19:49661281-49661374
  hyper

SEQ ID NO: 40183 - DNA, 47 bp, Homo sapiens; identical to SEQ ID NO: 6865
  chr19:50816111-50816158
  hyper

SEQ ID NO: 40184 - DNA, 58 bp, Homo sapiens; identical to SEQ ID NO: 6866
  chr19:50816212-50816270
  hyper

SEQ ID NO: 40185 - DNA, 95 bp, Homo sapiens; identical to SEQ ID NO: 6869
  chr19:50819425-50819520
  hyper

SEQ ID NO: 40186 - DNA, 62 bp, Homo sapiens; identical to SEQ ID NO: 6870
  chr19:50828913-50828975
  hyper

SEQ ID NO: 40187 - DNA, 31 bp, Homo sapiens; identical to SEQ ID NO: 6871
  chr19:50829065-50829096
  hyper

SEQ ID NO: 40188 - DNA, 29 bp, Homo sapiens
  chr19:50833970-50833999
  hyper
aatataggcaggaccgataaaaaatgggg

SEQ ID NO: 40189 - DNA, 98 bp, Homo sapiens; identical to SEQ ID NO: 6874
  chr19:50836544-50836642
  hyper

SEQ ID NO: 40190 - DNA, 31 bp, Homo sapiens; identical to SEQ ID NO: 6876
  chr19:52160024-52160055
  hyper

SEQ ID NO: 40191 - DNA, 2 bp, Homo sapiens
  chr19:52207084-52207086
  hyper
ct

SEQ ID NO: 40192 - DNA, 31 bp, Homo sapiens; identical to SEQ ID NO: 6881
  chr19:52531307-52531338
  hyper

SEQ ID NO: 40193 - DNA, 31 bp, Homo sapiens; identical to SEQ ID NO: 6883
  chr19:52643470-52643501
  hyper

SEQ ID NO: 40194 - DNA, 36 bp, Homo sapiens; identical to SEQ ID NO: 6884
  chr19:52674676-52674712
  hyper

SEQ ID NO: 40195 - DNA, 35 bp, Homo sapiens; identical to SEQ ID NO: 6885
  chr19:53360912-53360947
  hyper

SEQ ID NO: 40196 - DNA, 77 bp, Homo sapiens; identical to SEQ ID NO: 6886
  chr19:55728162-55728239
  hyper

SEQ ID NO: 40197 - DNA, 31 bp, Homo sapiens; identical to SEQ ID NO: 6887
  chr19:55728245-55728276
  hyper

SEQ ID NO: 40198 - DNA, 31 bp, Homo sapiens; identical to SEQ ID NO: 6888
  chr19:55728287-55728318
  hyper

SEQ ID NO: 40199 - DNA, 56 bp, Homo sapiens; identical to SEQ ID NO: 6889
  chr19:55728329-55728385
  hyper

SEQ ID NO: 40200 - DNA, 59 bp, Homo sapiens; identical to SEQ ID NO: 6890
  chr19:55728394-55728453
  hyper

SEQ ID NO: 40201 - DNA, 117 bp, Homo sapiens; identical to SEQ ID NO: 6891
  chr19:55728462-55728579
  hyper

SEQ ID NO: 40202 - DNA, 34 bp, Homo sapiens; identical to SEQ ID NO: 6894
  chr19:56015146-56015180
  hyper

SEQ ID NO: 40203 - DNA, 68 bp, Homo sapiens; identical to SEQ ID NO: 6895
  chr19:56098516-56098584
  hyper

SEQ ID NO: 40204 - DNA, 114 bp, Homo sapiens; identical to SEQ ID NO: 6896
  chr19:56151955-56152069
  hyper

SEQ ID NO: 40205 - DNA, 18 bp, Homo sapiens
  chr19:56159669-56159687
  hyper
cctcggaccccgggcacc

SEQ ID NO: 40206 - DNA, 31 bp, Homo sapiens; identical to SEQ ID NO: 6899
  chr19:56186172-56186203
  hyper

SEQ ID NO: 40207 - DNA, 31 bp, Homo sapiens; identical to SEQ ID NO: 6900
  chr19:56809209-56809240
  hyper

SEQ ID NO: 40208 - DNA, 2 bp, Homo sapiens
  chr19:58238325-58238327
  hyper
gc

SEQ ID NO: 40209 - DNA, 43 bp, Homo sapiens
  chr19:58239193-58239236
  hyper
ccgagtttcaaagggctgacaggacttccgtcctctttttttt

SEQ ID NO: 40210 - DNA, 40 bp, Homo sapiens; identical to SEQ ID NO: 6922
  chr19:58694379-58694419
  hyper

SEQ ID NO: 40211 - DNA, 50 bp, Homo sapiens; identical to SEQ ID NO: 6923
  chr19:58694424-58694474
  hyper

SEQ ID NO: 40212 - DNA, 68 bp, Homo sapiens
  chr19:58694485-58694553
  hyper
ctgccccaagagtggtcgccttcgtggcagggcacgactctctcccagctcgggtcgccgcccacatt

SEQ ID NO: 40213 - DNA, 89 bp, Homo sapiens; identical to SEQ ID NO: 6926
  chr19:58874183-58874272
  hyper

SEQ ID NO: 40214 - DNA, 31 bp, Homo sapiens; identical to SEQ ID NO: 6927
  chr19:58874318-58874349
  hyper

SEQ ID NO: 40215 - DNA, 72 bp, Homo sapiens; identical to SEQ ID NO: 6928
  chr19:58920315-58920387
  hyper

SEQ ID NO: 40216 - DNA, 31 bp, Homo sapiens; identical to SEQ ID NO: 6929
  chr19:59010522-59010553
  hyper

SEQ ID NO: 40217 - DNA, 57 bp, Homo sapiens; identical to SEQ ID NO: 6932
  chr20:657266-657323
  hyper

SEQ ID NO: 40218 - DNA, 60 bp, Homo sapiens; identical to SEQ ID NO: 6933
  chr20:1165915-1165975
  hyper

SEQ ID NO: 40219 - DNA, 2 bp, Homo sapiens
  chr20:1783320-1783322
  hyper
tt

SEQ ID NO: 40220 - DNA, 69 bp, Homo sapiens; identical to SEQ ID NO: 6943
  chr20:2444477-2444546
  hyper

SEQ ID NO: 40221 - DNA, 53 bp, Homo sapiens; identical to SEQ ID NO: 6944
  chr20:2444614-2444667
  hyper

SEQ ID NO: 40222 - DNA, 154 bp, Homo sapiens; identical to SEQ ID NO: 6945
  chr20:3154655-3154809
  hyper

SEQ ID NO: 40223 - DNA, 53 bp, Homo sapiens
  chr20:3154864-3154917
  hyper
ctccagcaggattgaacgctttcaccctgtgccccgcgcctggcgtaacgcgt

SEQ ID NO: 40224 - DNA, 35 bp, Homo sapiens; identical to SEQ ID NO: 6947
  chr20:3220070-3220105
  hyper

SEQ ID NO: 40225 - DNA, 291 bp, Homo sapiens; identical to SEQ ID NO: 6948
  chr20:3220114-3220405
  hyper

SEQ ID NO: 40226 - DNA, 58 bp, Homo sapiens; identical to SEQ ID NO: 6950
  chr20:3766678-3766736
  hyper

SEQ ID NO: 40227 - DNA, 47 bp, Homo sapiens; identical to SEQ ID NO: 6951
  chr20:4129264-4129311
  hyper

SEQ ID NO: 40228 - DNA, 203 bp, Homo sapiens; identical to SEQ ID NO: 6952
  chr20:4129403-4129606
  hyper

SEQ ID NO: 40229 - DNA, 99 bp, Homo sapiens; identical to SEQ ID NO: 6953
  chr20:4129702-4129801
  hyper

SEQ ID NO: 40230 - DNA, 92 bp, Homo sapiens; identical to SEQ ID NO: 6954
  chr20:4129817-4129909
  hyper

SEQ ID NO: 40231 - DNA, 96 bp, Homo sapiens; identical to SEQ ID NO: 6955
  chr20:4130006-4130102
  hyper

SEQ ID NO: 40232 - DNA, 31 bp, Homo sapiens; identical to SEQ ID NO: 6956
  chr20:4130125-4130156
  hyper

SEQ ID NO: 40233 - DNA, 82 bp, Homo sapiens
  chr20:4804008-4804090
  hyper
gttggaaagtgggggcgccgcggctggggggctgcttcagctgcgcctcggccagcgatcggcgggccgggctcaaatccag

SEQ ID NO: 40234 - DNA, 41 bp, Homo sapiens
  chr20:4981401-4981442
  hyper
acactcgaaatgtcattttttccccccgaaaggtggcaagg

SEQ ID NO: 40235 - DNA, 2 bp, Homo sapiens
  chr20:5891914-5891916
  hyper
tc

SEQ ID NO: 40236 - DNA, 14 bp, Homo sapiens
  chr20:9049238-9049252
  hyper
gccctgcgggctcg

SEQ ID NO: 40237 - DNA, 31 bp, Homo sapiens; identical to SEQ ID NO: 6964
  chr20:10015467-10015498
  hyper

SEQ ID NO: 40238 - DNA, 45 bp, Homo sapiens; identical to SEQ ID NO: 6965
  chr20:10015594-10015639
  hyper

SEQ ID NO: 40239 - DNA, 46 bp, Homo sapiens; identical to SEQ ID NO: 6966
  chr20:10015712-10015758
  hyper

SEQ ID NO: 40240 - DNA, 31 bp, Homo sapiens; identical to SEQ ID NO: 6967
  chr20:10653623-10653654
  hyper

SEQ ID NO: 40241 - DNA, 31 bp, Homo sapiens; identical to SEQ ID NO: 6968
  chr20:10653667-10653698
  hyper

SEQ ID NO: 40242 - DNA, 170 bp, Homo sapiens; identical to SEQ ID NO: 6969
  chr20:10653740-10653910
  hyper

SEQ ID NO: 40243 - DNA, 108 bp, Homo sapiens; identical to SEQ ID NO: 6970
  chr20:10653916-10654024
  hyper

SEQ ID NO: 40244 - DNA, 129 bp, Homo sapiens; identical to SEQ ID NO: 6971
  chr20:10654668-10654797
  hyper

SEQ ID NO: 40245 - DNA, 36 bp, Homo sapiens; identical to SEQ ID NO: 6972
  chr20:10654955-10654991
  hyper

SEQ ID NO: 40246 - DNA, 151 bp, Homo sapiens; identical to SEQ ID NO: 6973
  chr20:10655071-10655222
  hyper

SEQ ID NO: 40247 - DNA, 49 bp, Homo sapiens; identical to SEQ ID NO: 6974
  chr20:10655279-10655328
  hyper

SEQ ID NO: 40248 - DNA, 73 bp, Homo sapiens; identical to SEQ ID NO: 6975
  chr20:10655444-10655517
  hyper

SEQ ID NO: 40249 - DNA, 38 bp, Homo sapiens; identical to SEQ ID NO: 6976
  chr20:10655521-10655559
  hyper

SEQ ID NO: 40250 - DNA, 53 bp, Homo sapiens; identical to SEQ ID NO: 6977
  chr20:10655570-10655623
  hyper

SEQ ID NO: 40251 - DNA, 61 bp, Homo sapiens; identical to SEQ ID NO: 6978
  chr20:10655627-10655688
  hyper

SEQ ID NO: 40252 - DNA, 64 bp, Homo sapiens; identical to SEQ ID NO: 6979
  chr20:11871114-11871178
  hyper

SEQ ID NO: 40253 - DNA, 66 bp, Homo sapiens; identical to SEQ ID NO: 6980
  chr20:11871661-11871727
  hyper

SEQ ID NO: 40254 - DNA, 128 bp, Homo sapiens; identical to SEQ ID NO: 6981
  chr20:11871950-11872078
  hyper

SEQ ID NO: 40255 - DNA, 34 bp, Homo sapiens; identical to SEQ ID NO: 6982
  chr20:11872100-11872134
  hyper

SEQ ID NO: 40256 - DNA, 67 bp, Homo sapiens; identical to SEQ ID NO: 6983
  chr20:11872459-11872526
  hyper

SEQ ID NO: 40257 - DNA, 31 bp, Homo sapiens; identical to SEQ ID NO: 6984
  chr20:13976722-13976753
  hyper

SEQ ID NO: 40258 - DNA, 70 bp, Homo sapiens; identical to SEQ ID NO: 6986
  chr20:17549809-17549879
  hyper

SEQ ID NO: 40259 - DNA, 31 bp, Homo sapiens; identical to SEQ ID NO: 6987
  chr20:17549887-17549918
  hyper

SEQ ID NO: 40260 - DNA, 123 bp, Homo sapiens; identical to SEQ ID NO: 6988
  chr20:17549928-17550051
  hyper

SEQ ID NO: 40261 - DNA, 48 bp, Homo sapiens; identical to SEQ ID NO: 6989
  chr20:18037544-18037592
  hyper

SEQ ID NO: 40262 - DNA, 31 bp, Homo sapiens; identical to SEQ ID NO: 6990
  chr20:18037657-18037688
  hyper

SEQ ID NO: 40263 - DNA, 92 bp, Homo sapiens; identical to SEQ ID NO: 6991
  chr20:18038074-18038166
  hyper

SEQ ID NO: 40264 - DNA, 39 bp, Homo sapiens; identical to SEQ ID NO: 6992
  chr20:18038209-18038248
  hyper

SEQ ID NO: 40265 - DNA, 51 bp, Homo sapiens; identical to SEQ ID NO: 6993
  chr20:18038279-18038330
  hyper

SEQ ID NO: 40266 - DNA, 43 bp, Homo sapiens; identical to SEQ ID NO: 6994
  chr20:18039163-18039206
  hyper

SEQ ID NO: 40267 - DNA, 64 bp, Homo sapiens; identical to SEQ ID NO: 6995
  chr20:18039267-18039331
  hyper

SEQ ID NO: 40268 - DNA, 31 bp, Homo sapiens; identical to SEQ ID NO: 6997
  chr20:19997854-19997885
  hyper

SEQ ID NO: 40269 - DNA, 31 bp, Homo sapiens; identical to SEQ ID NO: 6998
  chr20:20692668-20692699
  hyper

SEQ ID NO: 40270 - DNA, 1 bp, Homo sapiens
  chr20:21080562-21080563
  hyper
c

SEQ ID NO: 40271 - DNA, 31 bp, Homo sapiens; identical to SEQ ID NO: 7006
  chr20:23618042-23618073
  hyper

SEQ ID NO: 40272 - DNA, 34 bp, Homo sapiens; identical to SEQ ID NO: 7007
  chr20:23618145-23618179
  hyper

SEQ ID NO: 40273 - DNA, 10 bp, Homo sapiens
  chr20:23618645-23618655
  hyper
caccccaccg

SEQ ID NO: 40274 - DNA, 31 bp, Homo sapiens; identical to SEQ ID NO: 7009
  chr20:23618696-23618727
  hyper

SEQ ID NO: 40275 - DNA, 84 bp, Homo sapiens; identical to SEQ ID NO: 7010
  chr20:25228117-25228201
  hyper

SEQ ID NO: 40276 - DNA, 31 bp, Homo sapiens; identical to SEQ ID NO: 7011
  chr20:30639045-30639076
  hyper

SEQ ID NO: 40277 - DNA, 2 bp, Homo sapiens
  chr20:30639104-30639106
  hyper
gc

SEQ ID NO: 40278 - DNA, 117 bp, Homo sapiens; identical to SEQ ID NO: 7018
  chr20:31072614-31072731
  hyper

SEQ ID NO: 40279 - DNA, 87 bp, Homo sapiens; identical to SEQ ID NO: 7019
  chr20:31173450-31173537
  hyper

SEQ ID NO: 40280 - DNA, 93 bp, Homo sapiens; identical to SEQ ID NO: 7020
  chr20:31351104-31351197
  hyper

SEQ ID NO: 40281 - DNA, 59 bp, Homo sapiens; identical to SEQ ID NO: 7021
  chr20:31351208-31351267
  hyper

SEQ ID NO: 40282 - DNA, 31 bp, Homo sapiens; identical to SEQ ID NO: 7022
  chr20:32090525-32090556
  hyper

SEQ ID NO: 40283 - DNA, 31 bp, Homo sapiens; identical to SEQ ID NO: 7023
  chr20:33464342-33464373
  hyper

SEQ ID NO: 40284 - DNA, 277 bp, Homo sapiens; identical to SEQ ID NO: 7024
  chr20:33464381-33464658
  hyper

SEQ ID NO: 40285 - DNA, 31 bp, Homo sapiens; identical to SEQ ID NO: 7025
  chr20:33464676-33464707
  hyper

SEQ ID NO: 40286 - DNA, 185 bp, Homo sapiens; identical to SEQ ID NO: 7026
  chr20:34680179-34680364
  hyper

SEQ ID NO: 40287 - DNA, 370 bp, Homo sapiens; identical to SEQ ID NO: 7027
  chr20:34680572-34680942
  hyper

SEQ ID NO: 40288 - DNA, 227 bp, Homo sapiens; identical to SEQ ID NO: 7028
  chr20:34680949-34681176
  hyper

SEQ ID NO: 40289 - DNA, 180 bp, Homo sapiens; identical to SEQ ID NO: 7029
  chr20:34681181-34681361
  hyper

SEQ ID NO: 40290 - DNA, 31 bp, Homo sapiens; identical to SEQ ID NO: 7030
  chr20:34681529-34681560
  hyper

SEQ ID NO: 40291 - DNA, 2 bp, Homo sapiens
  chr20:35201463-35201465
  hyper
ta

SEQ ID NO: 40292 - DNA, 36 bp, Homo sapiens
  chr20:35201548-35201584
  hyper
cagtttcccctcgaagcaacgggaccaatcgcaccg

SEQ ID NO: 40293 - DNA, 52 bp, Homo sapiens; identical to SEQ ID NO: 7033
  chr20:35201647-35201699
  hyper

SEQ ID NO: 40294 - DNA, 8 bp, Homo sapiens
  chr20:36013298-36013306
  hyper
ggccgttt

SEQ ID NO: 40295 - DNA, 66 bp, Homo sapiens; identical to SEQ ID NO: 7037
  chr20:37274777-37274843
  hyper

SEQ ID NO: 40296 - DNA, 57 bp, Homo sapiens; identical to SEQ ID NO: 7038
  chr20:37274850-37274907
  hyper

SEQ ID NO: 40297 - DNA, 2 bp, Homo sapiens
  chr20:40321458-40321460
  hyper
gc

SEQ ID NO: 40298 - DNA, 34 bp, Homo sapiens; identical to SEQ ID NO: 7051
  chr20:40321598-40321632
  hyper

SEQ ID NO: 40299 - DNA, 103 bp, Homo sapiens; identical to SEQ ID NO: 7053
  chr20:43976985-43977088
  hyper

SEQ ID NO: 40300 - DNA, 40 bp, Homo sapiens; identical to SEQ ID NO: 7054
  chr20:43977172-43977212
  hyper

SEQ ID NO: 40301 - DNA, 74 bp, Homo sapiens; identical to SEQ ID NO: 7055
  chr20:44462766-44462840
  hyper

SEQ ID NO: 40302 - DNA, 31 bp, Homo sapiens; identical to SEQ ID NO: 7056
  chr20:44591913-44591944
  hyper

SEQ ID NO: 40303 - DNA, 12 bp, Homo sapiens
  chr20:44746473-44746485
  hyper
ccagctgtggcc

SEQ ID NO: 40304 - DNA, 31 bp, Homo sapiens; identical to SEQ ID NO: 7060
  chr20:47663142-47663173
  hyper

SEQ ID NO: 40305 - DNA, 31 bp, Homo sapiens; identical to SEQ ID NO: 7061
  chr20:48195046-48195077
  hyper

SEQ ID NO: 40306 - DNA, 42 bp, Homo sapiens; identical to SEQ ID NO: 7062
  chr20:48771161-48771203
  hyper

SEQ ID NO: 40307 - DNA, 43 bp, Homo sapiens; identical to SEQ ID NO: 7063
  chr20:48771236-48771279
  hyper

SEQ ID NO: 40308 - DNA, 31 bp, Homo sapiens; identical to SEQ ID NO: 7064
  chr20:48771291-48771322
  hyper

SEQ ID NO: 40309 - DNA, 31 bp, Homo sapiens; identical to SEQ ID NO: 7065
  chr20:49131961-49131992
  hyper

SEQ ID NO: 40310 - DNA, 31 bp, Homo sapiens; identical to SEQ ID NO: 7066
  chr20:49141977-49142008
  hyper

SEQ ID NO: 40311 - DNA, 47 bp, Homo sapiens; identical to SEQ ID NO: 7067
  chr20:49226026-49226073
  hyper

SEQ ID NO: 40312 - DNA, 61 bp, Homo sapiens; identical to SEQ ID NO: 7068
  chr20:49226085-49226146
  hyper

SEQ ID NO: 40313 - DNA, 89 bp, Homo sapiens; identical to SEQ ID NO: 7069
  chr20:49226147-49226236
  hyper

SEQ ID NO: 40314 - DNA, 35 bp, Homo sapiens; identical to SEQ ID NO: 7070
  chr20:49410908-49410943
  hyper

SEQ ID NO: 40315 - DNA, 96 bp, Homo sapiens
  chr20:49410945-49411041
  hyper
tttagtaggatgggaacgggtggggggcgggcggctttgggcttcctctaagctagcgcctctctaacccggacgcccgttagaatcacccgggga

SEQ ID NO: 40316 - DNA, 31 bp, Homo sapiens; identical to SEQ ID NO: 7072
  chr20:49574742-49574773
  hyper

SEQ ID NO: 40317 - DNA, 31 bp, Homo sapiens; identical to SEQ ID NO: 7075
  chr20:50158040-50158071
  hyper

SEQ ID NO: 40318 - DNA, 297 bp, Homo sapiens; identical to SEQ ID NO: 7076
  chr20:50383734-50384031
  hyper

SEQ ID NO: 40319 - DNA, 63 bp, Homo sapiens; identical to SEQ ID NO: 7077
  chr20:50384088-50384151
  hyper

SEQ ID NO: 40320 - DNA, 47 bp, Homo sapiens; identical to SEQ ID NO: 7078
  chr20:50384157-50384204
  hyper

SEQ ID NO: 40321 - DNA, 31 bp, Homo sapiens; identical to SEQ ID NO: 7079
  chr20:50384214-50384245
  hyper

SEQ ID NO: 40322 - DNA, 56 bp, Homo sapiens; identical to SEQ ID NO: 7081
  chr20:50384402-50384458
  hyper

SEQ ID NO: 40323 - DNA, 91 bp, Homo sapiens; identical to SEQ ID NO: 7082
  chr20:50384468-50384559
  hyper

SEQ ID NO: 40324 - DNA, 105 bp, Homo sapiens; identical to SEQ ID NO: 7085
  chr20:50384933-50385038
  hyper

SEQ ID NO: 40325 - DNA, 44 bp, Homo sapiens
  chr20:50385230-50385274
  hyper
gcccccggcccgcgcccgcgccccccacgcgcgcccacccggcc

SEQ ID NO: 40326 - DNA, 168 bp, Homo sapiens; identical to SEQ ID NO: 7089
  chr20:54934125-54934293
  hyper

SEQ ID NO: 40327 - DNA, 35 bp, Homo sapiens; identical to SEQ ID NO: 7090
  chr20:54934305-54934340
  hyper

SEQ ID NO: 40328 - DNA, 81 bp, Homo sapiens; identical to SEQ ID NO: 7091
  chr20:54934438-54934519
  hyper

SEQ ID NO: 40329 - DNA, 9 bp, Homo sapiens
  chr20:55965047-55965056
  hyper
tcccatccc

SEQ ID NO: 40330 - DNA, 198 bp, Homo sapiens; identical to SEQ ID NO: 7094
  chr20:56284007-56284205
  hyper

SEQ ID NO: 40331 - DNA, 96 bp, Homo sapiens; identical to SEQ ID NO: 7095
  chr20:56284209-56284305
  hyper

SEQ ID NO: 40332 - DNA, 107 bp, Homo sapiens; identical to SEQ ID NO: 7096
  chr20:56284422-56284529
  hyper

SEQ ID NO: 40333 - DNA, 80 bp, Homo sapiens; identical to SEQ ID NO: 7097
  chr20:56284539-56284619
  hyper

SEQ ID NO: 40334 - DNA, 138 bp, Homo sapiens; identical to SEQ ID NO: 7098
  chr20:56284747-56284885
  hyper

SEQ ID NO: 40335 - DNA, 122 bp, Homo sapiens; identical to SEQ ID NO: 7099
  chr20:56285252-56285374
  hyper

SEQ ID NO: 40336 - DNA, 121 bp, Homo sapiens; identical to SEQ ID NO: 7100
  chr20:56285513-56285634
  hyper

SEQ ID NO: 40337 - DNA, 76 bp, Homo sapiens; identical to SEQ ID NO: 7101
  chr20:56285666-56285742
  hyper

SEQ ID NO: 40338 - DNA, 50 bp, Homo sapiens; identical to SEQ ID NO: 7102
  chr20:56285748-56285798
  hyper

SEQ ID NO: 40339 - DNA, 31 bp, Homo sapiens; identical to SEQ ID NO: 7103
  chr20:56784986-56785017
  hyper

SEQ ID NO: 40340 - DNA, 47 bp, Homo sapiens; identical to SEQ ID NO: 7104
  chr20:56785103-56785150
  hyper

SEQ ID NO: 40341 - DNA, 43 bp, Homo sapiens; identical to SEQ ID NO: 7105
  chr20:56785202-56785245
  hyper

SEQ ID NO: 40342 - DNA, 127 bp, Homo sapiens
  chr20:57225466-57225593
  hyper
cctgcacgaaccccgccgacctggcccggggcggcaagtcgaggtgcttagggcgccctgggcccggccaaccgtggaaaacccggcccggggcacgggggggcgcgggggtcgcagggccagggcc

SEQ ID NO: 40343 - DNA, 136 bp, Homo sapiens; identical to SEQ ID NO: 7110
  chr20:58090759-58090895
  hyper

SEQ ID NO: 40344 - DNA, 129 bp, Homo sapiens
  chr20:58514400-58514529
  hyper
acacgcgcaccgtaccgctgatgccaaggtccgagcaagtgacacgctccaggcacacgagctgccgctgcaggcgctcgccaaagtcggcggcctcgacgggcggcgggaaatcgggcaccaggcaat

SEQ ID NO: 40345 - DNA, 7 bp, Homo sapiens
  chr20:60552337-60552344
  hyper
acaactc

SEQ ID NO: 40346 - DNA, 37 bp, Homo sapiens; identical to SEQ ID NO: 7115
  chr20:60639842-60639879
  hyper

SEQ ID NO: 40347 - DNA, 84 bp, Homo sapiens; identical to SEQ ID NO: 7116
  chr20:60941670-60941754
  hyper

SEQ ID NO: 40348 - DNA, 40 bp, Homo sapiens; identical to SEQ ID NO: 7117
  chr20:60941797-60941837
  hyper

SEQ ID NO: 40349 - DNA, 31 bp, Homo sapiens; identical to SEQ ID NO: 7118
  chr20:60941840-60941871
  hyper

SEQ ID NO: 40350 - DNA, 31 bp, Homo sapiens; identical to SEQ ID NO: 7119
  chr20:60941883-60941914
  hyper

SEQ ID NO: 40351 - DNA, 64 bp, Homo sapiens; identical to SEQ ID NO: 7120
  chr20:61492376-61492440
  hyper

SEQ ID NO: 40352 - DNA, 31 bp, Homo sapiens; identical to SEQ ID NO: 7121
  chr20:61492473-61492504
  hyper

SEQ ID NO: 40353 - DNA, 74 bp, Homo sapiens; identical to SEQ ID NO: 7122
  chr20:61492714-61492788
  hyper

SEQ ID NO: 40354 - DNA, 114 bp, Homo sapiens; identical to SEQ ID NO: 7123
  chr20:61492901-61493015
  hyper

SEQ ID NO: 40355 - DNA, 64 bp, Homo sapiens; identical to SEQ ID NO: 7124
  chr20:61511890-61511954
  hyper

SEQ ID NO: 40356 - DNA, 43 bp, Homo sapiens; identical to SEQ ID NO: 7127
  chr20:62152086-62152129
  hyper

SEQ ID NO: 40357 - DNA, 71 bp, Homo sapiens; identical to SEQ ID NO: 7128
  chr20:62273399-62273470
  hyper

SEQ ID NO: 40358 - DNA, 31 bp, Homo sapiens; identical to SEQ ID NO: 7129
  chr20:62273486-62273517
  hyper

SEQ ID NO: 40359 - DNA, 68 bp, Homo sapiens; identical to SEQ ID NO: 7130
  chr20:62273725-62273793
  hyper

SEQ ID NO: 40360 - DNA, 40 bp, Homo sapiens; identical to SEQ ID NO: 7131
  chr20:62371935-62371975
  hyper

SEQ ID NO: 40361 - DNA, 31 bp, Homo sapiens; identical to SEQ ID NO: 7132
  chr20:62372059-62372090
  hyper

SEQ ID NO: 40362 - DNA, 21 bp, Homo sapiens
  chr20:62674084-62674105
  hyper
ttttctcgcgctggcgggcgg

SEQ ID NO: 40363 - DNA, 31 bp, Homo sapiens; identical to SEQ ID NO: 7144
  chr21:16436647-16436678
  hyper

SEQ ID NO: 40364 - DNA, 67 bp, Homo sapiens; identical to SEQ ID NO: 7145
  chr21:17101956-17102023
  hyper

SEQ ID NO: 40365 - DNA, 41 bp, Homo sapiens; identical to SEQ ID NO: 7146
  chr21:17102033-17102074
  hyper

SEQ ID NO: 40366 - DNA, 84 bp, Homo sapiens; identical to SEQ ID NO: 7147
  chr21:17102747-17102831
  hyper

SEQ ID NO: 40367 - DNA, 53 bp, Homo sapiens; identical to SEQ ID NO: 7148
  chr21:18885141-18885194
  hyper

SEQ ID NO: 40368 - DNA, 34 bp, Homo sapiens; identical to SEQ ID NO: 7149
  chr21:18885232-18885266
  hyper

SEQ ID NO: 40369 - DNA, 48 bp, Homo sapiens; identical to SEQ ID NO: 7150
  chr21:18885392-18885440
  hyper

SEQ ID NO: 40370 - DNA, 43 bp, Homo sapiens; identical to SEQ ID NO: 7151
  chr21:18885451-18885494
  hyper

SEQ ID NO: 40371 - DNA, 31 bp, Homo sapiens; identical to SEQ ID NO: 7152
  chr21:18885607-18885638
  hyper

SEQ ID NO: 40372 - DNA, 278 bp, Homo sapiens; identical to SEQ ID NO: 7153
  chr21:18885657-18885935
  hyper

SEQ ID NO: 40373 - DNA, 31 bp, Homo sapiens; identical to SEQ ID NO: 7154
  chr21:18985139-18985170
  hyper

SEQ ID NO: 40374 - DNA, 2 bp, Homo sapiens
  chr21:27011419-27011421
  hyper
ga

SEQ ID NO: 40375 - DNA, 50 bp, Homo sapiens
  chr21:27011487-27011537
  hyper
ccatctcctcagagcgccaccccctcagcttcgcccgttgggcagaattt

SEQ ID NO: 40376 - DNA, 31 bp, Homo sapiens; identical to SEQ ID NO: 7156
  chr21:27011573-27011604
  hyper

SEQ ID NO: 40377 - DNA, 2 bp, Homo sapiens
  chr21:27011608-27011610
  hyper
gg

SEQ ID NO: 40378 - DNA, 30 bp, Homo sapiens
  chr21:27011639-27011669
  hyper
atacatccccgtccccgagacacccaatcc

SEQ ID NO: 40379 - DNA, 101 bp, Homo sapiens
  chr21:27011672-27011773
  hyper
cacccccagcctgcccgcgcctcccgcccccagctcctcgccctggggacagctggcagccccgcgcggaccagacacaaagccgatcaatcccggaggcg

SEQ ID NO: 40380 - DNA, 31 bp, Homo sapiens; identical to SEQ ID NO: 7165
  chr21:27541597-27541628
  hyper

SEQ ID NO: 40381 - DNA, 218 bp, Homo sapiens; identical to SEQ ID NO: 7166
  chr21:27541877-27542095
  hyper

SEQ ID NO: 40382 - DNA, 31 bp, Homo sapiens; identical to SEQ ID NO: 7167
  chr21:27542233-27542264
  hyper

SEQ ID NO: 40383 - DNA, 31 bp, Homo sapiens; identical to SEQ ID NO: 7168
  chr21:27542290-27542321
  hyper

SEQ ID NO: 40384 - DNA, 84 bp, Homo sapiens; identical to SEQ ID NO: 7169
  chr21:27542344-27542428
  hyper

SEQ ID NO: 40385 - DNA, 85 bp, Homo sapiens; identical to SEQ ID NO: 7170
  chr21:27542444-27542529
  hyper

SEQ ID NO: 40386 - DNA, 70 bp, Homo sapiens; identical to SEQ ID NO: 7171
  chr21:27542536-27542606
  hyper

SEQ ID NO: 40387 - DNA, 86 bp, Homo sapiens; identical to SEQ ID NO: 7172
  chr21:27542715-27542801
  hyper

SEQ ID NO: 40388 - DNA, 86 bp, Homo sapiens; identical to SEQ ID NO: 7173
  chr21:27542816-27542902
  hyper

SEQ ID NO: 40389 - DNA, 275 bp, Homo sapiens; identical to SEQ ID NO: 7174
  chr21:27542942-27543217
  hyper

SEQ ID NO: 40390 - DNA, 31 bp, Homo sapiens; identical to SEQ ID NO: 7175
  chr21:27543334-27543365
  hyper

SEQ ID NO: 40391 - DNA, 67 bp, Homo sapiens
  chr21:27543367-27543434
  hyper
aaggtgagtcctaggacgctgaggctctagaaaagtcgagagcgctcctgctcgtccccgtgagctt

SEQ ID NO: 40392 - DNA, 51 bp, Homo sapiens
  chr21:27543508-27543559
  hyper
ttcgttttttctctcggtttggagaggtggggcaggcgtttctggaagaga

SEQ ID NO: 40393 - DNA, 276 bp, Homo sapiens; identical to SEQ ID NO: 7178
  chr21:33784350-33784626
  hyper

SEQ ID NO: 40394 - DNA, 86 bp, Homo sapiens; identical to SEQ ID NO: 7179
  chr21:33784754-33784840
  hyper

SEQ ID NO: 40395 - DNA, 5 bp, Homo sapiens
  chr21:33784965-33784970
  hyper
ctccg

SEQ ID NO: 40396 - DNA, 159 bp, Homo sapiens; identical to SEQ ID NO: 7181
  chr21:33785027-33785186
  hyper

SEQ ID NO: 40397 - DNA, 57 bp, Homo sapiens; identical to SEQ ID NO: 7182
  chr21:33785201-33785258
  hyper

SEQ ID NO: 40398 - DNA, 52 bp, Homo sapiens; identical to SEQ ID NO: 7183
  chr21:34100891-34100943
  hyper

SEQ ID NO: 40399 - DNA, 31 bp, Homo sapiens; identical to SEQ ID NO: 7185
  chr21:34776440-34776471
  hyper

SEQ ID NO: 40400 - DNA, 58 bp, Homo sapiens; identical to SEQ ID NO: 7186
  chr21:35013431-35013489
  hyper

SEQ ID NO: 40401 - DNA, 111 bp, Homo sapiens; identical to SEQ ID NO: 7187
  chr21:35986868-35986979
  hyper

SEQ ID NO: 40402 - DNA, 31 bp, Homo sapiens; identical to SEQ ID NO: 7188
  chr21:36260354-36260385
  hyper

SEQ ID NO: 40403 - DNA, 90 bp, Homo sapiens; identical to SEQ ID NO: 7189
  chr21:36260434-36260524
  hyper

SEQ ID NO: 40404 - DNA, 73 bp, Homo sapiens; identical to SEQ ID NO: 7190
  chr21:37528251-37528324
  hyper

SEQ ID NO: 40405 - DNA, 236 bp, Homo sapiens; identical to SEQ ID NO: 7191
  chr21:37528389-37528625
  hyper

SEQ ID NO: 40406 - DNA, 69 bp, Homo sapiens; identical to SEQ ID NO: 7192
  chr21:37757665-37757734
  hyper

SEQ ID NO: 40407 - DNA, 157 bp, Homo sapiens; identical to SEQ ID NO: 7193
  chr21:37757750-37757907
  hyper

SEQ ID NO: 40408 - DNA, 31 bp, Homo sapiens; identical to SEQ ID NO: 7194
  chr21:38071355-38071386
  hyper

SEQ ID NO: 40409 - DNA, 31 bp, Homo sapiens; identical to SEQ ID NO: 7195
  chr21:38071408-38071439
  hyper

SEQ ID NO: 40410 - DNA, 67 bp, Homo sapiens; identical to SEQ ID NO: 7196
  chr21:38362191-38362258
  hyper

SEQ ID NO: 40411 - DNA, 31 bp, Homo sapiens; identical to SEQ ID NO: 7199
  chr21:38608355-38608386
  hyper

SEQ ID NO: 40412 - DNA, 69 bp, Homo sapiens; identical to SEQ ID NO: 7200
  chr21:38608494-38608563
  hyper

SEQ ID NO: 40413 - DNA, 163 bp, Homo sapiens; identical to SEQ ID NO: 7201
  chr21:40177484-40177647
  hyper

SEQ ID NO: 40414 - DNA, 31 bp, Homo sapiens; identical to SEQ ID NO: 7202
  chr21:40177761-40177792
  hyper

SEQ ID NO: 40415 - DNA, 88 bp, Homo sapiens; identical to SEQ ID NO: 7203
  chr21:40177801-40177889
  hyper

SEQ ID NO: 40416 - DNA, 66 bp, Homo sapiens; identical to SEQ ID NO: 7204
  chr21:40178016-40178082
  hyper

SEQ ID NO: 40417 - DNA, 270 bp, Homo sapiens; identical to SEQ ID NO: 7205
  chr21:40178123-40178393
  hyper

SEQ ID NO: 40418 - DNA, 149 bp, Homo sapiens; identical to SEQ ID NO: 7206
  chr21:40178399-40178548
  hyper

SEQ ID NO: 40419 - DNA, 31 bp, Homo sapiens; identical to SEQ ID NO: 7207
  chr21:40275729-40275760
  hyper

SEQ ID NO: 40420 - DNA, 31 bp, Homo sapiens; identical to SEQ ID NO: 7208
  chr21:40941232-40941263
  hyper

SEQ ID NO: 40421 - DNA, 31 bp, Homo sapiens; identical to SEQ ID NO: 7209
  chr21:40941272-40941303
  hyper

SEQ ID NO: 40422 - DNA, 61 bp, Homo sapiens; identical to SEQ ID NO: 7210
  chr21:42539439-42539500
  hyper

SEQ ID NO: 40423 - DNA, 66 bp, Homo sapiens; identical to SEQ ID NO: 7211
  chr21:42539637-42539703
  hyper

SEQ ID NO: 40424 - DNA, 36 bp, Homo sapiens; identical to SEQ ID NO: 7212
  chr21:42539862-42539898
  hyper

SEQ ID NO: 40425 - DNA, 153 bp, Homo sapiens; identical to SEQ ID NO: 7213
  chr21:42540273-42540426
  hyper

SEQ ID NO: 40426 - DNA, 113 bp, Homo sapiens; identical to SEQ ID NO: 7214
  chr21:42540442-42540555
  hyper

SEQ ID NO: 40427 - DNA, 57 bp, Homo sapiens; identical to SEQ ID NO: 7215
  chr21:42540683-42540740
  hyper

SEQ ID NO: 40428 - DNA, 80 bp, Homo sapiens; identical to SEQ ID NO: 7216
  chr21:42540805-42540885
  hyper

SEQ ID NO: 40429 - DNA, 122 bp, Homo sapiens
  chr21:42879240-42879362
  hyper
ccggcacggagcgcaagcggaggagccagaccggctcctcccgggcgggttcctgccggtgccgggtgtccaggaggccccggccctgatcgccgccagcgggtcgccgcaacggggcctga

SEQ ID NO: 40430 - DNA, 37 bp, Homo sapiens; identical to SEQ ID NO: 7218
  chr21:42879978-42880015
  hyper

SEQ ID NO: 40431 - DNA, 94 bp, Homo sapiens; identical to SEQ ID NO: 7219
  chr21:42880128-42880222
  hyper

SEQ ID NO: 40432 - DNA, 88 bp, Homo sapiens; identical to SEQ ID NO: 7220
  chr21:43067057-43067145
  hyper

SEQ ID NO: 40433 - DNA, 106 bp, Homo sapiens; identical to SEQ ID NO: 7222
  chr21:43187116-43187222
  hyper

SEQ ID NO: 40434 - DNA, 136 bp, Homo sapiens; identical to SEQ ID NO: 7223
  chr21:43187233-43187369
  hyper

SEQ ID NO: 40435 - DNA, 31 bp, Homo sapiens; identical to SEQ ID NO: 7224
  chr21:43373717-43373748
  hyper

SEQ ID NO: 40436 - DNA, 76 bp, Homo sapiens; identical to SEQ ID NO: 7225
  chr21:43374032-43374108
  hyper

SEQ ID NO: 40437 - DNA, 34 bp, Homo sapiens; identical to SEQ ID NO: 7226
  chr21:43374331-43374365
  hyper

SEQ ID NO: 40438 - DNA, 31 bp, Homo sapiens; identical to SEQ ID NO: 7227
  chr21:44013673-44013704
  hyper

SEQ ID NO: 40439 - DNA, 59 bp, Homo sapiens
  chr21:44847864-44847923
  hyper
cgggggcgcgggaccacttgcttgcccgtggccgatgcctcatccgaacggaaaacgtt

SEQ ID NO: 40440 - DNA, 97 bp, Homo sapiens; identical to SEQ ID NO: 7234
  chr21:45286200-45286297
  hyper

SEQ ID NO: 40441 - DNA, 41 bp, Homo sapiens; identical to SEQ ID NO: 7235
  chr21:45286319-45286360
  hyper

SEQ ID NO: 40442 - DNA, 39 bp, Homo sapiens; identical to SEQ ID NO: 7236
  chr21:45381602-45381641
  hyper

SEQ ID NO: 40443 - DNA, 52 bp, Homo sapiens; identical to SEQ ID NO: 7237
  chr21:45526962-45527014
  hyper

SEQ ID NO: 40444 - DNA, 38 bp, Homo sapiens; identical to SEQ ID NO: 7238
  chr21:45660234-45660272
  hyper

SEQ ID NO: 40445 - DNA, 49 bp, Homo sapiens; identical to SEQ ID NO: 7239
  chr21:45660350-45660399
  hyper

SEQ ID NO: 40446 - DNA, 55 bp, Homo sapiens; identical to SEQ ID NO: 7240
  chr21:45875787-45875842
  hyper

SEQ ID NO: 40447 - DNA, 31 bp, Homo sapiens; identical to SEQ ID NO: 7241
  chr21:45876001-45876032
  hyper

SEQ ID NO: 40448 - DNA, 31 bp, Homo sapiens; identical to SEQ ID NO: 7242
  chr21:46294932-46294963
  hyper

SEQ ID NO: 40449 - DNA, 105 bp, Homo sapiens; identical to SEQ ID NO: 7245
  chr21:46950777-46950882
  hyper

SEQ ID NO: 40450 - DNA, 14 bp, Homo sapiens
  chr21:47799168-47799182
  hyper
ccgtcttcctgggc

SEQ ID NO: 40451 - DNA, 52 bp, Homo sapiens
  chr21:47799225-47799277
  hyper
gagccgcacccatcttcctggggctacgtgtcttgagcggcacccatatacc

SEQ ID NO: 40452 - DNA, 172 bp, Homo sapiens; identical to SEQ ID NO: 7247
  chr22:18923727-18923899
  hyper

SEQ ID NO: 40453 - DNA, 82 bp, Homo sapiens; identical to SEQ ID NO: 7251
  chr22:20255236-20255318
  hyper

SEQ ID NO: 40454 - DNA, 182 bp, Homo sapiens; identical to SEQ ID NO: 7252
  chr22:20255327-20255509
  hyper

SEQ ID NO: 40455 - DNA, 84 bp, Homo sapiens; identical to SEQ ID NO: 7253
  chr22:20255583-20255667
  hyper

SEQ ID NO: 40456 - DNA, 55 bp, Homo sapiens; identical to SEQ ID NO: 7255
  chr22:20286610-20286665
  hyper

SEQ ID NO: 40457 - DNA, 36 bp, Homo sapiens; identical to SEQ ID NO: 7256
  chr22:20286727-20286763
  hyper

SEQ ID NO: 40458 - DNA, 31 bp, Homo sapiens; identical to SEQ ID NO: 7257
  chr22:20286933-20286964
  hyper

SEQ ID NO: 40459 - DNA, 183 bp, Homo sapiens; identical to SEQ ID NO: 7258
  chr22:22220989-22221172
  hyper

SEQ ID NO: 40460 - DNA, 31 bp, Homo sapiens; identical to SEQ ID NO: 7259
  chr22:22221290-22221321
  hyper

SEQ ID NO: 40461 - DNA, 31 bp, Homo sapiens; identical to SEQ ID NO: 7260
  chr22:22280174-22280205
  hyper

SEQ ID NO: 40462 - DNA, 31 bp, Homo sapiens; identical to SEQ ID NO: 7261
  chr22:22307336-22307367
  hyper

SEQ ID NO: 40463 - DNA, 234 bp, Homo sapiens; identical to SEQ ID NO: 7266
  chr22:23523109-23523343
  hyper

SEQ ID NO: 40464 - DNA, 41 bp, Homo sapiens; identical to SEQ ID NO: 7267
  chr22:23523362-23523403
  hyper

SEQ ID NO: 40465 - DNA, 46 bp, Homo sapiens; identical to SEQ ID NO: 7268
  chr22:23523405-23523451
  hyper

SEQ ID NO: 40466 - DNA, 37 bp, Homo sapiens; identical to SEQ ID NO: 7269
  chr22:23523514-23523551
  hyper

SEQ ID NO: 40467 - DNA, 31 bp, Homo sapiens; identical to SEQ ID NO: 7270
  chr22:23864390-23864421
  hyper

SEQ ID NO: 40468 - DNA, 148 bp, Homo sapiens; identical to SEQ ID NO: 7285
  chr22:24552963-24553111
  hyper

SEQ ID NO: 40469 - DNA, 31 bp, Homo sapiens; identical to SEQ ID NO: 7286
  chr22:24563089-24563120
  hyper

SEQ ID NO: 40470 - DNA, 37 bp, Homo sapiens; identical to SEQ ID NO: 7287
  chr22:24643677-24643714
  hyper

SEQ ID NO: 40471 - DNA, 2 bp, Homo sapiens
  chr22:24820073-24820075
  hyper
ct

SEQ ID NO: 40472 - DNA, 92 bp, Homo sapiens; identical to SEQ ID NO: 7291
  chr22:24989195-24989287
  hyper

SEQ ID NO: 40473 - DNA, 31 bp, Homo sapiens; identical to SEQ ID NO: 7292
  chr22:25348233-25348264
  hyper

SEQ ID NO: 40474 - DNA, 31 bp, Homo sapiens; identical to SEQ ID NO: 7293
  chr22:25348278-25348309
  hyper

SEQ ID NO: 40475 - DNA, 68 bp, Homo sapiens; identical to SEQ ID NO: 7294
  chr22:25348311-25348379
  hyper

SEQ ID NO: 40476 - DNA, 55 bp, Homo sapiens
  chr22:25348388-25348443
  hyper
ggaacatccagggaacgcgggagggtacccggagcaaagttcccaattggacaga

SEQ ID NO: 40477 - DNA, 198 bp, Homo sapiens
  chr22:25348485-25348683
  hyper
tgtccaagcgagtcgtgacctctgacccgccggagaggtcccaggcccaggcgccactgcggactcgggtcctgcctgctctgctcccctccgcgcaggcgcggccggcggcagttcccatggtgacgggggcgcgtccccgctcgaggccccgcccccagcaggctaggctgcgcggggctgcgggctcccagggca

SEQ ID NO: 40478 - DNA, 184 bp, Homo sapiens; identical to SEQ ID NO: 7296
  chr22:25348802-25348986
  hyper

SEQ ID NO: 40479 - DNA, 58 bp, Homo sapiens; identical to SEQ ID NO: 7297
  chr22:25349110-25349168
  hyper

SEQ ID NO: 40480 - DNA, 31 bp, Homo sapiens; identical to SEQ ID NO: 7298
  chr22:25349197-25349228
  hyper

SEQ ID NO: 40481 - DNA, 2 bp, Homo sapiens
  chr22:25349271-25349273
  hyper
gg

SEQ ID NO: 40482 - DNA, 158 bp, Homo sapiens
  chr22:25349348-25349506
  hyper
gtcgaggggagcccggaggacagcgcggtggttcggggggcgtgagaggggcggcgcgcggggcccctcggacgcggaggctccggacacgtcctctcggcctggcctgcgccccccctccgctcgtcttcccagggcggaggcgccctgatgggatt

SEQ ID NO: 40483 - DNA, 118 bp, Homo sapiens; identical to SEQ ID NO: 7300
  chr22:25349522-25349640
  hyper

SEQ ID NO: 40484 - DNA, 112 bp, Homo sapiens; identical to SEQ ID NO: 7301
  chr22:25349645-25349757
  hyper

SEQ ID NO: 40485 - DNA, 31 bp, Homo sapiens; identical to SEQ ID NO: 7302
  chr22:25507703-25507734
  hyper

SEQ ID NO: 40486 - DNA, 80 bp, Homo sapiens; identical to SEQ ID NO: 7303
  chr22:25507737-25507817
  hyper

SEQ ID NO: 40487 - DNA, 31 bp, Homo sapiens; identical to SEQ ID NO: 7304
  chr22:26756979-26757010
  hyper

SEQ ID NO: 40488 - DNA, 50 bp, Homo sapiens; identical to SEQ ID NO: 7305
  chr22:26880365-26880415
  hyper

SEQ ID NO: 40489 - DNA, 80 bp, Homo sapiens; identical to SEQ ID NO: 7306
  chr22:26880425-26880505
  hyper

SEQ ID NO: 40490 - DNA, 31 bp, Homo sapiens; identical to SEQ ID NO: 7307
  chr22:27054040-27054071
  hyper

SEQ ID NO: 40491 - DNA, 59 bp, Homo sapiens; identical to SEQ ID NO: 7308
  chr22:27068716-27068775
  hyper

SEQ ID NO: 40492 - DNA, 31 bp, Homo sapiens; identical to SEQ ID NO: 7309
  chr22:27068785-27068816
  hyper

SEQ ID NO: 40493 - DNA, 15 bp, Homo sapiens
  chr22:27069238-27069253
  hyper
cggggccacacctgg

SEQ ID NO: 40494 - DNA, 31 bp, Homo sapiens; identical to SEQ ID NO: 7317
  chr22:29279216-29279247
  hyper

SEQ ID NO: 40495 - DNA, 74 bp, Homo sapiens; identical to SEQ ID NO: 7318
  chr22:29279555-29279629
  hyper

SEQ ID NO: 40496 - DNA, 74 bp, Homo sapiens; identical to SEQ ID NO: 7319
  chr22:29279910-29279984
  hyper

SEQ ID NO: 40497 - DNA, 173 bp, Homo sapiens; identical to SEQ ID NO: 7320
  chr22:29468802-29468975
  hyper

SEQ ID NO: 40498 - DNA, 35 bp, Homo sapiens; identical to SEQ ID NO: 7321
  chr22:29469137-29469172
  hyper

SEQ ID NO: 40499 - DNA, 63 bp, Homo sapiens; identical to SEQ ID NO: 7322
  chr22:29469213-29469276
  hyper

SEQ ID NO: 40500 - DNA, 57 bp, Homo sapiens; identical to SEQ ID NO: 7324
  chr22:29702351-29702408
  hyper

SEQ ID NO: 40501 - DNA, 56 bp, Homo sapiens; identical to SEQ ID NO: 7325
  chr22:29702531-29702587
  hyper

SEQ ID NO: 40502 - DNA, 140 bp, Homo sapiens; identical to SEQ ID NO: 7326
  chr22:29702593-29702733
  hyper

SEQ ID NO: 40503 - DNA, 536 bp, Homo sapiens; identical to SEQ ID NO: 7327
  chr22:29702784-29703320
  hyper

SEQ ID NO: 40504 - DNA, 189 bp, Homo sapiens; identical to SEQ ID NO: 7328
  chr22:30792948-30793137
  hyper

SEQ ID NO: 40505 - DNA, 31 bp, Homo sapiens; identical to SEQ ID NO: 7329
  chr22:31002802-31002833
  hyper

SEQ ID NO: 40506 - DNA, 62 bp, Homo sapiens; identical to SEQ ID NO: 7330
  chr22:31090873-31090935
  hyper

SEQ ID NO: 40507 - DNA, 31 bp, Homo sapiens; identical to SEQ ID NO: 7331
  chr22:31090941-31090972
  hyper

SEQ ID NO: 40508 - DNA, 259 bp, Homo sapiens
  chr22:31198752-31199011
  hyper
gctccagggggcggagggagcctcctcgggcggtggggaggaggctggaggaatgaggacgcagcacggcgcgcccttgcagcgctcaggctgacgggcgggcgggcggagcgggcgcacggctcctctaggtccggctgctctctgagctcgcgggctggacgctgtccgcggtgctgaagcggcgcccgcggcagggaggcggacccggagccgccgggcagcacacacccaatcccgggaccgccctcctcccagg

SEQ ID NO: 40509 - DNA, 93 bp, Homo sapiens; identical to SEQ ID NO: 7333
  chr22:31199058-31199151
  hyper

SEQ ID NO: 40510 - DNA, 2 bp, Homo sapiens
  chr22:31480650-31480652
  hyper
ct

SEQ ID NO: 40511 - DNA, 31 bp, Homo sapiens; identical to SEQ ID NO: 7339
  chr22:33149562-33149593
  hyper

SEQ ID NO: 40512 - DNA, 68 bp, Homo sapiens; identical to SEQ ID NO: 7340
  chr22:34316493-34316561
  hyper

SEQ ID NO: 40513 - DNA, 31 bp, Homo sapiens; identical to SEQ ID NO: 7341
  chr22:35746850-35746881
  hyper

SEQ ID NO: 40514 - DNA, 41 bp, Homo sapiens; identical to SEQ ID NO: 7342
  chr22:35768081-35768122
  hyper

SEQ ID NO: 40515 - DNA, 69 bp, Homo sapiens; identical to SEQ ID NO: 7343
  chr22:35768165-35768234
  hyper

SEQ ID NO: 40516 - DNA, 91 bp, Homo sapiens; identical to SEQ ID NO: 7344
  chr22:35777143-35777234
  hyper

SEQ ID NO: 40517 - DNA, 31 bp, Homo sapiens; identical to SEQ ID NO: 7345
  chr22:35827119-35827150
  hyper

SEQ ID NO: 40518 - DNA, 34 bp, Homo sapiens; identical to SEQ ID NO: 7346
  chr22:36424034-36424068
  hyper

SEQ ID NO: 40519 - DNA, 61 bp, Homo sapiens; identical to SEQ ID NO: 7347
  chr22:36424072-36424133
  hyper

SEQ ID NO: 40520 - DNA, 58 bp, Homo sapiens; identical to SEQ ID NO: 7348
  chr22:36424336-36424394
  hyper

SEQ ID NO: 40521 - DNA, 40 bp, Homo sapiens; identical to SEQ ID NO: 7349
  chr22:36424418-36424458
  hyper

SEQ ID NO: 40522 - DNA, 52 bp, Homo sapiens; identical to SEQ ID NO: 7350
  chr22:36425194-36425246
  hyper

SEQ ID NO: 40523 - DNA, 44 bp, Homo sapiens; identical to SEQ ID NO: 7351
  chr22:36462013-36462057
  hyper

SEQ ID NO: 40524 - DNA, 67 bp, Homo sapiens; identical to SEQ ID NO: 7352
  chr22:36462100-36462167
  hyper

SEQ ID NO: 40525 - DNA, 15 bp, Homo sapiens
  chr22:37099779-37099794
  hyper
gaaggcgtagctaga

SEQ ID NO: 40526 - DNA, 112 bp, Homo sapiens; identical to SEQ ID NO: 7356
  chr22:37414959-37415071
  hyper

SEQ ID NO: 40527 - DNA, 37 bp, Homo sapiens; identical to SEQ ID NO: 7357
  chr22:37415083-37415120
  hyper

SEQ ID NO: 40528 - DNA, 37 bp, Homo sapiens; identical to SEQ ID NO: 7358
  chr22:37415245-37415282
  hyper

SEQ ID NO: 40529 - DNA, 41 bp, Homo sapiens; identical to SEQ ID NO: 7359
  chr22:37595693-37595734
  hyper

SEQ ID NO: 40530 - DNA, 66 bp, Homo sapiens; identical to SEQ ID NO: 7360
  chr22:37915036-37915102
  hyper

SEQ ID NO: 40531 - DNA, 42 bp, Homo sapiens; identical to SEQ ID NO: 7361
  chr22:37915114-37915156
  hyper

SEQ ID NO: 40532 - DNA, 56 bp, Homo sapiens; identical to SEQ ID NO: 7362
  chr22:37915160-37915216
  hyper

SEQ ID NO: 40533 - DNA, 84 bp, Homo sapiens; identical to SEQ ID NO: 7363
  chr22:37915222-37915306
  hyper

SEQ ID NO: 40534 - DNA, 31 bp, Homo sapiens; identical to SEQ ID NO: 7364
  chr22:37915402-37915433
  hyper

SEQ ID NO: 40535 - DNA, 107 bp, Homo sapiens; identical to SEQ ID NO: 7365
  chr22:37956435-37956542
  hyper

SEQ ID NO: 40536 - DNA, 396 bp, Homo sapiens; identical to SEQ ID NO: 7366
  chr22:37956635-37957031
  hyper

SEQ ID NO: 40537 - DNA, 169 bp, Homo sapiens; identical to SEQ ID NO: 7367
  chr22:37957033-37957202
  hyper

SEQ ID NO: 40538 - DNA, 107 bp, Homo sapiens; identical to SEQ ID NO: 7369
  chr22:37957312-37957419
  hyper

SEQ ID NO: 40539 - DNA, 93 bp, Homo sapiens; identical to SEQ ID NO: 7370
  chr22:37957510-37957603
  hyper

SEQ ID NO: 40540 - DNA, 35 bp, Homo sapiens; identical to SEQ ID NO: 7371
  chr22:37957604-37957639
  hyper

SEQ ID NO: 40541 - DNA, 31 bp, Homo sapiens; identical to SEQ ID NO: 7372
  chr22:38201306-38201337
  hyper

SEQ ID NO: 40542 - DNA, 38 bp, Homo sapiens; identical to SEQ ID NO: 7373
  chr22:38201356-38201394
  hyper

SEQ ID NO: 40543 - DNA, 31 bp, Homo sapiens; identical to SEQ ID NO: 7374
  chr22:38578022-38578053
  hyper

SEQ ID NO: 40544 - DNA, 50 bp, Homo sapiens; identical to SEQ ID NO: 7375
  chr22:38578102-38578152
  hyper

SEQ ID NO: 40545 - DNA, 31 bp, Homo sapiens; identical to SEQ ID NO: 7376
  chr22:38863832-38863863
  hyper

SEQ ID NO: 40546 - DNA, 63 bp, Homo sapiens; identical to SEQ ID NO: 7377
  chr22:38863865-38863928
  hyper

SEQ ID NO: 40547 - DNA, 73 bp, Homo sapiens; identical to SEQ ID NO: 7378
  chr22:38864200-38864273
  hyper

SEQ ID NO: 40548 - DNA, 31 bp, Homo sapiens; identical to SEQ ID NO: 7379
  chr22:38966130-38966161
  hyper

SEQ ID NO: 40549 - DNA, 55 bp, Homo sapiens; identical to SEQ ID NO: 7380
  chr22:39189767-39189822
  hyper

SEQ ID NO: 40550 - DNA, 48 bp, Homo sapiens; identical to SEQ ID NO: 7381
  chr22:39638592-39638640
  hyper

SEQ ID NO: 40551 - DNA, 94 bp, Homo sapiens
  chr22:39853157-39853251
  hyper
ggttgcggagggggcggggtgggggccggagccgcttgagccggcgggagcgggcacccctgcgcgccgcgctcggcctcgcctccgcgccccc

SEQ ID NO: 40552 - DNA, 210 bp, Homo sapiens
  chr22:39853690-39853900
  hyper
cgggcgcgggcgcactggggctgggggcccggaggccgcggtgggggcgggatgccggggaagccgctcggcgcgggccccctccccctacccgccgctcctccgagctccccggtccccggagggcagagcctcagcgcccgaccccctcccacggccgggcgggggacgtccccgaggcgcggggctcgagccgtgctttgtgcgcgg

SEQ ID NO: 40553 - DNA, 97 bp, Homo sapiens
  chr22:39853934-39854031
  hyper
ctccggcgcggcgcggggctggggtgggaggcctccgcgcccgccttccccacccccgaccccagactgcggcggcggcagccgaggcccaagcgca

SEQ ID NO: 40554 - DNA, 54 bp, Homo sapiens; identical to SEQ ID NO: 7386
  chr22:41593088-41593142
  hyper

SEQ ID NO: 40555 - DNA, 136 bp, Homo sapiens; identical to SEQ ID NO: 7387
  chr22:41593144-41593280
  hyper

SEQ ID NO: 40556 - DNA, 67 bp, Homo sapiens; identical to SEQ ID NO: 7388
  chr22:41763317-41763384
  hyper

SEQ ID NO: 40557 - DNA, 42 bp, Homo sapiens; identical to SEQ ID NO: 7389
  chr22:41985664-41985706
  hyper

SEQ ID NO: 40558 - DNA, 31 bp, Homo sapiens; identical to SEQ ID NO: 7390
  chr22:42084265-42084296
  hyper

SEQ ID NO: 40559 - DNA, 31 bp, Homo sapiens; identical to SEQ ID NO: 7391
  chr22:42229857-42229888
  hyper

SEQ ID NO: 40560 - DNA, 36 bp, Homo sapiens
  chr22:42311281-42311317
  hyper
atcggaactgggcgctcgaaggggatcagttctagg

SEQ ID NO: 40561 - DNA, 46 bp, Homo sapiens
  chr22:42354024-42354070
  hyper
gcctgggccctcccgacagaggccccaggtgcgctggcagtggagg

SEQ ID NO: 40562 - DNA, 31 bp, Homo sapiens; identical to SEQ ID NO: 7398
  chr22:42670149-42670180
  hyper

SEQ ID NO: 40563 - DNA, 132 bp, Homo sapiens; identical to SEQ ID NO: 7401
  chr22:42765053-42765185
  hyper

SEQ ID NO: 40564 - DNA, 61 bp, Homo sapiens; identical to SEQ ID NO: 7402
  chr22:42765320-42765381
  hyper

SEQ ID NO: 40565 - DNA, 31 bp, Homo sapiens; identical to SEQ ID NO: 7403
  chr22:43177262-43177293
  hyper

SEQ ID NO: 40566 - DNA, 67 bp, Homo sapiens; identical to SEQ ID NO: 7404
  chr22:43547343-43547410
  hyper

SEQ ID NO: 40567 - DNA, 31 bp, Homo sapiens; identical to SEQ ID NO: 7405
  chr22:44420412-44420443
  hyper

SEQ ID NO: 40568 - DNA, 34 bp, Homo sapiens; identical to SEQ ID NO: 7406
  chr22:44893740-44893774
  hyper

SEQ ID NO: 40569 - DNA, 205 bp, Homo sapiens; identical to SEQ ID NO: 7407
  chr22:44894099-44894304
  hyper

SEQ ID NO: 40570 - DNA, 104 bp, Homo sapiens; identical to SEQ ID NO: 7408
  chr22:45097904-45098008
  hyper

SEQ ID NO: 40571 - DNA, 295 bp, Homo sapiens
  chr22:45098036-45098331
  hyper
ccggggcgccgagacccgcccctgggcccgcccccgggtccgcccccggcctccgtttgcgccgggtctgtgctggccgcgcgcctggcgctccacgctgagcctctccgtgcaatgattaacccggcggggcggccggcgcgggacccgagacggaggcgcggggccggggcgggaccccgcaggaccgctcggcttcctgctctcgccggagtttccgcgtagagggcgcatcgccggcccggggcccttggtgcggcgtggcgcagggcgcggcgtggggcgcgcgtgggcg

SEQ ID NO: 40572 - DNA, 254 bp, Homo sapiens; identical to SEQ ID NO: 7410
  chr22:45098405-45098659
  hyper

SEQ ID NO: 40573 - DNA, 137 bp, Homo sapiens
  chr22:45098715-45098852
  hyper
ggggctggcccagaagcgcccggcgggtgggcggcggggtgggccgggaagccgcgtgcccgcctcctacccggggtctttccacgtctccactgcggtgctcgtgacaacctgggaggctaacggagcaggaagta

SEQ ID NO: 40574 - DNA, 40 bp, Homo sapiens; identical to SEQ ID NO: 7412
  chr22:45098971-45099011
  hyper

SEQ ID NO: 40575 - DNA, 87 bp, Homo sapiens; identical to SEQ ID NO: 7413
  chr22:45148518-45148605
  hyper

SEQ ID NO: 40576 - DNA, 37 bp, Homo sapiens; identical to SEQ ID NO: 7415
  chr22:45664600-45664637
  hyper

SEQ ID NO: 40577 - DNA, 55 bp, Homo sapiens; identical to SEQ ID NO: 7416
  chr22:46363414-46363469
  hyper

SEQ ID NO: 40578 - DNA, 31 bp, Homo sapiens; identical to SEQ ID NO: 7417
  chr22:46363472-46363503
  hyper

SEQ ID NO: 40579 - DNA, 31 bp, Homo sapiens; identical to SEQ ID NO: 7418
  chr22:46363559-46363590
  hyper

SEQ ID NO: 40580 - DNA, 60 bp, Homo sapiens; identical to SEQ ID NO: 7420
  chr22:46373011-46373071
  hyper

SEQ ID NO: 40581 - DNA, 31 bp, Homo sapiens; identical to SEQ ID NO: 7421
  chr22:46466169-46466200
  hyper

SEQ ID NO: 40582 - DNA, 31 bp, Homo sapiens; identical to SEQ ID NO: 7422
  chr22:46663611-46663642
  hyper

SEQ ID NO: 40583 - DNA, 31 bp, Homo sapiens; identical to SEQ ID NO: 7423
  chr22:46774456-46774487
  hyper

SEQ ID NO: 40584 - DNA, 31 bp, Homo sapiens; identical to SEQ ID NO: 7424
  chr22:46933244-46933275
  hyper

SEQ ID NO: 40585 - DNA, 98 bp, Homo sapiens; identical to SEQ ID NO: 7425
  chr22:46933585-46933683
  hyper

SEQ ID NO: 40586 - DNA, 57 bp, Homo sapiens; identical to SEQ ID NO: 7426
  chr22:46933977-46934034
  hyper

SEQ ID NO: 40587 - DNA, 58 bp, Homo sapiens; identical to SEQ ID NO: 7427
  chr22:46934045-46934103
  hyper

SEQ ID NO: 40588 - DNA, 53 bp, Homo sapiens; identical to SEQ ID NO: 7428
  chr22:50170509-50170562
  hyper

SEQ ID NO: 40589 - DNA, 2 bp, Homo sapiens
  chr22:50170582-50170584
  hyper
ac

SEQ ID NO: 40590 - DNA, 99 bp, Homo sapiens; identical to SEQ ID NO: 7430
  chr22:50246600-50246699
  hyper

SEQ ID NO: 40591 - DNA, 22 bp, Homo sapiens
  chr22:50624022-50624044
  hyper
ctgtggacgccgtgcgagcatt

SEQ ID NO: 40592 - DNA, 31 bp, Homo sapiens; identical to SEQ ID NO: 7433
  chr22:50745644-50745675
  hyper

SEQ ID NO: 40593 - DNA, 31 bp, Homo sapiens; identical to SEQ ID NO: 7434
  chr22:50745698-50745729
  hyper

SEQ ID NO: 40594 - DNA, 31 bp, Homo sapiens; identical to SEQ ID NO: 7435
  chr22:50765138-50765169
  hyper

SEQ ID NO: 40595 - DNA, 81 bp, Homo sapiens; identical to SEQ ID NO: 7436
  chr22:50920027-50920108
  hyper

SEQ ID NO: 40596 - DNA, 42 bp, Homo sapiens; identical to SEQ ID NO: 7437
  chr22:50965202-50965244
  hyper

SEQ ID NO: 40597 - DNA, 205 bp, Homo sapiens; identical to SEQ ID NO: 7438
  chr22:50970576-50970781
  hyper

SEQ ID NO: 40598 - DNA, 86 bp, Homo sapiens; identical to SEQ ID NO: 7439
  chr22:50970820-50970906
  hyper

SEQ ID NO: 40599 - DNA, 75 bp, Homo sapiens; identical to SEQ ID NO: 7440
  chr22:50970908-50970983
  hyper

SEQ ID NO: 40600 - DNA, 31 bp, Homo sapiens; identical to SEQ ID NO: 7441
  chr22:50970986-50971017
  hyper

SEQ ID NO: 40601 - DNA, 31 bp, Homo sapiens; identical to SEQ ID NO: 7442
  chr22:51066541-51066572
  hyper

SEQ ID NO: 40602 - DNA, 102 bp, Homo sapiens; identical to SEQ ID NO: 7443
  chrX:2747434-2747536
  hyper

SEQ ID NO: 40603 - DNA, 52 bp, Homo sapiens
  chrX:2846756-2846808
  hyper
gggcaaggctacgcttcgggggatggagccttggggcgggacggggcgcgtc

SEQ ID NO: 40604 - DNA, 52 bp, Homo sapiens; identical to SEQ ID NO: 7445
  chrX:9310728-9310780
  hyper

SEQ ID NO: 40605 - DNA, 46 bp, Homo sapiens; identical to SEQ ID NO: 7447
  chrX:16965289-16965335
  hyper

SEQ ID NO: 40606 - DNA, 31 bp, Homo sapiens; identical to SEQ ID NO: 7448
  chrX:27999797-27999828
  hyper

SEQ ID NO: 40607 - DNA, 31 bp, Homo sapiens; identical to SEQ ID NO: 7449
  chrX:27999837-27999868
  hyper

SEQ ID NO: 40608 - DNA, 52 bp, Homo sapiens; identical to SEQ ID NO: 7450
  chrY:15863329-15863381
  hyper

SEQ ID NO: 40609 - DNA, 35 bp, Homo sapiens; identical to SEQ ID NO: 7451
  chrY:15863884-15863919
  hyper

SEQ ID NO: 40610 - DNA, 92 bp, Homo sapiens; identical to SEQ ID NO: 7452
  chrY:15864024-15864116
  hyper

SEQ ID NO: 40611 - DNA, 2 bp, Homo sapiens
  chrY:16635816-16635818
  hyper
cc

SEQ ID NO: 40612 - DNA, 31 bp, Homo sapiens; identical to SEQ ID NO: 7456
  chrY:17245169-17245200
  hyper

SEQ ID NO: 40613 - DNA, 31 bp, Homo sapiens; identical to SEQ ID NO: 7457
  AC153808.1_1-20788:7948-7979
  hyper

SEQ ID NO: 40614 - DNA, 1 bp, Homo sapiens
  JH636052.4:1362108-1362109
  hyper
g

SEQ ID NO: 40615 - DNA, 42 bp, Homo sapiens
  JH636052.4:1362132-1362174
  hyper
tccttcgtggcgaagcagcagcccctgcgctgcctcatctac

SEQ ID NO: 40616 - DNA, 8 bp, Homo sapiens
  JH636052.4:1362185-1362193
  hyper
ctatcggt

SEQ ID NO: 40617 - DNA, 85 bp, Homo sapiens; identical to SEQ ID NO: 7461
  JH636052.4:1376241-1376326
  hyper

SEQ ID NO: 40618 - DNA, 12 bp, Homo sapiens
  JH636052.4:2302768-2302780
  hyper
cttcacccactg

SEQ ID NO: 40619 - DNA, 113 bp, Homo sapiens; identical to SEQ ID NO: 7464
  NW_001838402.2_289580-297926:6068-6181
  hyper

SEQ ID NO: 40620 - DNA, 31 bp, Homo sapiens; identical to SEQ ID NO: 7465
  chr1:714260-714291
  hypo

SEQ ID NO: 40621 - DNA, 34 bp, Homo sapiens; identical to SEQ ID NO: 7466
  chr1:809312-809346
  hypo

SEQ ID NO: 40622 - DNA, 65 bp, Homo sapiens; identical to SEQ ID NO: 1
  chr1:859735-859800
  hypo

SEQ ID NO: 40623 - DNA, 2 bp, Homo sapiens
  chr1:898727-898729
  hypo
cc

SEQ ID NO: 40624 - DNA, 96 bp, Homo sapiens; identical to SEQ ID NO: 2
  chr1:935361-935457
  hypo

SEQ ID NO: 40625 - DNA, 31 bp, Homo sapiens; identical to SEQ ID NO: 3
  chr1:935826-935857
  hypo

SEQ ID NO: 40626 - DNA, 67 bp, Homo sapiens; identical to SEQ ID NO: 4
  chr1:936193-936260
  hypo

SEQ ID NO: 40627 - DNA, 2 bp, Homo sapiens
  chr1:942312-942314
  hypo
cc

SEQ ID NO: 40628 - DNA, 353 bp, Homo sapiens; identical to SEQ ID NO: 5
  chr1:955507-955860
  hypo

SEQ ID NO: 40629 - DNA, 31 bp, Homo sapiens; identical to SEQ ID NO: 6
  chr1:955869-955900
  hypo

SEQ ID NO: 40630 - DNA, 31 bp, Homo sapiens; identical to SEQ ID NO: 7481
  chr1:973222-973253
  hypo

SEQ ID NO: 40631 - DNA, 69 bp, Homo sapiens; identical to SEQ ID NO: 7482
  chr1:982370-982439
  hypo

SEQ ID NO: 40632 - DNA, 36 bp, Homo sapiens; identical to SEQ ID NO: 7483
  chr1:982449-982485
  hypo

SEQ ID NO: 40633 - DNA, 2 bp, Homo sapiens
  chr1:984366-984368
  hypo
tg

SEQ ID NO: 40634 - DNA, 49 bp, Homo sapiens; identical to SEQ ID NO: 7485
  chr1:987798-987847
  hypo

SEQ ID NO: 40635 - DNA, 31 bp, Homo sapiens; identical to SEQ ID NO: 7486
  chr1:988013-988044
  hypo

SEQ ID NO: 40636 - DNA, 45 bp, Homo sapiens; identical to SEQ ID NO: 7487
  chr1:988089-988134
  hypo

SEQ ID NO: 40637 - DNA, 45 bp, Homo sapiens; identical to SEQ ID NO: 7488
  chr1:988181-988226
  hypo

SEQ ID NO: 40638 - DNA, 36 bp, Homo sapiens; identical to SEQ ID NO: 7489
  chr1:990258-990294
  hypo

SEQ ID NO: 40639 - DNA, 50 bp, Homo sapiens; identical to SEQ ID NO: 7490
  chr1:990657-990707
  hypo

SEQ ID NO: 40640 - DNA, 31 bp, Homo sapiens; identical to SEQ ID NO: 7491
  chr1:990725-990756
  hypo

SEQ ID NO: 40641 - DNA, 41 bp, Homo sapiens; identical to SEQ ID NO: 7492
  chr1:990798-990839
  hypo

SEQ ID NO: 40642 - DNA, 42 bp, Homo sapiens; identical to SEQ ID NO: 7493
  chr1:991001-991043
  hypo

SEQ ID NO: 40643 - DNA, 31 bp, Homo sapiens; identical to SEQ ID NO: 7
  chr1:995029-995060
  hypo

SEQ ID NO: 40644 - DNA, 78 bp, Homo sapiens; identical to SEQ ID NO: 7495
  chr1:1019319-1019397
  hypo

SEQ ID NO: 40645 - DNA, 31 bp, Homo sapiens; identical to SEQ ID NO: 7496
  chr1:1019416-1019447
  hypo

SEQ ID NO: 40646 - DNA, 57 bp, Homo sapiens; identical to SEQ ID NO: 10
  chr1:1052181-1052238
  hypo

SEQ ID NO: 40647 - DNA, 31 bp, Homo sapiens; identical to SEQ ID NO: 7499
  chr1:1069738-1069769
  hypo

SEQ ID NO: 40648 - DNA, 31 bp, Homo sapiens; identical to SEQ ID NO: 7500
  chr1:1069951-1069982
  hypo

SEQ ID NO: 40649 - DNA, 31 bp, Homo sapiens; identical to SEQ ID NO: 7501
  chr1:1074034-1074065
  hypo

SEQ ID NO: 40650 - DNA, 31 bp, Homo sapiens; identical to SEQ ID NO: 7502
  chr1:1079128-1079159
  hypo

SEQ ID NO: 40651 - DNA, 2 bp, Homo sapiens
  chr1:1080475-1080477
  hypo
tc

SEQ ID NO: 40652 - DNA, 39 bp, Homo sapiens; identical to SEQ ID NO: 7506
  chr1:1140774-1140813
  hypo

SEQ ID NO: 40653 - DNA, 38 bp, Homo sapiens; identical to SEQ ID NO: 7507
  chr1:1151686-1151724
  hypo

SEQ ID NO: 40654 - DNA, 31 bp, Homo sapiens; identical to SEQ ID NO: 7508
  chr1:1151917-1151948
  hypo

SEQ ID NO: 40655 - DNA, 31 bp, Homo sapiens; identical to SEQ ID NO: 7511
  chr1:1218648-1218679
  hypo

SEQ ID NO: 40656 - DNA, 2 bp, Homo sapiens
  chr1:1222236-1222238
  hypo
gc

SEQ ID NO: 40657 - DNA, 31 bp, Homo sapiens; identical to SEQ ID NO: 7514
  chr1:1232281-1232312
  hypo

SEQ ID NO: 40658 - DNA, 23 bp, Homo sapiens
  chr1:1238482-1238505
  hypo
gcctccctcggcctctcccccaa

SEQ ID NO: 40659 - DNA, 35 bp, Homo sapiens; identical to SEQ ID NO: 7518
  chr1:1238565-1238600
  hypo

SEQ ID NO: 40660 - DNA, 31 bp, Homo sapiens; identical to SEQ ID NO: 7519
  chr1:1253114-1253145
  hypo

SEQ ID NO: 40661 - DNA, 31 bp, Homo sapiens; identical to SEQ ID NO: 7520
  chr1:1253193-1253224
  hypo

SEQ ID NO: 40662 - DNA, 34 bp, Homo sapiens; identical to SEQ ID NO: 7523
  chr1:1258112-1258146
  hypo

SEQ ID NO: 40663 - DNA, 34 bp, Homo sapiens
  chr1:1264887-1264921
  hypo
agtgcgagtgtgctatttgcgtgtgccgcacgtg

SEQ ID NO: 40664 - DNA, 21 bp, Homo sapiens
  chr1:1273501-1273522
  hypo
ggccagcgtgtcctgatccga

SEQ ID NO: 40665 - DNA, 31 bp, Homo sapiens; identical to SEQ ID NO: 7528
  chr1:1380694-1380725
  hypo

SEQ ID NO: 40666 - DNA, 31 bp, Homo sapiens; identical to SEQ ID NO: 7529
  chr1:1385741-1385772
  hypo

SEQ ID NO: 40667 - DNA, 34 bp, Homo sapiens; identical to SEQ ID NO: 7530
  chr1:1388340-1388374
  hypo

SEQ ID NO: 40668 - DNA, 48 bp, Homo sapiens; identical to SEQ ID NO: 7531
  chr1:1389832-1389880
  hypo

SEQ ID NO: 40669 - DNA, 57 bp, Homo sapiens; identical to SEQ ID NO: 7532
  chr1:1390128-1390185
  hypo

SEQ ID NO: 40670 - DNA, 31 bp, Homo sapiens; identical to SEQ ID NO: 7533
  chr1:1652614-1652645
  hypo

SEQ ID NO: 40671 - DNA, 128 bp, Homo sapiens; identical to SEQ ID NO: 11
  chr1:1737717-1737845
  hypo

SEQ ID NO: 40672 - DNA, 31 bp, Homo sapiens; identical to SEQ ID NO: 7535
  chr1:1781845-1781876
  hypo

SEQ ID NO: 40673 - DNA, 31 bp, Homo sapiens; identical to SEQ ID NO: 7536
  chr1:1795941-1795972
  hypo

SEQ ID NO: 40674 - DNA, 31 bp, Homo sapiens; identical to SEQ ID NO: 7538
  chr1:1869915-1869946
  hypo

SEQ ID NO: 40675 - DNA, 23 bp, Homo sapiens
  chr1:1888176-1888199
  hypo
cctaccacgtagctgccgaagtc

SEQ ID NO: 40676 - DNA, 31 bp, Homo sapiens; identical to SEQ ID NO: 7540
  chr1:1889050-1889081
  hypo

SEQ ID NO: 40677 - DNA, 31 bp, Homo sapiens; identical to SEQ ID NO: 7541
  chr1:1967235-1967266
  hypo

SEQ ID NO: 40678 - DNA, 176 bp, Homo sapiens; identical to SEQ ID NO: 13
  chr1:1981252-1981428
  hypo

SEQ ID NO: 40679 - DNA, 97 bp, Homo sapiens; identical to SEQ ID NO: 14
  chr1:1981457-1981554
  hypo

SEQ ID NO: 40680 - DNA, 173 bp, Homo sapiens; identical to SEQ ID NO: 15
  chr1:1981576-1981749
  hypo

SEQ ID NO: 40681 - DNA, 193 bp, Homo sapiens; identical to SEQ ID NO: 16
  chr1:1981788-1981981
  hypo

SEQ ID NO: 40682 - DNA, 31 bp, Homo sapiens; identical to SEQ ID NO: 17
  chr1:1982244-1982275
  hypo

SEQ ID NO: 40683 - DNA, 49 bp, Homo sapiens; identical to SEQ ID NO: 18
  chr1:1982476-1982525
  hypo

SEQ ID NO: 40684 - DNA, 2 bp, Homo sapiens
  chr1:1986233-1986235
  hypo
tt

SEQ ID NO: 40685 - DNA, 54 bp, Homo sapiens; identical to SEQ ID NO: 7550
  chr1:2041086-2041140
  hypo

SEQ ID NO: 40686 - DNA, 31 bp, Homo sapiens; identical to SEQ ID NO: 7551
  chr1:2066124-2066155
  hypo

SEQ ID NO: 40687 - DNA, 31 bp, Homo sapiens; identical to SEQ ID NO: 7552
  chr1:2096693-2096724
  hypo

SEQ ID NO: 40688 - DNA, 31 bp, Homo sapiens; identical to SEQ ID NO: 7553
  chr1:2103162-2103193
  hypo

SEQ ID NO: 40689 - DNA, 91 bp, Homo sapiens; identical to SEQ ID NO: 7554
  chr1:2103459-2103550
  hypo

SEQ ID NO: 40690 - DNA, 147 bp, Homo sapiens; identical to SEQ ID NO: 7555
  chr1:2103558-2103705
  hypo

SEQ ID NO: 40691 - DNA, 31 bp, Homo sapiens; identical to SEQ ID NO: 7556
  chr1:2107101-2107132
  hypo

SEQ ID NO: 40692 - DNA, 31 bp, Homo sapiens; identical to SEQ ID NO: 7557
  chr1:2107843-2107874
  hypo

SEQ ID NO: 40693 - DNA, 31 bp, Homo sapiens; identical to SEQ ID NO: 7558
  chr1:2111393-2111424
  hypo

SEQ ID NO: 40694 - DNA, 53 bp, Homo sapiens; identical to SEQ ID NO: 7559
  chr1:2116558-2116611
  hypo

SEQ ID NO: 40695 - DNA, 31 bp, Homo sapiens; identical to SEQ ID NO: 7560
  chr1:2116617-2116648
  hypo

SEQ ID NO: 40696 - DNA, 31 bp, Homo sapiens; identical to SEQ ID NO: 7561
  chr1:2116950-2116981
  hypo

SEQ ID NO: 40697 - DNA, 31 bp, Homo sapiens; identical to SEQ ID NO: 7563
  chr1:2132533-2132564
  hypo

SEQ ID NO: 40698 - DNA, 31 bp, Homo sapiens; identical to SEQ ID NO: 7565
  chr1:2154219-2154250
  hypo

SEQ ID NO: 40699 - DNA, 31 bp, Homo sapiens; identical to SEQ ID NO: 7566
  chr1:2167250-2167281
  hypo

SEQ ID NO: 40700 - DNA, 2 bp, Homo sapiens
  chr1:2170933-2170935
  hypo
cc

SEQ ID NO: 40701 - DNA, 37 bp, Homo sapiens; identical to SEQ ID NO: 7568
  chr1:2171008-2171045
  hypo

SEQ ID NO: 40702 - DNA, 51 bp, Homo sapiens; identical to SEQ ID NO: 7569
  chr1:2238201-2238252
  hypo

SEQ ID NO: 40703 - DNA, 31 bp, Homo sapiens; identical to SEQ ID NO: 7570
  chr1:2238317-2238348
  hypo

SEQ ID NO: 40704 - DNA, 31 bp, Homo sapiens; identical to SEQ ID NO: 7571
  chr1:2241012-2241043
  hypo

SEQ ID NO: 40705 - DNA, 55 bp, Homo sapiens; identical to SEQ ID NO: 7572
  chr1:2259102-2259157
  hypo

SEQ ID NO: 40706 - DNA, 40 bp, Homo sapiens; identical to SEQ ID NO: 7574
  chr1:2270735-2270775
  hypo

SEQ ID NO: 40707 - DNA, 134 bp, Homo sapiens; identical to SEQ ID NO: 7575
  chr1:2270790-2270924
  hypo

SEQ ID NO: 40708 - DNA, 31 bp, Homo sapiens; identical to SEQ ID NO: 7576
  chr1:2270929-2270960
  hypo

SEQ ID NO: 40709 - DNA, 38 bp, Homo sapiens; identical to SEQ ID NO: 7577
  chr1:2283081-2283119
  hypo

SEQ ID NO: 40710 - DNA, 121 bp, Homo sapiens; identical to SEQ ID NO: 7578
  chr1:2288356-2288477
  hypo

SEQ ID NO: 40711 - DNA, 36 bp, Homo sapiens
  chr1:2316466-2316502
  hypo
ggtcccggacccagtcgccgtcgtacttgtcaccgt

SEQ ID NO: 40712 - DNA, 68 bp, Homo sapiens; identical to SEQ ID NO: 7580
  chr1:2328831-2328899
  hypo

SEQ ID NO: 40713 - DNA, 31 bp, Homo sapiens; identical to SEQ ID NO: 7581
  chr1:2328901-2328932
  hypo

SEQ ID NO: 40714 - DNA, 52 bp, Homo sapiens; identical to SEQ ID NO: 7582
  chr1:2330457-2330509
  hypo

SEQ ID NO: 40715 - DNA, 45 bp, Homo sapiens; identical to SEQ ID NO: 7583
  chr1:2330535-2330580
  hypo

SEQ ID NO: 40716 - DNA, 2 bp, Homo sapiens
  chr1:2331362-2331364
  hypo
tg

SEQ ID NO: 40717 - DNA, 59 bp, Homo sapiens; identical to SEQ ID NO: 7585
  chr1:2331575-2331634
  hypo

SEQ ID NO: 40718 - DNA, 31 bp, Homo sapiens; identical to SEQ ID NO: 7586
  chr1:2359187-2359218
  hypo

SEQ ID NO: 40719 - DNA, 9 bp, Homo sapiens
  chr1:2437299-2437308
  hypo
gcccagaag

SEQ ID NO: 40720 - DNA, 67 bp, Homo sapiens; identical to SEQ ID NO: 7588
  chr1:2437377-2437444
  hypo

SEQ ID NO: 40721 - DNA, 31 bp, Homo sapiens; identical to SEQ ID NO: 7589
  chr1:2507223-2507254
  hypo

SEQ ID NO: 40722 - DNA, 31 bp, Homo sapiens; identical to SEQ ID NO: 22
  chr1:2517090-2517121
  hypo

SEQ ID NO: 40723 - DNA, 87 bp, Homo sapiens; identical to SEQ ID NO: 7591
  chr1:2522318-2522405
  hypo

SEQ ID NO: 40724 - DNA, 31 bp, Homo sapiens; identical to SEQ ID NO: 7592
  chr1:2529454-2529485
  hypo

SEQ ID NO: 40725 - DNA, 31 bp, Homo sapiens; identical to SEQ ID NO: 7593
  chr1:2562645-2562676
  hypo

SEQ ID NO: 40726 - DNA, 31 bp, Homo sapiens; identical to SEQ ID NO: 7594
  chr1:2726568-2726599
  hypo

SEQ ID NO: 40727 - DNA, 12 bp, Homo sapiens
  chr1:2823318-2823330
  hypo
cgcagtggtgga

SEQ ID NO: 40728 - DNA, 31 bp, Homo sapiens; identical to SEQ ID NO: 7596
  chr1:3154696-3154727
  hypo

SEQ ID NO: 40729 - DNA, 31 bp, Homo sapiens; identical to SEQ ID NO: 7597
  chr1:3162049-3162080
  hypo

SEQ ID NO: 40730 - DNA, 31 bp, Homo sapiens; identical to SEQ ID NO: 7598
  chr1:3233990-3234021
  hypo

SEQ ID NO: 40731 - DNA, 31 bp, Homo sapiens; identical to SEQ ID NO: 23
  chr1:3370920-3370951
  hypo

SEQ ID NO: 40732 - DNA, 50 bp, Homo sapiens; identical to SEQ ID NO: 24
  chr1:3371087-3371137
  hypo

SEQ ID NO: 40733 - DNA, 73 bp, Homo sapiens; identical to SEQ ID NO: 25
  chr1:3371189-3371262
  hypo

SEQ ID NO: 40734 - DNA, 111 bp, Homo sapiens; identical to SEQ ID NO: 7602
  chr1:3378248-3378359
  hypo

SEQ ID NO: 40735 - DNA, 38 bp, Homo sapiens; identical to SEQ ID NO: 7603
  chr1:3379982-3380020
  hypo

SEQ ID NO: 40736 - DNA, 31 bp, Homo sapiens; identical to SEQ ID NO: 7604
  chr1:3383744-3383775
  hypo

SEQ ID NO: 40737 - DNA, 57 bp, Homo sapiens; identical to SEQ ID NO: 7605
  chr1:3385657-3385714
  hypo

SEQ ID NO: 40738 - DNA, 74 bp, Homo sapiens; identical to SEQ ID NO: 7606
  chr1:3393356-3393430
  hypo

SEQ ID NO: 40739 - DNA, 31 bp, Homo sapiens; identical to SEQ ID NO: 7607
  chr1:3393765-3393796
  hypo

SEQ ID NO: 40740 - DNA, 62 bp, Homo sapiens; identical to SEQ ID NO: 7608
  chr1:3435616-3435678
  hypo

SEQ ID NO: 40741 - DNA, 56 bp, Homo sapiens; identical to SEQ ID NO: 7609
  chr1:3435743-3435799
  hypo

SEQ ID NO: 40742 - DNA, 39 bp, Homo sapiens; identical to SEQ ID NO: 28
  chr1:3447532-3447571
  hypo

SEQ ID NO: 40743 - DNA, 119 bp, Homo sapiens; identical to SEQ ID NO: 29
  chr1:3447572-3447691
  hypo

SEQ ID NO: 40744 - DNA, 52 bp, Homo sapiens; identical to SEQ ID NO: 30
  chr1:3447704-3447756
  hypo

SEQ ID NO: 40745 - DNA, 49 bp, Homo sapiens; identical to SEQ ID NO: 31
  chr1:3447761-3447810
  hypo

SEQ ID NO: 40746 - DNA, 162 bp, Homo sapiens; identical to SEQ ID NO: 32
  chr1:3447822-3447984
  hypo

SEQ ID NO: 40747 - DNA, 31 bp, Homo sapiens; identical to SEQ ID NO: 7615
  chr1:3448900-3448931
  hypo

SEQ ID NO: 40748 - DNA, 31 bp, Homo sapiens; identical to SEQ ID NO: 7616
  chr1:3449030-3449061
  hypo

SEQ ID NO: 40749 - DNA, 31 bp, Homo sapiens; identical to SEQ ID NO: 7617
  chr1:3458047-3458078
  hypo

SEQ ID NO: 40750 - DNA, 31 bp, Homo sapiens; identical to SEQ ID NO: 7618
  chr1:3555533-3555564
  hypo

SEQ ID NO: 40751 - DNA, 31 bp, Homo sapiens; identical to SEQ ID NO: 7619
  chr1:3576145-3576176
  hypo

SEQ ID NO: 40752 - DNA, 34 bp, Homo sapiens; identical to SEQ ID NO: 7620
  chr1:3576263-3576297
  hypo

SEQ ID NO: 40753 - DNA, 31 bp, Homo sapiens; identical to SEQ ID NO: 7621
  chr1:3608741-3608772
  hypo

SEQ ID NO: 40754 - DNA, 31 bp, Homo sapiens; identical to SEQ ID NO: 7622
  chr1:3617449-3617480
  hypo

SEQ ID NO: 40755 - DNA, 31 bp, Homo sapiens; identical to SEQ ID NO: 7623
  chr1:3622263-3622294
  hypo

SEQ ID NO: 40756 - DNA, 38 bp, Homo sapiens; identical to SEQ ID NO: 7624
  chr1:3622992-3623030
  hypo

SEQ ID NO: 40757 - DNA, 42 bp, Homo sapiens; identical to SEQ ID NO: 7625
  chr1:3623372-3623414
  hypo

SEQ ID NO: 40758 - DNA, 31 bp, Homo sapiens; identical to SEQ ID NO: 7626
  chr1:3638487-3638518
  hypo

SEQ ID NO: 40759 - DNA, 31 bp, Homo sapiens; identical to SEQ ID NO: 7627
  chr1:3650895-3650926
  hypo

SEQ ID NO: 40760 - DNA, 150 bp, Homo sapiens; identical to SEQ ID NO: 7628
  chr1:3651333-3651483
  hypo

SEQ ID NO: 40761 - DNA, 31 bp, Homo sapiens; identical to SEQ ID NO: 7629
  chr1:3655596-3655627
  hypo

SEQ ID NO: 40762 - DNA, 70 bp, Homo sapiens; identical to SEQ ID NO: 7630
  chr1:3655641-3655711
  hypo

SEQ ID NO: 40763 - DNA, 31 bp, Homo sapiens; identical to SEQ ID NO: 7632
  chr1:3695642-3695673
  hypo

SEQ ID NO: 40764 - DNA, 49 bp, Homo sapiens; identical to SEQ ID NO: 7633
  chr1:3695677-3695726
  hypo

SEQ ID NO: 40765 - DNA, 31 bp, Homo sapiens; identical to SEQ ID NO: 7634
  chr1:3695798-3695829
  hypo

SEQ ID NO: 40766 - DNA, 31 bp, Homo sapiens; identical to SEQ ID NO: 7635
  chr1:3705389-3705420
  hypo

SEQ ID NO: 40767 - DNA, 31 bp, Homo sapiens; identical to SEQ ID NO: 7636
  chr1:3705432-3705463
  hypo

SEQ ID NO: 40768 - DNA, 88 bp, Homo sapiens; identical to SEQ ID NO: 35
  chr1:3817993-3818081
  hypo

SEQ ID NO: 40769 - DNA, 31 bp, Homo sapiens; identical to SEQ ID NO: 7639
  chr1:4359784-4359815
  hypo

SEQ ID NO: 40770 - DNA, 31 bp, Homo sapiens; identical to SEQ ID NO: 7640
  chr1:4359831-4359862
  hypo

SEQ ID NO: 40771 - DNA, 31 bp, Homo sapiens; identical to SEQ ID NO: 7641
  chr1:4359904-4359935
  hypo

SEQ ID NO: 40772 - DNA, 31 bp, Homo sapiens; identical to SEQ ID NO: 7642
  chr1:4359956-4359987
  hypo

SEQ ID NO: 40773 - DNA, 31 bp, Homo sapiens; identical to SEQ ID NO: 7643
  chr1:4531276-4531307
  hypo

SEQ ID NO: 40774 - DNA, 31 bp, Homo sapiens; identical to SEQ ID NO: 7644
  chr1:6046170-6046201
  hypo

SEQ ID NO: 40775 - DNA, 2 bp, Homo sapiens
  chr1:6046210-6046212
  hypo
tt

SEQ ID NO: 40776 - DNA, 23 bp, Homo sapiens
  chr1:6046277-6046300
  hypo
aggctggcgcgctctctgtgggt

SEQ ID NO: 40777 - DNA, 37 bp, Homo sapiens; identical to SEQ ID NO: 34917
  chr1:6053655-6053692
  hypo

SEQ ID NO: 40778 - DNA, 31 bp, Homo sapiens; identical to SEQ ID NO: 7649
  chr1:6171997-6172028
  hypo

SEQ ID NO: 40779 - DNA, 31 bp, Homo sapiens; identical to SEQ ID NO: 7650
  chr1:6195513-6195544
  hypo

SEQ ID NO: 40780 - DNA, 2 bp, Homo sapiens
  chr1:6280242-6280244
  hypo
ca

SEQ ID NO: 40781 - DNA, 82 bp, Homo sapiens; identical to SEQ ID NO: 7653
  chr1:6313882-6313964
  hypo

SEQ ID NO: 40782 - DNA, 88 bp, Homo sapiens; identical to SEQ ID NO: 7654
  chr1:6313997-6314085
  hypo

SEQ ID NO: 40783 - DNA, 51 bp, Homo sapiens; identical to SEQ ID NO: 7655
  chr1:6334535-6334586
  hypo

SEQ ID NO: 40784 - DNA, 31 bp, Homo sapiens; identical to SEQ ID NO: 7656
  chr1:6334624-6334655
  hypo

SEQ ID NO: 40785 - DNA, 31 bp, Homo sapiens; identical to SEQ ID NO: 7657
  chr1:6334683-6334714
  hypo

SEQ ID NO: 40786 - DNA, 35 bp, Homo sapiens; identical to SEQ ID NO: 7658
  chr1:6363865-6363900
  hypo

SEQ ID NO: 40787 - DNA, 31 bp, Homo sapiens; identical to SEQ ID NO: 7659
  chr1:6379971-6380002
  hypo

SEQ ID NO: 40788 - DNA, 31 bp, Homo sapiens; identical to SEQ ID NO: 7660
  chr1:6397254-6397285
  hypo

SEQ ID NO: 40789 - DNA, 31 bp, Homo sapiens; identical to SEQ ID NO: 7661
  chr1:6397289-6397320
  hypo

SEQ ID NO: 40790 - DNA, 31 bp, Homo sapiens; identical to SEQ ID NO: 7662
  chr1:6409752-6409783
  hypo

SEQ ID NO: 40791 - DNA, 138 bp, Homo sapiens; identical to SEQ ID NO: 7663
  chr1:6409794-6409932
  hypo

SEQ ID NO: 40792 - DNA, 2 bp, Homo sapiens
  chr1:6446078-6446080
  hypo
cc

SEQ ID NO: 40793 - DNA, 31 bp, Homo sapiens; identical to SEQ ID NO: 7668
  chr1:6486767-6486798
  hypo

SEQ ID NO: 40794 - DNA, 57 bp, Homo sapiens; identical to SEQ ID NO: 7669
  chr1:6486825-6486882
  hypo

SEQ ID NO: 40795 - DNA, 31 bp, Homo sapiens; identical to SEQ ID NO: 7670
  chr1:6486919-6486950
  hypo

SEQ ID NO: 40796 - DNA, 31 bp, Homo sapiens; identical to SEQ ID NO: 7671
  chr1:6487014-6487045
  hypo

SEQ ID NO: 40797 - DNA, 50 bp, Homo sapiens; identical to SEQ ID NO: 7672
  chr1:6487046-6487096
  hypo

SEQ ID NO: 40798 - DNA, 56 bp, Homo sapiens; identical to SEQ ID NO: 7673
  chr1:6504648-6504704
  hypo

SEQ ID NO: 40799 - DNA, 43 bp, Homo sapiens; identical to SEQ ID NO: 7675
  chr1:6527867-6527910
  hypo

SEQ ID NO: 40800 - DNA, 31 bp, Homo sapiens; identical to SEQ ID NO: 7676
  chr1:6528354-6528385
  hypo

SEQ ID NO: 40801 - DNA, 68 bp, Homo sapiens; identical to SEQ ID NO: 7677
  chr1:6528421-6528489
  hypo

SEQ ID NO: 40802 - DNA, 31 bp, Homo sapiens; identical to SEQ ID NO: 7678
  chr1:6528938-6528969
  hypo

SEQ ID NO: 40803 - DNA, 31 bp, Homo sapiens; identical to SEQ ID NO: 7679
  chr1:6540612-6540643
  hypo

SEQ ID NO: 40804 - DNA, 31 bp, Homo sapiens; identical to SEQ ID NO: 7680
  chr1:6547667-6547698
  hypo

SEQ ID NO: 40805 - DNA, 76 bp, Homo sapiens; identical to SEQ ID NO: 7681
  chr1:6562948-6563024
  hypo

SEQ ID NO: 40806 - DNA, 31 bp, Homo sapiens; identical to SEQ ID NO: 7682
  chr1:6563078-6563109
  hypo

SEQ ID NO: 40807 - DNA, 31 bp, Homo sapiens; identical to SEQ ID NO: 7683
  chr1:6565118-6565149
  hypo

SEQ ID NO: 40808 - DNA, 31 bp, Homo sapiens; identical to SEQ ID NO: 7684
  chr1:6565160-6565191
  hypo

SEQ ID NO: 40809 - DNA, 31 bp, Homo sapiens; identical to SEQ ID NO: 7685
  chr1:6569032-6569063
  hypo

SEQ ID NO: 40810 - DNA, 31 bp, Homo sapiens; identical to SEQ ID NO: 7686
  chr1:6572210-6572241
  hypo

SEQ ID NO: 40811 - DNA, 31 bp, Homo sapiens; identical to SEQ ID NO: 7688
  chr1:6672154-6672185
  hypo

SEQ ID NO: 40812 - DNA, 31 bp, Homo sapiens; identical to SEQ ID NO: 7690
  chr1:6845865-6845896
  hypo

SEQ ID NO: 40813 - DNA, 31 bp, Homo sapiens; identical to SEQ ID NO: 7692
  chr1:7182591-7182622
  hypo

SEQ ID NO: 40814 - DNA, 46 bp, Homo sapiens; identical to SEQ ID NO: 7693
  chr1:7407199-7407245
  hypo

SEQ ID NO: 40815 - DNA, 31 bp, Homo sapiens; identical to SEQ ID NO: 7694
  chr1:7434891-7434922
  hypo

SEQ ID NO: 40816 - DNA, 51 bp, Homo sapiens; identical to SEQ ID NO: 7695
  chr1:7723193-7723244
  hypo

SEQ ID NO: 40817 - DNA, 31 bp, Homo sapiens; identical to SEQ ID NO: 7696
  chr1:7742817-7742848
  hypo

SEQ ID NO: 40818 - DNA, 124 bp, Homo sapiens; identical to SEQ ID NO: 47
  chr1:7843508-7843632
  hypo

SEQ ID NO: 40819 - DNA, 41 bp, Homo sapiens; identical to SEQ ID NO: 48
  chr1:7843652-7843693
  hypo

SEQ ID NO: 40820 - DNA, 189 bp, Homo sapiens; identical to SEQ ID NO: 49
  chr1:7844212-7844401
  hypo

SEQ ID NO: 40821 - DNA, 31 bp, Homo sapiens; identical to SEQ ID NO: 7700
  chr1:7926860-7926891
  hypo

SEQ ID NO: 40822 - DNA, 38 bp, Homo sapiens; identical to SEQ ID NO: 34926
  chr1:8086055-8086093
  hypo

SEQ ID NO: 40823 - DNA, 31 bp, Homo sapiens; identical to SEQ ID NO: 7704
  chr1:8135328-8135359
  hypo

SEQ ID NO: 40824 - DNA, 31 bp, Homo sapiens; identical to SEQ ID NO: 7707
  chr1:8149019-8149050
  hypo

SEQ ID NO: 40825 - DNA, 31 bp, Homo sapiens; identical to SEQ ID NO: 7708
  chr1:8204554-8204585
  hypo

SEQ ID NO: 40826 - DNA, 43 bp, Homo sapiens; identical to SEQ ID NO: 7709
  chr1:8385722-8385765
  hypo

SEQ ID NO: 40827 - DNA, 31 bp, Homo sapiens; identical to SEQ ID NO: 7710
  chr1:8389321-8389352
  hypo

SEQ ID NO: 40828 - DNA, 31 bp, Homo sapiens; identical to SEQ ID NO: 7711
  chr1:8390773-8390804
  hypo

SEQ ID NO: 40829 - DNA, 43 bp, Homo sapiens; identical to SEQ ID NO: 7712
  chr1:8437574-8437617
  hypo

SEQ ID NO: 40830 - DNA, 31 bp, Homo sapiens; identical to SEQ ID NO: 7713
  chr1:8781259-8781290
  hypo

SEQ ID NO: 40831 - DNA, 31 bp, Homo sapiens; identical to SEQ ID NO: 7714
  chr1:8781321-8781352
  hypo

SEQ ID NO: 40832 - DNA, 33 bp, Homo sapiens; identical to SEQ ID NO: 7715
  chr1:8997091-8997124
  hypo

SEQ ID NO: 40833 - DNA, 31 bp, Homo sapiens; identical to SEQ ID NO: 7717
  chr1:9049402-9049433
  hypo

SEQ ID NO: 40834 - DNA, 31 bp, Homo sapiens; identical to SEQ ID NO: 7718
  chr1:9064759-9064790
  hypo

SEQ ID NO: 40835 - DNA, 31 bp, Homo sapiens; identical to SEQ ID NO: 7719
  chr1:9073881-9073912
  hypo

SEQ ID NO: 40836 - DNA, 31 bp, Homo sapiens; identical to SEQ ID NO: 7720
  chr1:9075351-9075382
  hypo

SEQ ID NO: 40837 - DNA, 44 bp, Homo sapiens; identical to SEQ ID NO: 7721
  chr1:9084937-9084981
  hypo

SEQ ID NO: 40838 - DNA, 31 bp, Homo sapiens; identical to SEQ ID NO: 7722
  chr1:9084988-9085019
  hypo

SEQ ID NO: 40839 - DNA, 31 bp, Homo sapiens; identical to SEQ ID NO: 7723
  chr1:9097916-9097947
  hypo

SEQ ID NO: 40840 - DNA, 58 bp, Homo sapiens; identical to SEQ ID NO: 7724
  chr1:9165434-9165492
  hypo

SEQ ID NO: 40841 - DNA, 31 bp, Homo sapiens; identical to SEQ ID NO: 7725
  chr1:9165500-9165531
  hypo

SEQ ID NO: 40842 - DNA, 112 bp, Homo sapiens; identical to SEQ ID NO: 7726
  chr1:9165546-9165658
  hypo

SEQ ID NO: 40843 - DNA, 201 bp, Homo sapiens; identical to SEQ ID NO: 59
  chr1:9189021-9189222
  hypo

SEQ ID NO: 40844 - DNA, 53 bp, Homo sapiens; identical to SEQ ID NO: 7729
  chr1:9205247-9205300
  hypo

SEQ ID NO: 40845 - DNA, 31 bp, Homo sapiens; identical to SEQ ID NO: 7730
  chr1:9265243-9265274
  hypo

SEQ ID NO: 40846 - DNA, 34 bp, Homo sapiens; identical to SEQ ID NO: 7731
  chr1:9324893-9324927
  hypo

SEQ ID NO: 40847 - DNA, 49 bp, Homo sapiens; identical to SEQ ID NO: 7732
  chr1:9332432-9332481
  hypo

SEQ ID NO: 40848 - DNA, 31 bp, Homo sapiens; identical to SEQ ID NO: 60
  chr1:9352659-9352690
  hypo

SEQ ID NO: 40849 - DNA, 190 bp, Homo sapiens; identical to SEQ ID NO: 61
  chr1:9352964-9353154
  hypo

SEQ ID NO: 40850 - DNA, 48 bp, Homo sapiens; identical to SEQ ID NO: 62
  chr1:9353808-9353856
  hypo

SEQ ID NO: 40851 - DNA, 31 bp, Homo sapiens; identical to SEQ ID NO: 7736
  chr1:9361975-9362006
  hypo

SEQ ID NO: 40852 - DNA, 38 bp, Homo sapiens; identical to SEQ ID NO: 7737
  chr1:9362047-9362085
  hypo

SEQ ID NO: 40853 - DNA, 40 bp, Homo sapiens; identical to SEQ ID NO: 7738
  chr1:9362130-9362170
  hypo

SEQ ID NO: 40854 - DNA, 31 bp, Homo sapiens; identical to SEQ ID NO: 7739
  chr1:9365883-9365914
  hypo

SEQ ID NO: 40855 - DNA, 31 bp, Homo sapiens; identical to SEQ ID NO: 7740
  chr1:9420031-9420062
  hypo

SEQ ID NO: 40856 - DNA, 31 bp, Homo sapiens; identical to SEQ ID NO: 7741
  chr1:9420429-9420460
  hypo

SEQ ID NO: 40857 - DNA, 31 bp, Homo sapiens; identical to SEQ ID NO: 7742
  chr1:9420475-9420506
  hypo

SEQ ID NO: 40858 - DNA, 149 bp, Homo sapiens; identical to SEQ ID NO: 7743
  chr1:9420533-9420682
  hypo

SEQ ID NO: 40859 - DNA, 31 bp, Homo sapiens; identical to SEQ ID NO: 7744
  chr1:9426088-9426119
  hypo

SEQ ID NO: 40860 - DNA, 31 bp, Homo sapiens; identical to SEQ ID NO: 7745
  chr1:9447365-9447396
  hypo

SEQ ID NO: 40861 - DNA, 106 bp, Homo sapiens; identical to SEQ ID NO: 63
  chr1:9489049-9489155
  hypo

SEQ ID NO: 40862 - DNA, 54 bp, Homo sapiens; identical to SEQ ID NO: 64
  chr1:9489161-9489215
  hypo

SEQ ID NO: 40863 - DNA, 39 bp, Homo sapiens; identical to SEQ ID NO: 7749
  chr1:9539492-9539531
  hypo

SEQ ID NO: 40864 - DNA, 38 bp, Homo sapiens; identical to SEQ ID NO: 7750
  chr1:9549416-9549454
  hypo

SEQ ID NO: 40865 - DNA, 162 bp, Homo sapiens; identical to SEQ ID NO: 34938
  chr1:9711913-9712075
  hypo

SEQ ID NO: 40866 - DNA, 31 bp, Homo sapiens; identical to SEQ ID NO: 7755
  chr1:9781133-9781164
  hypo

SEQ ID NO: 40867 - DNA, 31 bp, Homo sapiens; identical to SEQ ID NO: 7756
  chr1:9785103-9785134
  hypo

SEQ ID NO: 40868 - DNA, 31 bp, Homo sapiens; identical to SEQ ID NO: 7758
  chr1:9892079-9892110
  hypo

SEQ ID NO: 40869 - DNA, 44 bp, Homo sapiens; identical to SEQ ID NO: 7759
  chr1:9938565-9938609
  hypo

SEQ ID NO: 40870 - DNA, 31 bp, Homo sapiens; identical to SEQ ID NO: 7760
  chr1:10068866-10068897
  hypo

SEQ ID NO: 40871 - DNA, 37 bp, Homo sapiens; identical to SEQ ID NO: 7761
  chr1:10091843-10091880
  hypo

SEQ ID NO: 40872 - DNA, 2 bp, Homo sapiens
  chr1:10091887-10091889
  hypo
gt

SEQ ID NO: 40873 - DNA, 4 bp, Homo sapiens
  chr1:10091914-10091918
  hypo
gatt

SEQ ID NO: 40874 - DNA, 2 bp, Homo sapiens
  chr1:10166520-10166522
  hypo
gc

SEQ ID NO: 40875 - DNA, 31 bp, Homo sapiens; identical to SEQ ID NO: 72
  chr1:10271340-10271371
  hypo

SEQ ID NO: 40876 - DNA, 34 bp, Homo sapiens; identical to SEQ ID NO: 7770
  chr1:10706943-10706977
  hypo

SEQ ID NO: 40877 - DNA, 31 bp, Homo sapiens; identical to SEQ ID NO: 7771
  chr1:10707635-10707666
  hypo

SEQ ID NO: 40878 - DNA, 104 bp, Homo sapiens; identical to SEQ ID NO: 7772
  chr1:10707863-10707967
  hypo

SEQ ID NO: 40879 - DNA, 73 bp, Homo sapiens; identical to SEQ ID NO: 7773
  chr1:10707986-10708059
  hypo

SEQ ID NO: 40880 - DNA, 44 bp, Homo sapiens; identical to SEQ ID NO: 7774
  chr1:10708358-10708402
  hypo

SEQ ID NO: 40881 - DNA, 31 bp, Homo sapiens; identical to SEQ ID NO: 7775
  chr1:10708426-10708457
  hypo

SEQ ID NO: 40882 - DNA, 43 bp, Homo sapiens; identical to SEQ ID NO: 7776
  chr1:10713571-10713614
  hypo

SEQ ID NO: 40883 - DNA, 36 bp, Homo sapiens; identical to SEQ ID NO: 7777
  chr1:10713622-10713658
  hypo

SEQ ID NO: 40884 - DNA, 126 bp, Homo sapiens; identical to SEQ ID NO: 7778
  chr1:10714452-10714578
  hypo

SEQ ID NO: 40885 - DNA, 106 bp, Homo sapiens; identical to SEQ ID NO: 7779
  chr1:10716606-10716712
  hypo

SEQ ID NO: 40886 - DNA, 31 bp, Homo sapiens; identical to SEQ ID NO: 7780
  chr1:10716725-10716756
  hypo

SEQ ID NO: 40887 - DNA, 31 bp, Homo sapiens; identical to SEQ ID NO: 7781
  chr1:10718958-10718989
  hypo

SEQ ID NO: 40888 - DNA, 31 bp, Homo sapiens; identical to SEQ ID NO: 7782
  chr1:10719284-10719315
  hypo

SEQ ID NO: 40889 - DNA, 31 bp, Homo sapiens; identical to SEQ ID NO: 7783
  chr1:10719382-10719413
  hypo

SEQ ID NO: 40890 - DNA, 47 bp, Homo sapiens; identical to SEQ ID NO: 7784
  chr1:10725221-10725268
  hypo

SEQ ID NO: 40891 - DNA, 31 bp, Homo sapiens; identical to SEQ ID NO: 7785
  chr1:10725477-10725508
  hypo

SEQ ID NO: 40892 - DNA, 76 bp, Homo sapiens; identical to SEQ ID NO: 7786
  chr1:10725509-10725585
  hypo

SEQ ID NO: 40893 - DNA, 73 bp, Homo sapiens; identical to SEQ ID NO: 7787
  chr1:10729046-10729119
  hypo

SEQ ID NO: 40894 - DNA, 97 bp, Homo sapiens; identical to SEQ ID NO: 7788
  chr1:10729133-10729230
  hypo

SEQ ID NO: 40895 - DNA, 31 bp, Homo sapiens; identical to SEQ ID NO: 7789
  chr1:10765348-10765379
  hypo

SEQ ID NO: 40896 - DNA, 31 bp, Homo sapiens; identical to SEQ ID NO: 7790
  chr1:10765534-10765565
  hypo

SEQ ID NO: 40897 - DNA, 30 bp, Homo sapiens; identical to SEQ ID NO: 7791
  chr1:10770896-10770926
  hypo

SEQ ID NO: 40898 - DNA, 51 bp, Homo sapiens; identical to SEQ ID NO: 7792
  chr1:10775891-10775942
  hypo

SEQ ID NO: 40899 - DNA, 31 bp, Homo sapiens; identical to SEQ ID NO: 7794
  chr1:10779503-10779534
  hypo

SEQ ID NO: 40900 - DNA, 51 bp, Homo sapiens; identical to SEQ ID NO: 7795
  chr1:10779555-10779606
  hypo

SEQ ID NO: 40901 - DNA, 37 bp, Homo sapiens; identical to SEQ ID NO: 7796
  chr1:10780356-10780393
  hypo

SEQ ID NO: 40902 - DNA, 31 bp, Homo sapiens; identical to SEQ ID NO: 7797
  chr1:10780402-10780433
  hypo

SEQ ID NO: 40903 - DNA, 31 bp, Homo sapiens; identical to SEQ ID NO: 7798
  chr1:10807496-10807527
  hypo

SEQ ID NO: 40904 - DNA, 31 bp, Homo sapiens; identical to SEQ ID NO: 7799
  chr1:10810300-10810331
  hypo

SEQ ID NO: 40905 - DNA, 34 bp, Homo sapiens; identical to SEQ ID NO: 7801
  chr1:10815560-10815594
  hypo

SEQ ID NO: 40906 - DNA, 40 bp, Homo sapiens; identical to SEQ ID NO: 7802
  chr1:10815635-10815675
  hypo

SEQ ID NO: 40907 - DNA, 77 bp, Homo sapiens; identical to SEQ ID NO: 7803
  chr1:10823335-10823412
  hypo

SEQ ID NO: 40908 - DNA, 56 bp, Homo sapiens; identical to SEQ ID NO: 7804
  chr1:10823429-10823485
  hypo

SEQ ID NO: 40909 - DNA, 50 bp, Homo sapiens; identical to SEQ ID NO: 7805
  chr1:10823490-10823540
  hypo

SEQ ID NO: 40910 - DNA, 1 bp, Homo sapiens
  chr1:10838656-10838657
  hypo
t

SEQ ID NO: 40911 - DNA, 31 bp, Homo sapiens; identical to SEQ ID NO: 7810
  chr1:10839639-10839670
  hypo

SEQ ID NO: 40912 - DNA, 167 bp, Homo sapiens; identical to SEQ ID NO: 82
  chr1:10854805-10854972
  hypo

SEQ ID NO: 40913 - DNA, 59 bp, Homo sapiens; identical to SEQ ID NO: 83
  chr1:10854994-10855053
  hypo

SEQ ID NO: 40914 - DNA, 34 bp, Homo sapiens; identical to SEQ ID NO: 84
  chr1:10855103-10855137
  hypo

SEQ ID NO: 40915 - DNA, 261 bp, Homo sapiens; identical to SEQ ID NO: 85
  chr1:10855138-10855399
  hypo

SEQ ID NO: 40916 - DNA, 206 bp, Homo sapiens; identical to SEQ ID NO: 86
  chr1:10855536-10855742
  hypo

SEQ ID NO: 40917 - DNA, 69 bp, Homo sapiens; identical to SEQ ID NO: 89
  chr1:10856314-10856383
  hypo

SEQ ID NO: 40918 - DNA, 56 bp, Homo sapiens; identical to SEQ ID NO: 90
  chr1:10856465-10856521
  hypo

SEQ ID NO: 40919 - DNA, 97 bp, Homo sapiens; identical to SEQ ID NO: 91
  chr1:10856550-10856647
  hypo

SEQ ID NO: 40920 - DNA, 145 bp, Homo sapiens; identical to SEQ ID NO: 92
  chr1:10856713-10856858
  hypo

SEQ ID NO: 40921 - DNA, 31 bp, Homo sapiens; identical to SEQ ID NO: 93
  chr1:10856861-10856892
  hypo

SEQ ID NO: 40922 - DNA, 31 bp, Homo sapiens; identical to SEQ ID NO: 7821
  chr1:11046049-11046080
  hypo

SEQ ID NO: 40923 - DNA, 53 bp, Homo sapiens
  chr1:11139801-11139854
  hypo
aaaaggtgcatttcgttgatctgctgccgcacaaggggcggtactgggttgca

SEQ ID NO: 40924 - DNA, 40 bp, Homo sapiens; identical to SEQ ID NO: 7825
  chr1:11323836-11323876
  hypo

SEQ ID NO: 40925 - DNA, 39 bp, Homo sapiens; identical to SEQ ID NO: 7826
  chr1:11809702-11809741
  hypo

SEQ ID NO: 40926 - DNA, 31 bp, Homo sapiens; identical to SEQ ID NO: 7827
  chr1:11809745-11809776
  hypo

SEQ ID NO: 40927 - DNA, 31 bp, Homo sapiens; identical to SEQ ID NO: 7828
  chr1:11810251-11810282
  hypo

SEQ ID NO: 40928 - DNA, 31 bp, Homo sapiens; identical to SEQ ID NO: 7829
  chr1:11848613-11848644
  hypo

SEQ ID NO: 40929 - DNA, 31 bp, Homo sapiens; identical to SEQ ID NO: 7830
  chr1:11856197-11856228
  hypo

SEQ ID NO: 40930 - DNA, 31 bp, Homo sapiens; identical to SEQ ID NO: 7831
  chr1:11856263-11856294
  hypo

SEQ ID NO: 40931 - DNA, 31 bp, Homo sapiens; identical to SEQ ID NO: 7832
  chr1:12041769-12041800
  hypo

SEQ ID NO: 40932 - DNA, 31 bp, Homo sapiens; identical to SEQ ID NO: 7833
  chr1:12089141-12089172
  hypo

SEQ ID NO: 40933 - DNA, 34 bp, Homo sapiens; identical to SEQ ID NO: 7839
  chr1:12183827-12183861
  hypo

SEQ ID NO: 40934 - DNA, 43 bp, Homo sapiens; identical to SEQ ID NO: 7840
  chr1:12188608-12188651
  hypo

SEQ ID NO: 40935 - DNA, 53 bp, Homo sapiens; identical to SEQ ID NO: 7841
  chr1:12194138-12194191
  hypo

SEQ ID NO: 40936 - DNA, 47 bp, Homo sapiens; identical to SEQ ID NO: 7842
  chr1:12194266-12194313
  hypo

SEQ ID NO: 40937 - DNA, 31 bp, Homo sapiens; identical to SEQ ID NO: 7843
  chr1:12202224-12202255
  hypo

SEQ ID NO: 40938 - DNA, 31 bp, Homo sapiens; identical to SEQ ID NO: 7844
  chr1:12215980-12216011
  hypo

SEQ ID NO: 40939 - DNA, 31 bp, Homo sapiens; identical to SEQ ID NO: 100
  chr1:12227483-12227514
  hypo

SEQ ID NO: 40940 - DNA, 39 bp, Homo sapiens; identical to SEQ ID NO: 7846
  chr1:12241726-12241765
  hypo

SEQ ID NO: 40941 - DNA, 31 bp, Homo sapiens; identical to SEQ ID NO: 7847
  chr1:12259772-12259803
  hypo

SEQ ID NO: 40942 - DNA, 31 bp, Homo sapiens; identical to SEQ ID NO: 7848
  chr1:12260659-12260690
  hypo

SEQ ID NO: 40943 - DNA, 31 bp, Homo sapiens; identical to SEQ ID NO: 7850
  chr1:12267969-12268000
  hypo

SEQ ID NO: 40944 - DNA, 31 bp, Homo sapiens; identical to SEQ ID NO: 7851
  chr1:12285909-12285940
  hypo

SEQ ID NO: 40945 - DNA, 31 bp, Homo sapiens; identical to SEQ ID NO: 7853
  chr1:12333007-12333038
  hypo

SEQ ID NO: 40946 - DNA, 31 bp, Homo sapiens; identical to SEQ ID NO: 7854
  chr1:12607961-12607992
  hypo

SEQ ID NO: 40947 - DNA, 121 bp, Homo sapiens; identical to SEQ ID NO: 7855
  chr1:12608006-12608127
  hypo

SEQ ID NO: 40948 - DNA, 31 bp, Homo sapiens; identical to SEQ ID NO: 7856
  chr1:12628465-12628496
  hypo

SEQ ID NO: 40949 - DNA, 50 bp, Homo sapiens; identical to SEQ ID NO: 7857
  chr1:12628499-12628549
  hypo

SEQ ID NO: 40950 - DNA, 31 bp, Homo sapiens; identical to SEQ ID NO: 7858
  chr1:12629958-12629989
  hypo

SEQ ID NO: 40951 - DNA, 31 bp, Homo sapiens; identical to SEQ ID NO: 7859
  chr1:12630383-12630414
  hypo

SEQ ID NO: 40952 - DNA, 31 bp, Homo sapiens; identical to SEQ ID NO: 7860
  chr1:12632581-12632612
  hypo

SEQ ID NO: 40953 - DNA, 31 bp, Homo sapiens; identical to SEQ ID NO: 7861
  chr1:12635041-12635072
  hypo

SEQ ID NO: 40954 - DNA, 31 bp, Homo sapiens; identical to SEQ ID NO: 7862
  chr1:12639826-12639857
  hypo

SEQ ID NO: 40955 - DNA, 53 bp, Homo sapiens; identical to SEQ ID NO: 7863
  chr1:12663578-12663631
  hypo

SEQ ID NO: 40956 - DNA, 45 bp, Homo sapiens; identical to SEQ ID NO: 7864
  chr1:12663642-12663687
  hypo

SEQ ID NO: 40957 - DNA, 52 bp, Homo sapiens; identical to SEQ ID NO: 7865
  chr1:12663700-12663752
  hypo

SEQ ID NO: 40958 - DNA, 74 bp, Homo sapiens; identical to SEQ ID NO: 7866
  chr1:12711250-12711324
  hypo

SEQ ID NO: 40959 - DNA, 31 bp, Homo sapiens; identical to SEQ ID NO: 7867
  chr1:12711411-12711442
  hypo

SEQ ID NO: 40960 - DNA, 31 bp, Homo sapiens; identical to SEQ ID NO: 7873
  chr1:14125476-14125507
  hypo

SEQ ID NO: 40961 - DNA, 2 bp, Homo sapiens
  chr1:14125567-14125569
  hypo
ca

SEQ ID NO: 40962 - DNA, 87 bp, Homo sapiens; identical to SEQ ID NO: 7878
  chr1:15129597-15129684
  hypo

SEQ ID NO: 40963 - DNA, 49 bp, Homo sapiens; identical to SEQ ID NO: 7879
  chr1:15129759-15129808
  hypo

SEQ ID NO: 40964 - DNA, 51 bp, Homo sapiens; identical to SEQ ID NO: 7880
  chr1:15151514-15151565
  hypo

SEQ ID NO: 40965 - DNA, 31 bp, Homo sapiens; identical to SEQ ID NO: 7881
  chr1:15151604-15151635
  hypo

SEQ ID NO: 40966 - DNA, 31 bp, Homo sapiens; identical to SEQ ID NO: 7882
  chr1:15151671-15151702
  hypo

SEQ ID NO: 40967 - DNA, 31 bp, Homo sapiens; identical to SEQ ID NO: 7883
  chr1:15372344-15372375
  hypo

SEQ ID NO: 40968 - DNA, 31 bp, Homo sapiens; identical to SEQ ID NO: 7884
  chr1:15375327-15375358
  hypo

SEQ ID NO: 40969 - DNA, 31 bp, Homo sapiens; identical to SEQ ID NO: 7885
  chr1:15395208-15395239
  hypo

SEQ ID NO: 40970 - DNA, 31 bp, Homo sapiens; identical to SEQ ID NO: 7886
  chr1:15403423-15403454
  hypo

SEQ ID NO: 40971 - DNA, 31 bp, Homo sapiens; identical to SEQ ID NO: 7887
  chr1:15421285-15421316
  hypo

SEQ ID NO: 40972 - DNA, 31 bp, Homo sapiens; identical to SEQ ID NO: 7888
  chr1:15488500-15488531
  hypo

SEQ ID NO: 40973 - DNA, 31 bp, Homo sapiens; identical to SEQ ID NO: 7889
  chr1:15721403-15721434
  hypo

SEQ ID NO: 40974 - DNA, 31 bp, Homo sapiens; identical to SEQ ID NO: 7890
  chr1:15771334-15771365
  hypo

SEQ ID NO: 40975 - DNA, 31 bp, Homo sapiens; identical to SEQ ID NO: 7891
  chr1:15885333-15885364
  hypo

SEQ ID NO: 40976 - DNA, 31 bp, Homo sapiens; identical to SEQ ID NO: 7892
  chr1:15885389-15885420
  hypo

SEQ ID NO: 40977 - DNA, 43 bp, Homo sapiens; identical to SEQ ID NO: 7893
  chr1:15892451-15892494
  hypo

SEQ ID NO: 40978 - DNA, 31 bp, Homo sapiens; identical to SEQ ID NO: 7894
  chr1:15892498-15892529
  hypo

SEQ ID NO: 40979 - DNA, 47 bp, Homo sapiens; identical to SEQ ID NO: 7895
  chr1:15892560-15892607
  hypo

SEQ ID NO: 40980 - DNA, 2 bp, Homo sapiens
  chr1:15928988-15928990
  hypo
at

SEQ ID NO: 40981 - DNA, 31 bp, Homo sapiens; identical to SEQ ID NO: 7897
  chr1:16077928-16077959
  hypo

SEQ ID NO: 40982 - DNA, 59 bp, Homo sapiens; identical to SEQ ID NO: 7898
  chr1:16092325-16092384
  hypo

SEQ ID NO: 40983 - DNA, 31 bp, Homo sapiens; identical to SEQ ID NO: 7899
  chr1:16092419-16092450
  hypo

SEQ ID NO: 40984 - DNA, 31 bp, Homo sapiens; identical to SEQ ID NO: 7900
  chr1:16098311-16098342
  hypo

SEQ ID NO: 40985 - DNA, 59 bp, Homo sapiens; identical to SEQ ID NO: 7901
  chr1:16101035-16101094
  hypo

SEQ ID NO: 40986 - DNA, 43 bp, Homo sapiens; identical to SEQ ID NO: 7902
  chr1:16101113-16101156
  hypo

SEQ ID NO: 40987 - DNA, 31 bp, Homo sapiens; identical to SEQ ID NO: 7903
  chr1:16109724-16109755
  hypo

SEQ ID NO: 40988 - DNA, 35 bp, Homo sapiens; identical to SEQ ID NO: 7904
  chr1:16138130-16138165
  hypo

SEQ ID NO: 40989 - DNA, 31 bp, Homo sapiens; identical to SEQ ID NO: 7906
  chr1:16273063-16273094
  hypo

SEQ ID NO: 40990 - DNA, 31 bp, Homo sapiens; identical to SEQ ID NO: 7907
  chr1:16273686-16273717
  hypo

SEQ ID NO: 40991 - DNA, 31 bp, Homo sapiens; identical to SEQ ID NO: 7908
  chr1:16273724-16273755
  hypo

SEQ ID NO: 40992 - DNA, 31 bp, Homo sapiens; identical to SEQ ID NO: 7909
  chr1:16274994-16275025
  hypo

SEQ ID NO: 40993 - DNA, 31 bp, Homo sapiens; identical to SEQ ID NO: 7910
  chr1:16283815-16283846
  hypo

SEQ ID NO: 40994 - DNA, 31 bp, Homo sapiens; identical to SEQ ID NO: 7911
  chr1:16320505-16320536
  hypo

SEQ ID NO: 40995 - DNA, 31 bp, Homo sapiens; identical to SEQ ID NO: 7912
  chr1:16363231-16363262
  hypo

SEQ ID NO: 40996 - DNA, 67 bp, Homo sapiens; identical to SEQ ID NO: 7913
  chr1:16457639-16457706
  hypo

SEQ ID NO: 40997 - DNA, 41 bp, Homo sapiens; identical to SEQ ID NO: 7914
  chr1:16457747-16457788
  hypo

SEQ ID NO: 40998 - DNA, 31 bp, Homo sapiens; identical to SEQ ID NO: 7915
  chr1:16458420-16458451
  hypo

SEQ ID NO: 40999 - DNA, 57 bp, Homo sapiens; identical to SEQ ID NO: 7916
  chr1:16458831-16458888
  hypo

SEQ ID NO: 41000 - DNA, 31 bp, Homo sapiens; identical to SEQ ID NO: 7917
  chr1:16461544-16461575
  hypo

SEQ ID NO: 41001 - DNA, 31 bp, Homo sapiens; identical to SEQ ID NO: 7918
  chr1:16464268-16464299
  hypo

SEQ ID NO: 41002 - DNA, 71 bp, Homo sapiens; identical to SEQ ID NO: 7919
  chr1:16464369-16464440
  hypo

SEQ ID NO: 41003 - DNA, 31 bp, Homo sapiens; identical to SEQ ID NO: 7920
  chr1:16464442-16464473
  hypo

SEQ ID NO: 41004 - DNA, 90 bp, Homo sapiens; identical to SEQ ID NO: 7921
  chr1:16464485-16464575
  hypo

SEQ ID NO: 41005 - DNA, 66 bp, Homo sapiens; identical to SEQ ID NO: 7922
  chr1:16464596-16464662
  hypo

SEQ ID NO: 41006 - DNA, 31 bp, Homo sapiens; identical to SEQ ID NO: 7923
  chr1:16466962-16466993
  hypo

SEQ ID NO: 41007 - DNA, 229 bp, Homo sapiens; identical to SEQ ID NO: 125
  chr1:16482017-16482246
  hypo

SEQ ID NO: 41008 - DNA, 94 bp, Homo sapiens; identical to SEQ ID NO: 126
  chr1:16482252-16482346
  hypo

SEQ ID NO: 41009 - DNA, 86 bp, Homo sapiens; identical to SEQ ID NO: 127
  chr1:16482709-16482795
  hypo

SEQ ID NO: 41010 - DNA, 31 bp, Homo sapiens; identical to SEQ ID NO: 7927
  chr1:16534427-16534458
  hypo

SEQ ID NO: 41011 - DNA, 31 bp, Homo sapiens; identical to SEQ ID NO: 7930
  chr1:16724423-16724454
  hypo

SEQ ID NO: 41012 - DNA, 31 bp, Homo sapiens; identical to SEQ ID NO: 7931
  chr1:16817289-16817320
  hypo

SEQ ID NO: 41013 - DNA, 31 bp, Homo sapiens; identical to SEQ ID NO: 7932
  chr1:16929974-16930005
  hypo

SEQ ID NO: 41014 - DNA, 45 bp, Homo sapiens; identical to SEQ ID NO: 7933
  chr1:17270868-17270913
  hypo

SEQ ID NO: 41015 - DNA, 61 bp, Homo sapiens; identical to SEQ ID NO: 7934
  chr1:17280803-17280864
  hypo

SEQ ID NO: 41016 - DNA, 36 bp, Homo sapiens; identical to SEQ ID NO: 7935
  chr1:17280906-17280942
  hypo

SEQ ID NO: 41017 - DNA, 31 bp, Homo sapiens; identical to SEQ ID NO: 7936
  chr1:17316303-17316334
  hypo

SEQ ID NO: 41018 - DNA, 31 bp, Homo sapiens; identical to SEQ ID NO: 7938
  chr1:17546141-17546172
  hypo

SEQ ID NO: 41019 - DNA, 56 bp, Homo sapiens; identical to SEQ ID NO: 7939
  chr1:17702233-17702289
  hypo

SEQ ID NO: 41020 - DNA, 31 bp, Homo sapiens; identical to SEQ ID NO: 7940
  chr1:17702299-17702330
  hypo

SEQ ID NO: 41021 - DNA, 44 bp, Homo sapiens; identical to SEQ ID NO: 7941
  chr1:17702390-17702434
  hypo

SEQ ID NO: 41022 - DNA, 60 bp, Homo sapiens; identical to SEQ ID NO: 7942
  chr1:17738622-17738682
  hypo

SEQ ID NO: 41023 - DNA, 31 bp, Homo sapiens; identical to SEQ ID NO: 7943
  chr1:17738727-17738758
  hypo

SEQ ID NO: 41024 - DNA, 31 bp, Homo sapiens; identical to SEQ ID NO: 7944
  chr1:17738776-17738807
  hypo

SEQ ID NO: 41025 - DNA, 58 bp, Homo sapiens; identical to SEQ ID NO: 7945
  chr1:17813198-17813256
  hypo

SEQ ID NO: 41026 - DNA, 31 bp, Homo sapiens; identical to SEQ ID NO: 7946
  chr1:17813377-17813408
  hypo

SEQ ID NO: 41027 - DNA, 31 bp, Homo sapiens; identical to SEQ ID NO: 7947
  chr1:17813416-17813447
  hypo

SEQ ID NO: 41028 - DNA, 31 bp, Homo sapiens; identical to SEQ ID NO: 7948
  chr1:17813455-17813486
  hypo

SEQ ID NO: 41029 - DNA, 31 bp, Homo sapiens; identical to SEQ ID NO: 7949
  chr1:17813509-17813540
  hypo

SEQ ID NO: 41030 - DNA, 31 bp, Homo sapiens; identical to SEQ ID NO: 7950
  chr1:17813549-17813580
  hypo

SEQ ID NO: 41031 - DNA, 31 bp, Homo sapiens; identical to SEQ ID NO: 7951
  chr1:17813582-17813613
  hypo

SEQ ID NO: 41032 - DNA, 30 bp, Homo sapiens; identical to SEQ ID NO: 34984
  chr1:17865970-17866000
  hypo

SEQ ID NO: 41033 - DNA, 118 bp, Homo sapiens; identical to SEQ ID NO: 130
  chr1:17866005-17866123
  hypo

SEQ ID NO: 41034 - DNA, 31 bp, Homo sapiens; identical to SEQ ID NO: 7954
  chr1:17897918-17897949
  hypo

SEQ ID NO: 41035 - DNA, 31 bp, Homo sapiens; identical to SEQ ID NO: 7955
  chr1:17919149-17919180
  hypo

SEQ ID NO: 41036 - DNA, 31 bp, Homo sapiens; identical to SEQ ID NO: 7956
  chr1:17919332-17919363
  hypo

SEQ ID NO: 41037 - DNA, 31 bp, Homo sapiens; identical to SEQ ID NO: 7957
  chr1:17933062-17933093
  hypo

SEQ ID NO: 41038 - DNA, 52 bp, Homo sapiens; identical to SEQ ID NO: 7958
  chr1:17934560-17934612
  hypo

SEQ ID NO: 41039 - DNA, 31 bp, Homo sapiens; identical to SEQ ID NO: 7959
  chr1:17939405-17939436
  hypo

SEQ ID NO: 41040 - DNA, 43 bp, Homo sapiens; identical to SEQ ID NO: 7960
  chr1:17949468-17949511
  hypo

SEQ ID NO: 41041 - DNA, 31 bp, Homo sapiens; identical to SEQ ID NO: 7961
  chr1:17973810-17973841
  hypo

SEQ ID NO: 41042 - DNA, 31 bp, Homo sapiens; identical to SEQ ID NO: 7962
  chr1:17992215-17992246
  hypo

SEQ ID NO: 41043 - DNA, 36 bp, Homo sapiens; identical to SEQ ID NO: 7963
  chr1:17997212-17997248
  hypo

SEQ ID NO: 41044 - DNA, 55 bp, Homo sapiens; identical to SEQ ID NO: 7964
  chr1:18006380-18006435
  hypo

SEQ ID NO: 41045 - DNA, 31 bp, Homo sapiens; identical to SEQ ID NO: 7965
  chr1:18006612-18006643
  hypo

SEQ ID NO: 41046 - DNA, 57 bp, Homo sapiens; identical to SEQ ID NO: 7966
  chr1:18021387-18021444
  hypo

SEQ ID NO: 41047 - DNA, 267 bp, Homo sapiens; identical to SEQ ID NO: 7967
  chr1:18023465-18023732
  hypo

SEQ ID NO: 41048 - DNA, 102 bp, Homo sapiens; identical to SEQ ID NO: 7968
  chr1:18023744-18023846
  hypo

SEQ ID NO: 41049 - DNA, 31 bp, Homo sapiens; identical to SEQ ID NO: 7969
  chr1:19202745-19202776
  hypo

SEQ ID NO: 41050 - DNA, 31 bp, Homo sapiens; identical to SEQ ID NO: 7970
  chr1:19491253-19491284
  hypo

SEQ ID NO: 41051 - DNA, 31 bp, Homo sapiens; identical to SEQ ID NO: 7971
  chr1:19491455-19491486
  hypo

SEQ ID NO: 41052 - DNA, 115 bp, Homo sapiens; identical to SEQ ID NO: 136
  chr1:19639207-19639322
  hypo

SEQ ID NO: 41053 - DNA, 35 bp, Homo sapiens; identical to SEQ ID NO: 137
  chr1:19639477-19639512
  hypo

SEQ ID NO: 41054 - DNA, 31 bp, Homo sapiens; identical to SEQ ID NO: 7974
  chr1:19692344-19692375
  hypo

SEQ ID NO: 41055 - DNA, 1 bp, Homo sapiens
  chr1:19984081-19984082
  hypo
c

SEQ ID NO: 41056 - DNA, 1 bp, Homo sapiens
  chr1:19984406-19984407
  hypo
a

SEQ ID NO: 41057 - DNA, 1 bp, Homo sapiens
  chr1:19984767-19984768
  hypo
t

SEQ ID NO: 41058 - DNA, 72 bp, Homo sapiens; identical to SEQ ID NO: 7979
  chr1:20230246-20230318
  hypo

SEQ ID NO: 41059 - DNA, 90 bp, Homo sapiens; identical to SEQ ID NO: 7980
  chr1:20230356-20230446
  hypo

SEQ ID NO: 41060 - DNA, 35 bp, Homo sapiens; identical to SEQ ID NO: 7981
  chr1:20554749-20554784
  hypo

SEQ ID NO: 41061 - DNA, 31 bp, Homo sapiens; identical to SEQ ID NO: 7982
  chr1:20554845-20554876
  hypo

SEQ ID NO: 41062 - DNA, 31 bp, Homo sapiens; identical to SEQ ID NO: 7983
  chr1:20554882-20554913
  hypo

SEQ ID NO: 41063 - DNA, 31 bp, Homo sapiens; identical to SEQ ID NO: 7984
  chr1:20554918-20554949
  hypo

SEQ ID NO: 41064 - DNA, 35 bp, Homo sapiens; identical to SEQ ID NO: 7985
  chr1:20680359-20680394
  hypo

SEQ ID NO: 41065 - DNA, 31 bp, Homo sapiens; identical to SEQ ID NO: 7986
  chr1:20802147-20802178
  hypo

SEQ ID NO: 41066 - DNA, 37 bp, Homo sapiens; identical to SEQ ID NO: 145
  chr1:20812695-20812732
  hypo

SEQ ID NO: 41067 - DNA, 31 bp, Homo sapiens; identical to SEQ ID NO: 7988
  chr1:20920112-20920143
  hypo

SEQ ID NO: 41068 - DNA, 31 bp, Homo sapiens; identical to SEQ ID NO: 147
  chr1:20959848-20959879
  hypo

SEQ ID NO: 41069 - DNA, 31 bp, Homo sapiens; identical to SEQ ID NO: 7991
  chr1:21027557-21027588
  hypo

SEQ ID NO: 41070 - DNA, 31 bp, Homo sapiens; identical to SEQ ID NO: 7992
  chr1:21048390-21048421
  hypo

SEQ ID NO: 41071 - DNA, 11 bp, Homo sapiens
  chr1:21058417-21058428
  hypo
cctcactcccg

SEQ ID NO: 41072 - DNA, 2 bp, Homo sapiens
  chr1:21568326-21568328
  hypo
aa

SEQ ID NO: 41073 - DNA, 31 bp, Homo sapiens; identical to SEQ ID NO: 7996
  chr1:21635872-21635903
  hypo

SEQ ID NO: 41074 - DNA, 31 bp, Homo sapiens; identical to SEQ ID NO: 7997
  chr1:21635947-21635978
  hypo

SEQ ID NO: 41075 - DNA, 54 bp, Homo sapiens; identical to SEQ ID NO: 7998
  chr1:21635997-21636051
  hypo

SEQ ID NO: 41076 - DNA, 43 bp, Homo sapiens; identical to SEQ ID NO: 8000
  chr1:21786547-21786590
  hypo

SEQ ID NO: 41077 - DNA, 36 bp, Homo sapiens; identical to SEQ ID NO: 8001
  chr1:21848419-21848455
  hypo

SEQ ID NO: 41078 - DNA, 31 bp, Homo sapiens; identical to SEQ ID NO: 8002
  chr1:21848503-21848534
  hypo

SEQ ID NO: 41079 - DNA, 31 bp, Homo sapiens; identical to SEQ ID NO: 8003
  chr1:21882578-21882609
  hypo

SEQ ID NO: 41080 - DNA, 31 bp, Homo sapiens; identical to SEQ ID NO: 8004
  chr1:21889587-21889618
  hypo

SEQ ID NO: 41081 - DNA, 43 bp, Homo sapiens; identical to SEQ ID NO: 8005
  chr1:21889621-21889664
  hypo

SEQ ID NO: 41082 - DNA, 43 bp, Homo sapiens; identical to SEQ ID NO: 8006
  chr1:21889669-21889712
  hypo

SEQ ID NO: 41083 - DNA, 31 bp, Homo sapiens; identical to SEQ ID NO: 8007
  chr1:21897870-21897901
  hypo

SEQ ID NO: 41084 - DNA, 31 bp, Homo sapiens; identical to SEQ ID NO: 8008
  chr1:21924747-21924778
  hypo

SEQ ID NO: 41085 - DNA, 31 bp, Homo sapiens; identical to SEQ ID NO: 8009
  chr1:21944016-21944047
  hypo

SEQ ID NO: 41086 - DNA, 40 bp, Homo sapiens; identical to SEQ ID NO: 8010
  chr1:21944051-21944091
  hypo

SEQ ID NO: 41087 - DNA, 34 bp, Homo sapiens; identical to SEQ ID NO: 8011
  chr1:21944149-21944183
  hypo

SEQ ID NO: 41088 - DNA, 50 bp, Homo sapiens; identical to SEQ ID NO: 8012
  chr1:22166017-22166067
  hypo

SEQ ID NO: 41089 - DNA, 85 bp, Homo sapiens; identical to SEQ ID NO: 8013
  chr1:22179017-22179102
  hypo

SEQ ID NO: 41090 - DNA, 35 bp, Homo sapiens; identical to SEQ ID NO: 8014
  chr1:22422726-22422761
  hypo

SEQ ID NO: 41091 - DNA, 31 bp, Homo sapiens; identical to SEQ ID NO: 8015
  chr1:22498767-22498798
  hypo

SEQ ID NO: 41092 - DNA, 31 bp, Homo sapiens; identical to SEQ ID NO: 8016
  chr1:22580524-22580555
  hypo

SEQ ID NO: 41093 - DNA, 31 bp, Homo sapiens; identical to SEQ ID NO: 8017
  chr1:22777374-22777405
  hypo

SEQ ID NO: 41094 - DNA, 31 bp, Homo sapiens; identical to SEQ ID NO: 8018
  chr1:22777442-22777473
  hypo

SEQ ID NO: 41095 - DNA, 2 bp, Homo sapiens
  chr1:22777512-22777514
  hypo
aa

SEQ ID NO: 41096 - DNA, 15 bp, Homo sapiens
  chr1:22927345-22927360
  hypo
agggtgcagggaggg

SEQ ID NO: 41097 - DNA, 38 bp, Homo sapiens; identical to SEQ ID NO: 8024
  chr1:23021934-23021972
  hypo

SEQ ID NO: 41098 - DNA, 31 bp, Homo sapiens; identical to SEQ ID NO: 8025
  chr1:23022010-23022041
  hypo

SEQ ID NO: 41099 - DNA, 120 bp, Homo sapiens; identical to SEQ ID NO: 154
  chr1:23037774-23037894
  hypo

SEQ ID NO: 41100 - DNA, 39 bp, Homo sapiens; identical to SEQ ID NO: 155
  chr1:23038019-23038058
  hypo

SEQ ID NO: 41101 - DNA, 44 bp, Homo sapiens; identical to SEQ ID NO: 35010
  chr1:23038250-23038294
  hypo

SEQ ID NO: 41102 - DNA, 46 bp, Homo sapiens; identical to SEQ ID NO: 8029
  chr1:23058381-23058427
  hypo

SEQ ID NO: 41103 - DNA, 49 bp, Homo sapiens; identical to SEQ ID NO: 8030
  chr1:23063030-23063079
  hypo

SEQ ID NO: 41104 - DNA, 66 bp, Homo sapiens; identical to SEQ ID NO: 8031
  chr1:23063098-23063164
  hypo

SEQ ID NO: 41105 - DNA, 34 bp, Homo sapiens; identical to SEQ ID NO: 8032
  chr1:23063498-23063532
  hypo

SEQ ID NO: 41106 - DNA, 86 bp, Homo sapiens; identical to SEQ ID NO: 8033
  chr1:23091395-23091481
  hypo

SEQ ID NO: 41107 - DNA, 31 bp, Homo sapiens; identical to SEQ ID NO: 8034
  chr1:23111047-23111078
  hypo

SEQ ID NO: 41108 - DNA, 31 bp, Homo sapiens; identical to SEQ ID NO: 8035
  chr1:23111106-23111137
  hypo

SEQ ID NO: 41109 - DNA, 34 bp, Homo sapiens; identical to SEQ ID NO: 8036
  chr1:23111170-23111204
  hypo

SEQ ID NO: 41110 - DNA, 36 bp, Homo sapiens; identical to SEQ ID NO: 8037
  chr1:23111252-23111288
  hypo

SEQ ID NO: 41111 - DNA, 62 bp, Homo sapiens; identical to SEQ ID NO: 8038
  chr1:23111305-23111367
  hypo

SEQ ID NO: 41112 - DNA, 31 bp, Homo sapiens; identical to SEQ ID NO: 8039
  chr1:23162008-23162039
  hypo

SEQ ID NO: 41113 - DNA, 76 bp, Homo sapiens; identical to SEQ ID NO: 8040
  chr1:23162106-23162182
  hypo

SEQ ID NO: 41114 - DNA, 31 bp, Homo sapiens; identical to SEQ ID NO: 8041
  chr1:23162192-23162223
  hypo

SEQ ID NO: 41115 - DNA, 31 bp, Homo sapiens; identical to SEQ ID NO: 8042
  chr1:23189581-23189612
  hypo

SEQ ID NO: 41116 - DNA, 36 bp, Homo sapiens; identical to SEQ ID NO: 8043
  chr1:23191505-23191541
  hypo

SEQ ID NO: 41117 - DNA, 41 bp, Homo sapiens; identical to SEQ ID NO: 8044
  chr1:23191647-23191688
  hypo

SEQ ID NO: 41118 - DNA, 31 bp, Homo sapiens; identical to SEQ ID NO: 8045
  chr1:23191818-23191849
  hypo

SEQ ID NO: 41119 - DNA, 76 bp, Homo sapiens; identical to SEQ ID NO: 8046
  chr1:23201491-23201567
  hypo

SEQ ID NO: 41120 - DNA, 47 bp, Homo sapiens; identical to SEQ ID NO: 8047
  chr1:23201656-23201703
  hypo

SEQ ID NO: 41121 - DNA, 59 bp, Homo sapiens; identical to SEQ ID NO: 8048
  chr1:23208895-23208954
  hypo

SEQ ID NO: 41122 - DNA, 31 bp, Homo sapiens; identical to SEQ ID NO: 8049
  chr1:23209044-23209075
  hypo

SEQ ID NO: 41123 - DNA, 31 bp, Homo sapiens; identical to SEQ ID NO: 8050
  chr1:23270401-23270432
  hypo

SEQ ID NO: 41124 - DNA, 31 bp, Homo sapiens; identical to SEQ ID NO: 8051
  chr1:23270450-23270481
  hypo

SEQ ID NO: 41125 - DNA, 31 bp, Homo sapiens; identical to SEQ ID NO: 158
  chr1:23346339-23346370
  hypo

SEQ ID NO: 41126 - DNA, 31 bp, Homo sapiens; identical to SEQ ID NO: 8053
  chr1:23479365-23479396
  hypo

SEQ ID NO: 41127 - DNA, 47 bp, Homo sapiens; identical to SEQ ID NO: 159
  chr1:23543644-23543691
  hypo

SEQ ID NO: 41128 - DNA, 14 bp, Homo sapiens
  chr1:23693472-23693486
  hypo
ctaagtcattttga

SEQ ID NO: 41129 - DNA, 128 bp, Homo sapiens; identical to SEQ ID NO: 8056
  chr1:23693559-23693687
  hypo

SEQ ID NO: 41130 - DNA, 31 bp, Homo sapiens; identical to SEQ ID NO: 8057
  chr1:23693909-23693940
  hypo

SEQ ID NO: 41131 - DNA, 31 bp, Homo sapiens; identical to SEQ ID NO: 8058
  chr1:23693993-23694024
  hypo

SEQ ID NO: 41132 - DNA, 31 bp, Homo sapiens; identical to SEQ ID NO: 8059
  chr1:23694037-23694068
  hypo

SEQ ID NO: 41133 - DNA, 2 bp, Homo sapiens
  chr1:23694077-23694079
  hypo
ca

SEQ ID NO: 41134 - DNA, 31 bp, Homo sapiens; identical to SEQ ID NO: 8061
  chr1:23705731-23705762
  hypo

SEQ ID NO: 41135 - DNA, 31 bp, Homo sapiens; identical to SEQ ID NO: 8063
  chr1:23768672-23768703
  hypo

SEQ ID NO: 41136 - DNA, 31 bp, Homo sapiens; identical to SEQ ID NO: 8064
  chr1:23768732-23768763
  hypo

SEQ ID NO: 41137 - DNA, 62 bp, Homo sapiens; identical to SEQ ID NO: 8065
  chr1:23768772-23768834
  hypo

SEQ ID NO: 41138 - DNA, 31 bp, Homo sapiens; identical to SEQ ID NO: 8066
  chr1:23768845-23768876
  hypo

SEQ ID NO: 41139 - DNA, 31 bp, Homo sapiens; identical to SEQ ID NO: 161
  chr1:23857852-23857883
  hypo

SEQ ID NO: 41140 - DNA, 29 bp, Homo sapiens
  chr1:24017559-24017588
  hypo
tgcctgtcttcaagctcgggactcttaaa

SEQ ID NO: 41141 - DNA, 2 bp, Homo sapiens
  chr1:24119110-24119112
  hypo
tg

SEQ ID NO: 41142 - DNA, 31 bp, Homo sapiens; identical to SEQ ID NO: 165
  chr1:24126678-24126709
  hypo

SEQ ID NO: 41143 - DNA, 31 bp, Homo sapiens; identical to SEQ ID NO: 8072
  chr1:24228243-24228274
  hypo

SEQ ID NO: 41144 - DNA, 31 bp, Homo sapiens; identical to SEQ ID NO: 8074
  chr1:24424242-24424273
  hypo

SEQ ID NO: 41145 - DNA, 37 bp, Homo sapiens; identical to SEQ ID NO: 8075
  chr1:24424432-24424469
  hypo

SEQ ID NO: 41146 - DNA, 31 bp, Homo sapiens; identical to SEQ ID NO: 8076
  chr1:24424480-24424511
  hypo

SEQ ID NO: 41147 - DNA, 33 bp, Homo sapiens; identical to SEQ ID NO: 8077
  chr1:24683005-24683038
  hypo

SEQ ID NO: 41148 - DNA, 31 bp, Homo sapiens; identical to SEQ ID NO: 8078
  chr1:24701523-24701554
  hypo

SEQ ID NO: 41149 - DNA, 31 bp, Homo sapiens; identical to SEQ ID NO: 8079
  chr1:24877032-24877063
  hypo

SEQ ID NO: 41150 - DNA, 7 bp, Homo sapiens
  chr1:25255934-25255941
  hypo
agccaga

SEQ ID NO: 41151 - DNA, 31 bp, Homo sapiens; identical to SEQ ID NO: 8084
  chr1:25396319-25396350
  hypo

SEQ ID NO: 41152 - DNA, 31 bp, Homo sapiens; identical to SEQ ID NO: 8085
  chr1:25396369-25396400
  hypo

SEQ ID NO: 41153 - DNA, 31 bp, Homo sapiens; identical to SEQ ID NO: 8086
  chr1:25396422-25396453
  hypo

SEQ ID NO: 41154 - DNA, 51 bp, Homo sapiens; identical to SEQ ID NO: 8087
  chr1:25397930-25397981
  hypo

SEQ ID NO: 41155 - DNA, 31 bp, Homo sapiens; identical to SEQ ID NO: 8088
  chr1:25398024-25398055
  hypo

SEQ ID NO: 41156 - DNA, 47 bp, Homo sapiens; identical to SEQ ID NO: 8089
  chr1:25398075-25398122
  hypo

SEQ ID NO: 41157 - DNA, 58 bp, Homo sapiens; identical to SEQ ID NO: 8090
  chr1:25510192-25510250
  hypo

SEQ ID NO: 41158 - DNA, 44 bp, Homo sapiens; identical to SEQ ID NO: 8091
  chr1:25510285-25510329
  hypo

SEQ ID NO: 41159 - DNA, 31 bp, Homo sapiens; identical to SEQ ID NO: 8092
  chr1:25510354-25510385
  hypo

SEQ ID NO: 41160 - DNA, 55 bp, Homo sapiens; identical to SEQ ID NO: 8093
  chr1:25718493-25718548
  hypo

SEQ ID NO: 41161 - DNA, 37 bp, Homo sapiens; identical to SEQ ID NO: 8094
  chr1:25718576-25718613
  hypo

SEQ ID NO: 41162 - DNA, 31 bp, Homo sapiens; identical to SEQ ID NO: 8095
  chr1:25718648-25718679
  hypo

SEQ ID NO: 41163 - DNA, 62 bp, Homo sapiens; identical to SEQ ID NO: 174
  chr1:25870617-25870679
  hypo

SEQ ID NO: 41164 - DNA, 81 bp, Homo sapiens; identical to SEQ ID NO: 175
  chr1:25870705-25870786
  hypo

SEQ ID NO: 41165 - DNA, 31 bp, Homo sapiens; identical to SEQ ID NO: 8098
  chr1:26104541-26104572
  hypo

SEQ ID NO: 41166 - DNA, 31 bp, Homo sapiens; identical to SEQ ID NO: 8099
  chr1:26141989-26142020
  hypo

SEQ ID NO: 41167 - DNA, 2 bp, Homo sapiens
  chr1:26336890-26336892
  hypo
tt

SEQ ID NO: 41168 - DNA, 31 bp, Homo sapiens; identical to SEQ ID NO: 8102
  chr1:26670608-26670639
  hypo

SEQ ID NO: 41169 - DNA, 31 bp, Homo sapiens; identical to SEQ ID NO: 8103
  chr1:26670686-26670717
  hypo

SEQ ID NO: 41170 - DNA, 36 bp, Homo sapiens; identical to SEQ ID NO: 8104
  chr1:26670735-26670771
  hypo

SEQ ID NO: 41171 - DNA, 31 bp, Homo sapiens; identical to SEQ ID NO: 8105
  chr1:26670772-26670803
  hypo

SEQ ID NO: 41172 - DNA, 41 bp, Homo sapiens; identical to SEQ ID NO: 179
  chr1:26855979-26856020
  hypo

SEQ ID NO: 41173 - DNA, 31 bp, Homo sapiens; identical to SEQ ID NO: 180
  chr1:26856055-26856086
  hypo

SEQ ID NO: 41174 - DNA, 69 bp, Homo sapiens; identical to SEQ ID NO: 8108
  chr1:26885363-26885432
  hypo

SEQ ID NO: 41175 - DNA, 31 bp, Homo sapiens; identical to SEQ ID NO: 8109
  chr1:26969658-26969689
  hypo

SEQ ID NO: 41176 - DNA, 95 bp, Homo sapiens; identical to SEQ ID NO: 8111
  chr1:27183536-27183631
  hypo

SEQ ID NO: 41177 - DNA, 118 bp, Homo sapiens; identical to SEQ ID NO: 182
  chr1:27286496-27286614
  hypo

SEQ ID NO: 41178 - DNA, 44 bp, Homo sapiens; identical to SEQ ID NO: 8115
  chr1:27427839-27427883
  hypo

SEQ ID NO: 41179 - DNA, 31 bp, Homo sapiens; identical to SEQ ID NO: 8116
  chr1:27427888-27427919
  hypo

SEQ ID NO: 41180 - DNA, 31 bp, Homo sapiens; identical to SEQ ID NO: 8117
  chr1:27428622-27428653
  hypo

SEQ ID NO: 41181 - DNA, 31 bp, Homo sapiens; identical to SEQ ID NO: 8118
  chr1:27480393-27480424
  hypo

SEQ ID NO: 41182 - DNA, 31 bp, Homo sapiens; identical to SEQ ID NO: 8119
  chr1:27480526-27480557
  hypo

SEQ ID NO: 41183 - DNA, 31 bp, Homo sapiens; identical to SEQ ID NO: 8121
  chr1:27632598-27632629
  hypo

SEQ ID NO: 41184 - DNA, 31 bp, Homo sapiens; identical to SEQ ID NO: 8123
  chr1:27684980-27685011
  hypo

SEQ ID NO: 41185 - DNA, 31 bp, Homo sapiens; identical to SEQ ID NO: 8125
  chr1:27798553-27798584
  hypo

SEQ ID NO: 41186 - DNA, 31 bp, Homo sapiens; identical to SEQ ID NO: 8127
  chr1:27844780-27844811
  hypo

SEQ ID NO: 41187 - DNA, 41 bp, Homo sapiens; identical to SEQ ID NO: 8128
  chr1:27844877-27844918
  hypo

SEQ ID NO: 41188 - DNA, 31 bp, Homo sapiens; identical to SEQ ID NO: 8129
  chr1:27844949-27844980
  hypo

SEQ ID NO: 41189 - DNA, 31 bp, Homo sapiens; identical to SEQ ID NO: 8130
  chr1:27875900-27875931
  hypo

SEQ ID NO: 41190 - DNA, 6 bp, Homo sapiens
  chr1:27876084-27876090
  hypo
catccg

SEQ ID NO: 41191 - DNA, 49 bp, Homo sapiens; identical to SEQ ID NO: 186
  chr1:27902441-27902490
  hypo

SEQ ID NO: 41192 - DNA, 31 bp, Homo sapiens; identical to SEQ ID NO: 8135
  chr1:28293442-28293473
  hypo

SEQ ID NO: 41193 - DNA, 31 bp, Homo sapiens; identical to SEQ ID NO: 8137
  chr1:28663348-28663379
  hypo

SEQ ID NO: 41194 - DNA, 2 bp, Homo sapiens
  chr1:28853680-28853682
  hypo
aa

SEQ ID NO: 41195 - DNA, 31 bp, Homo sapiens; identical to SEQ ID NO: 8141
  chr1:28853773-28853804
  hypo

SEQ ID NO: 41196 - DNA, 39 bp, Homo sapiens; identical to SEQ ID NO: 8142
  chr1:28854233-28854272
  hypo

SEQ ID NO: 41197 - DNA, 31 bp, Homo sapiens; identical to SEQ ID NO: 8143
  chr1:28867211-28867242
  hypo

SEQ ID NO: 41198 - DNA, 46 bp, Homo sapiens; identical to SEQ ID NO: 190
  chr1:28879901-28879947
  hypo

SEQ ID NO: 41199 - DNA, 31 bp, Homo sapiens; identical to SEQ ID NO: 191
  chr1:28879959-28879990
  hypo

SEQ ID NO: 41200 - DNA, 31 bp, Homo sapiens; identical to SEQ ID NO: 8146
  chr1:28881387-28881418
  hypo

SEQ ID NO: 41201 - DNA, 31 bp, Homo sapiens; identical to SEQ ID NO: 8147
  chr1:28986971-28987002
  hypo

SEQ ID NO: 41202 - DNA, 35 bp, Homo sapiens; identical to SEQ ID NO: 8148
  chr1:29007852-29007887
  hypo

SEQ ID NO: 41203 - DNA, 2 bp, Homo sapiens
  chr1:29047658-29047660
  hypo
tt

SEQ ID NO: 41204 - DNA, 12 bp, Homo sapiens
  chr1:29047677-29047689
  hypo
agtctgactccg

SEQ ID NO: 41205 - DNA, 30 bp, Homo sapiens; identical to SEQ ID NO: 8150
  chr1:29061398-29061428
  hypo

SEQ ID NO: 41206 - DNA, 47 bp, Homo sapiens; identical to SEQ ID NO: 8152
  chr1:29116012-29116059
  hypo

SEQ ID NO: 41207 - DNA, 31 bp, Homo sapiens; identical to SEQ ID NO: 8153
  chr1:29152170-29152201
  hypo

SEQ ID NO: 41208 - DNA, 31 bp, Homo sapiens; identical to SEQ ID NO: 8154
  chr1:29513700-29513731
  hypo

SEQ ID NO: 41209 - DNA, 31 bp, Homo sapiens; identical to SEQ ID NO: 8155
  chr1:29516492-29516523
  hypo

SEQ ID NO: 41210 - DNA, 55 bp, Homo sapiens; identical to SEQ ID NO: 8156
  chr1:29605968-29606023
  hypo

SEQ ID NO: 41211 - DNA, 31 bp, Homo sapiens; identical to SEQ ID NO: 8157
  chr1:29644272-29644303
  hypo

SEQ ID NO: 41212 - DNA, 31 bp, Homo sapiens; identical to SEQ ID NO: 8158
  chr1:29645535-29645566
  hypo

SEQ ID NO: 41213 - DNA, 30 bp, Homo sapiens; identical to SEQ ID NO: 8159
  chr1:30092556-30092586
  hypo

SEQ ID NO: 41214 - DNA, 31 bp, Homo sapiens; identical to SEQ ID NO: 8160
  chr1:30180748-30180779
  hypo

SEQ ID NO: 41215 - DNA, 31 bp, Homo sapiens; identical to SEQ ID NO: 8161
  chr1:30180804-30180835
  hypo

SEQ ID NO: 41216 - DNA, 31 bp, Homo sapiens; identical to SEQ ID NO: 8162
  chr1:31189130-31189161
  hypo

SEQ ID NO: 41217 - DNA, 31 bp, Homo sapiens; identical to SEQ ID NO: 194
  chr1:31192286-31192317
  hypo

SEQ ID NO: 41218 - DNA, 31 bp, Homo sapiens; identical to SEQ ID NO: 8164
  chr1:31237673-31237704
  hypo

SEQ ID NO: 41219 - DNA, 31 bp, Homo sapiens; identical to SEQ ID NO: 8165
  chr1:31239982-31240013
  hypo

SEQ ID NO: 41220 - DNA, 31 bp, Homo sapiens; identical to SEQ ID NO: 8166
  chr1:31240594-31240625
  hypo

SEQ ID NO: 41221 - DNA, 31 bp, Homo sapiens; identical to SEQ ID NO: 8168
  chr1:31260792-31260823
  hypo

SEQ ID NO: 41222 - DNA, 52 bp, Homo sapiens; identical to SEQ ID NO: 8169
  chr1:31260829-31260881
  hypo

SEQ ID NO: 41223 - DNA, 31 bp, Homo sapiens; identical to SEQ ID NO: 8170
  chr1:31347130-31347161
  hypo

SEQ ID NO: 41224 - DNA, 31 bp, Homo sapiens; identical to SEQ ID NO: 8171
  chr1:31347269-31347300
  hypo

SEQ ID NO: 41225 - DNA, 31 bp, Homo sapiens; identical to SEQ ID NO: 8172
  chr1:31347384-31347415
  hypo

SEQ ID NO: 41226 - DNA, 78 bp, Homo sapiens; identical to SEQ ID NO: 8173
  chr1:31407297-31407375
  hypo

SEQ ID NO: 41227 - DNA, 34 bp, Homo sapiens; identical to SEQ ID NO: 8174
  chr1:31407442-31407476
  hypo

SEQ ID NO: 41228 - DNA, 31 bp, Homo sapiens; identical to SEQ ID NO: 8176
  chr1:31568455-31568486
  hypo

SEQ ID NO: 41229 - DNA, 31 bp, Homo sapiens; identical to SEQ ID NO: 8178
  chr1:31623745-31623776
  hypo

SEQ ID NO: 41230 - DNA, 31 bp, Homo sapiens; identical to SEQ ID NO: 8181
  chr1:31632165-31632196
  hypo

SEQ ID NO: 41231 - DNA, 31 bp, Homo sapiens; identical to SEQ ID NO: 8182
  chr1:31633839-31633870
  hypo

SEQ ID NO: 41232 - DNA, 31 bp, Homo sapiens; identical to SEQ ID NO: 8183
  chr1:31639517-31639548
  hypo

SEQ ID NO: 41233 - DNA, 31 bp, Homo sapiens; identical to SEQ ID NO: 8184
  chr1:31639549-31639580
  hypo

SEQ ID NO: 41234 - DNA, 38 bp, Homo sapiens; identical to SEQ ID NO: 8185
  chr1:31871813-31871851
  hypo

SEQ ID NO: 41235 - DNA, 56 bp, Homo sapiens; identical to SEQ ID NO: 8186
  chr1:32050769-32050825
  hypo

SEQ ID NO: 41236 - DNA, 34 bp, Homo sapiens; identical to SEQ ID NO: 8187
  chr1:32139296-32139330
  hypo

SEQ ID NO: 41237 - DNA, 31 bp, Homo sapiens; identical to SEQ ID NO: 8188
  chr1:32139335-32139366
  hypo

SEQ ID NO: 41238 - DNA, 31 bp, Homo sapiens; identical to SEQ ID NO: 8189
  chr1:32139429-32139460
  hypo

SEQ ID NO: 41239 - DNA, 31 bp, Homo sapiens; identical to SEQ ID NO: 8190
  chr1:32139462-32139493
  hypo

SEQ ID NO: 41240 - DNA, 39 bp, Homo sapiens; identical to SEQ ID NO: 8191
  chr1:32156855-32156894
  hypo

SEQ ID NO: 41241 - DNA, 59 bp, Homo sapiens; identical to SEQ ID NO: 8192
  chr1:32156928-32156987
  hypo

SEQ ID NO: 41242 - DNA, 31 bp, Homo sapiens; identical to SEQ ID NO: 8193
  chr1:32157001-32157032
  hypo

SEQ ID NO: 41243 - DNA, 31 bp, Homo sapiens; identical to SEQ ID NO: 8194
  chr1:32306490-32306521
  hypo

SEQ ID NO: 41244 - DNA, 31 bp, Homo sapiens; identical to SEQ ID NO: 195
  chr1:32666346-32666377
  hypo

SEQ ID NO: 41245 - DNA, 40 bp, Homo sapiens; identical to SEQ ID NO: 8196
  chr1:32674988-32675028
  hypo

SEQ ID NO: 41246 - DNA, 31 bp, Homo sapiens; identical to SEQ ID NO: 8197
  chr1:32705374-32705405
  hypo

SEQ ID NO: 41247 - DNA, 2 bp, Homo sapiens
  chr1:32705487-32705489
  hypo
aa

SEQ ID NO: 41248 - DNA, 48 bp, Homo sapiens; identical to SEQ ID NO: 8200
  chr1:32751093-32751141
  hypo

SEQ ID NO: 41249 - DNA, 62 bp, Homo sapiens; identical to SEQ ID NO: 8201
  chr1:32827052-32827114
  hypo

SEQ ID NO: 41250 - DNA, 31 bp, Homo sapiens; identical to SEQ ID NO: 197
  chr1:32852879-32852910
  hypo

SEQ ID NO: 41251 - DNA, 37 bp, Homo sapiens; identical to SEQ ID NO: 199
  chr1:33005605-33005642
  hypo

SEQ ID NO: 41252 - DNA, 37 bp, Homo sapiens; identical to SEQ ID NO: 200
  chr1:33207543-33207580
  hypo

SEQ ID NO: 41253 - DNA, 2 bp, Homo sapiens
  chr1:33220941-33220943
  hypo
gt

SEQ ID NO: 41254 - DNA, 19 bp, Homo sapiens
  chr1:33221016-33221035
  hypo
tcatcgctccatggagggg

SEQ ID NO: 41255 - DNA, 35 bp, Homo sapiens; identical to SEQ ID NO: 204
  chr1:33721671-33721706
  hypo

SEQ ID NO: 41256 - DNA, 31 bp, Homo sapiens; identical to SEQ ID NO: 8210
  chr1:33763442-33763473
  hypo

SEQ ID NO: 41257 - DNA, 31 bp, Homo sapiens; identical to SEQ ID NO: 8211
  chr1:33841564-33841595
  hypo

SEQ ID NO: 41258 - DNA, 85 bp, Homo sapiens; identical to SEQ ID NO: 205
  chr1:33896550-33896635
  hypo

SEQ ID NO: 41259 - DNA, 31 bp, Homo sapiens; identical to SEQ ID NO: 207
  chr1:35208445-35208476
  hypo

SEQ ID NO: 41260 - DNA, 2 bp, Homo sapiens
  chr1:35394613-35394615
  hypo
ca

SEQ ID NO: 41261 - DNA, 85 bp, Homo sapiens; identical to SEQ ID NO: 35053
  chr1:35394790-35394875
  hypo

SEQ ID NO: 41262 - DNA, 99 bp, Homo sapiens; identical to SEQ ID NO: 35054
  chr1:35394944-35395043
  hypo

SEQ ID NO: 41263 - DNA, 31 bp, Homo sapiens; identical to SEQ ID NO: 8224
  chr1:35664869-35664900
  hypo

SEQ ID NO: 41264 - DNA, 2 bp, Homo sapiens
  chr1:36334780-36334782
  hypo
gg

SEQ ID NO: 41265 - DNA, 38 bp, Homo sapiens; identical to SEQ ID NO: 8228
  chr1:36774206-36774244
  hypo

SEQ ID NO: 41266 - DNA, 35 bp, Homo sapiens; identical to SEQ ID NO: 8231
  chr1:36845313-36845348
  hypo

SEQ ID NO: 41267 - DNA, 56 bp, Homo sapiens; identical to SEQ ID NO: 8232
  chr1:36857025-36857081
  hypo

SEQ ID NO: 41268 - DNA, 31 bp, Homo sapiens; identical to SEQ ID NO: 8233
  chr1:36857146-36857177
  hypo

SEQ ID NO: 41269 - DNA, 31 bp, Homo sapiens; identical to SEQ ID NO: 8234
  chr1:36857181-36857212
  hypo

SEQ ID NO: 41270 - DNA, 31 bp, Homo sapiens; identical to SEQ ID NO: 8235
  chr1:36881454-36881485
  hypo

SEQ ID NO: 41271 - DNA, 31 bp, Homo sapiens; identical to SEQ ID NO: 8236
  chr1:36936976-36937007
  hypo

SEQ ID NO: 41272 - DNA, 34 bp, Homo sapiens; identical to SEQ ID NO: 8237
  chr1:36979462-36979496
  hypo

SEQ ID NO: 41273 - DNA, 31 bp, Homo sapiens; identical to SEQ ID NO: 8238
  chr1:36979514-36979545
  hypo

SEQ ID NO: 41274 - DNA, 55 bp, Homo sapiens; identical to SEQ ID NO: 8239
  chr1:36979558-36979613
  hypo

SEQ ID NO: 41275 - DNA, 38 bp, Homo sapiens; identical to SEQ ID NO: 8240
  chr1:38294271-38294309
  hypo

SEQ ID NO: 41276 - DNA, 31 bp, Homo sapiens; identical to SEQ ID NO: 8241
  chr1:38459550-38459581
  hypo

SEQ ID NO: 41277 - DNA, 37 bp, Homo sapiens; identical to SEQ ID NO: 8244
  chr1:39388384-39388421
  hypo

SEQ ID NO: 41278 - DNA, 31 bp, Homo sapiens; identical to SEQ ID NO: 8246
  chr1:40081627-40081658
  hypo

SEQ ID NO: 41279 - DNA, 34 bp, Homo sapiens; identical to SEQ ID NO: 8247
  chr1:40117399-40117433
  hypo

SEQ ID NO: 41280 - DNA, 2 bp, Homo sapiens
  chr1:40349615-40349617
  hypo
ac

SEQ ID NO: 41281 - DNA, 2 bp, Homo sapiens
  chr1:40409693-40409695
  hypo
ca

SEQ ID NO: 41282 - DNA, 6 bp, Homo sapiens
  chr1:40409718-40409724
  hypo
tctgtt

SEQ ID NO: 41283 - DNA, 35 bp, Homo sapiens; identical to SEQ ID NO: 8251
  chr1:41116837-41116872
  hypo

SEQ ID NO: 41284 - DNA, 31 bp, Homo sapiens; identical to SEQ ID NO: 8252
  chr1:41292201-41292232
  hypo

SEQ ID NO: 41285 - DNA, 31 bp, Homo sapiens; identical to SEQ ID NO: 8253
  chr1:41304606-41304637
  hypo

SEQ ID NO: 41286 - DNA, 48 bp, Homo sapiens; identical to SEQ ID NO: 8254
  chr1:41967565-41967613
  hypo

SEQ ID NO: 41287 - DNA, 39 bp, Homo sapiens; identical to SEQ ID NO: 8255
  chr1:41970957-41970996
  hypo

SEQ ID NO: 41288 - DNA, 31 bp, Homo sapiens; identical to SEQ ID NO: 8256
  chr1:41971060-41971091
  hypo

SEQ ID NO: 41289 - DNA, 57 bp, Homo sapiens; identical to SEQ ID NO: 8257
  chr1:41971112-41971169
  hypo

SEQ ID NO: 41290 - DNA, 57 bp, Homo sapiens; identical to SEQ ID NO: 8258
  chr1:41976411-41976468
  hypo

SEQ ID NO: 41291 - DNA, 31 bp, Homo sapiens; identical to SEQ ID NO: 8259
  chr1:41976830-41976861
  hypo

SEQ ID NO: 41292 - DNA, 56 bp, Homo sapiens; identical to SEQ ID NO: 8260
  chr1:41979368-41979424
  hypo

SEQ ID NO: 41293 - DNA, 31 bp, Homo sapiens; identical to SEQ ID NO: 8261
  chr1:41979463-41979494
  hypo

SEQ ID NO: 41294 - DNA, 31 bp, Homo sapiens; identical to SEQ ID NO: 8262
  chr1:41979520-41979551
  hypo

SEQ ID NO: 41295 - DNA, 31 bp, Homo sapiens; identical to SEQ ID NO: 8263
  chr1:41981636-41981667
  hypo

SEQ ID NO: 41296 - DNA, 230 bp, Homo sapiens; identical to SEQ ID NO: 241
  chr1:41981772-41982002
  hypo

SEQ ID NO: 41297 - DNA, 31 bp, Homo sapiens; identical to SEQ ID NO: 8266
  chr1:42049652-42049683
  hypo

SEQ ID NO: 41298 - DNA, 36 bp, Homo sapiens; identical to SEQ ID NO: 8267
  chr1:42120783-42120819
  hypo

SEQ ID NO: 41299 - DNA, 31 bp, Homo sapiens; identical to SEQ ID NO: 8268
  chr1:42506900-42506931
  hypo

SEQ ID NO: 41300 - DNA, 31 bp, Homo sapiens; identical to SEQ ID NO: 8269
  chr1:42851866-42851897
  hypo

SEQ ID NO: 41301 - DNA, 31 bp, Homo sapiens; identical to SEQ ID NO: 8270
  chr1:42918351-42918382
  hypo

SEQ ID NO: 41302 - DNA, 54 bp, Homo sapiens; identical to SEQ ID NO: 8271
  chr1:43203988-43204042
  hypo

SEQ ID NO: 41303 - DNA, 64 bp, Homo sapiens; identical to SEQ ID NO: 8272
  chr1:43353270-43353334
  hypo

SEQ ID NO: 41304 - DNA, 60 bp, Homo sapiens; identical to SEQ ID NO: 8273
  chr1:43353504-43353564
  hypo

SEQ ID NO: 41305 - DNA, 31 bp, Homo sapiens; identical to SEQ ID NO: 8274
  chr1:43498269-43498300
  hypo

SEQ ID NO: 41306 - DNA, 47 bp, Homo sapiens; identical to SEQ ID NO: 8276
  chr1:43521507-43521554
  hypo

SEQ ID NO: 41307 - DNA, 31 bp, Homo sapiens; identical to SEQ ID NO: 8277
  chr1:43524035-43524066
  hypo

SEQ ID NO: 41308 - DNA, 51 bp, Homo sapiens; identical to SEQ ID NO: 8278
  chr1:43534660-43534711
  hypo

SEQ ID NO: 41309 - DNA, 45 bp, Homo sapiens; identical to SEQ ID NO: 8279
  chr1:43534737-43534782
  hypo

SEQ ID NO: 41310 - DNA, 31 bp, Homo sapiens; identical to SEQ ID NO: 8280
  chr1:43534811-43534842
  hypo

SEQ ID NO: 41311 - DNA, 31 bp, Homo sapiens; identical to SEQ ID NO: 8282
  chr1:43738852-43738883
  hypo

SEQ ID NO: 41312 - DNA, 31 bp, Homo sapiens; identical to SEQ ID NO: 8283
  chr1:43739132-43739163
  hypo

SEQ ID NO: 41313 - DNA, 70 bp, Homo sapiens; identical to SEQ ID NO: 8284
  chr1:43754320-43754390
  hypo

SEQ ID NO: 41314 - DNA, 41 bp, Homo sapiens; identical to SEQ ID NO: 8285
  chr1:43754443-43754484
  hypo

SEQ ID NO: 41315 - DNA, 31 bp, Homo sapiens; identical to SEQ ID NO: 8286
  chr1:43775219-43775250
  hypo

SEQ ID NO: 41316 - DNA, 31 bp, Homo sapiens; identical to SEQ ID NO: 8287
  chr1:43782855-43782886
  hypo

SEQ ID NO: 41317 - DNA, 31 bp, Homo sapiens; identical to SEQ ID NO: 8288
  chr1:43798209-43798240
  hypo

SEQ ID NO: 41318 - DNA, 2 bp, Homo sapiens
  chr1:43834715-43834717
  hypo
ga

SEQ ID NO: 41319 - DNA, 31 bp, Homo sapiens; identical to SEQ ID NO: 8290
  chr1:43889357-43889388
  hypo

SEQ ID NO: 41320 - DNA, 93 bp, Homo sapiens; identical to SEQ ID NO: 250
  chr1:43919567-43919660
  hypo

SEQ ID NO: 41321 - DNA, 45 bp, Homo sapiens; identical to SEQ ID NO: 8292
  chr1:43969025-43969070
  hypo

SEQ ID NO: 41322 - DNA, 31 bp, Homo sapiens; identical to SEQ ID NO: 8293
  chr1:43969083-43969114
  hypo

SEQ ID NO: 41323 - DNA, 34 bp, Homo sapiens; identical to SEQ ID NO: 8294
  chr1:43987295-43987329
  hypo

SEQ ID NO: 41324 - DNA, 31 bp, Homo sapiens; identical to SEQ ID NO: 8295
  chr1:43987382-43987413
  hypo

SEQ ID NO: 41325 - DNA, 48 bp, Homo sapiens; identical to SEQ ID NO: 8296
  chr1:43987437-43987485
  hypo

SEQ ID NO: 41326 - DNA, 36 bp, Homo sapiens; identical to SEQ ID NO: 8297
  chr1:43991182-43991218
  hypo

SEQ ID NO: 41327 - DNA, 31 bp, Homo sapiens; identical to SEQ ID NO: 8298
  chr1:44016540-44016571
  hypo

SEQ ID NO: 41328 - DNA, 31 bp, Homo sapiens; identical to SEQ ID NO: 8299
  chr1:44044917-44044948
  hypo

SEQ ID NO: 41329 - DNA, 31 bp, Homo sapiens; identical to SEQ ID NO: 8300
  chr1:44044989-44045020
  hypo

SEQ ID NO: 41330 - DNA, 31 bp, Homo sapiens; identical to SEQ ID NO: 8301
  chr1:44053822-44053853
  hypo

SEQ ID NO: 41331 - DNA, 31 bp, Homo sapiens; identical to SEQ ID NO: 8302
  chr1:44063578-44063609
  hypo

SEQ ID NO: 41332 - DNA, 51 bp, Homo sapiens; identical to SEQ ID NO: 8303
  chr1:44063621-44063672
  hypo

SEQ ID NO: 41333 - DNA, 31 bp, Homo sapiens; identical to SEQ ID NO: 8304
  chr1:44069554-44069585
  hypo

SEQ ID NO: 41334 - DNA, 111 bp, Homo sapiens; identical to SEQ ID NO: 8305
  chr1:44069592-44069703
  hypo

SEQ ID NO: 41335 - DNA, 44 bp, Homo sapiens; identical to SEQ ID NO: 8306
  chr1:44072458-44072502
  hypo

SEQ ID NO: 41336 - DNA, 31 bp, Homo sapiens; identical to SEQ ID NO: 8307
  chr1:44072666-44072697
  hypo

SEQ ID NO: 41337 - DNA, 31 bp, Homo sapiens; identical to SEQ ID NO: 8308
  chr1:44082000-44082031
  hypo

SEQ ID NO: 41338 - DNA, 31 bp, Homo sapiens; identical to SEQ ID NO: 8309
  chr1:44084830-44084861
  hypo

SEQ ID NO: 41339 - DNA, 43 bp, Homo sapiens; identical to SEQ ID NO: 8310
  chr1:44084948-44084991
  hypo

SEQ ID NO: 41340 - DNA, 31 bp, Homo sapiens; identical to SEQ ID NO: 8311
  chr1:44085147-44085178
  hypo

SEQ ID NO: 41341 - DNA, 31 bp, Homo sapiens; identical to SEQ ID NO: 8312
  chr1:44132661-44132692
  hypo

SEQ ID NO: 41342 - DNA, 47 bp, Homo sapiens; identical to SEQ ID NO: 8313
  chr1:44137395-44137442
  hypo

SEQ ID NO: 41343 - DNA, 59 bp, Homo sapiens; identical to SEQ ID NO: 8314
  chr1:44351016-44351075
  hypo

SEQ ID NO: 41344 - DNA, 3 bp, Homo sapiens
  chr1:44351089-44351092
  hypo
atc

SEQ ID NO: 41345 - DNA, 31 bp, Homo sapiens; identical to SEQ ID NO: 8317
  chr1:44436575-44436606
  hypo

SEQ ID NO: 41346 - DNA, 49 bp, Homo sapiens; identical to SEQ ID NO: 254
  chr1:44444660-44444709
  hypo

SEQ ID NO: 41347 - DNA, 31 bp, Homo sapiens; identical to SEQ ID NO: 8319
  chr1:44463686-44463717
  hypo

SEQ ID NO: 41348 - DNA, 31 bp, Homo sapiens; identical to SEQ ID NO: 8321
  chr1:44595367-44595398
  hypo

SEQ ID NO: 41349 - DNA, 2 bp, Homo sapiens
  chr1:44718071-44718073
  hypo
tc

SEQ ID NO: 41350 - DNA, 31 bp, Homo sapiens; identical to SEQ ID NO: 8323
  chr1:44726772-44726803
  hypo

SEQ ID NO: 41351 - DNA, 31 bp, Homo sapiens; identical to SEQ ID NO: 8328
  chr1:45092411-45092442
  hypo

SEQ ID NO: 41352 - DNA, 46 bp, Homo sapiens; identical to SEQ ID NO: 8329
  chr1:45120344-45120390
  hypo

SEQ ID NO: 41353 - DNA, 31 bp, Homo sapiens; identical to SEQ ID NO: 8331
  chr1:45264887-45264918
  hypo

SEQ ID NO: 41354 - DNA, 41 bp, Homo sapiens; identical to SEQ ID NO: 8332
  chr1:45268615-45268656
  hypo

SEQ ID NO: 41355 - DNA, 9 bp, Homo sapiens
  chr1:45308227-45308236
  hypo
cgtgagtca

SEQ ID NO: 41356 - DNA, 31 bp, Homo sapiens; identical to SEQ ID NO: 8336
  chr1:45529303-45529334
  hypo

SEQ ID NO: 41357 - DNA, 60 bp, Homo sapiens; identical to SEQ ID NO: 8337
  chr1:45529344-45529404
  hypo

SEQ ID NO: 41358 - DNA, 63 bp, Homo sapiens; identical to SEQ ID NO: 8338
  chr1:45759289-45759352
  hypo

SEQ ID NO: 41359 - DNA, 31 bp, Homo sapiens; identical to SEQ ID NO: 8339
  chr1:45759426-45759457
  hypo

SEQ ID NO: 41360 - DNA, 31 bp, Homo sapiens; identical to SEQ ID NO: 8340
  chr1:45801239-45801270
  hypo

SEQ ID NO: 41361 - DNA, 31 bp, Homo sapiens; identical to SEQ ID NO: 8342
  chr1:46278401-46278432
  hypo

SEQ ID NO: 41362 - DNA, 31 bp, Homo sapiens; identical to SEQ ID NO: 8344
  chr1:46653314-46653345
  hypo

SEQ ID NO: 41363 - DNA, 31 bp, Homo sapiens; identical to SEQ ID NO: 8345
  chr1:46653357-46653388
  hypo

SEQ ID NO: 41364 - DNA, 2 bp, Homo sapiens
  chr1:46653448-46653450
  hypo
ca

SEQ ID NO: 41365 - DNA, 15 bp, Homo sapiens
  chr1:46653490-46653505
  hypo
cgacataccacccat

SEQ ID NO: 41366 - DNA, 31 bp, Homo sapiens; identical to SEQ ID NO: 8347
  chr1:46752099-46752130
  hypo

SEQ ID NO: 41367 - DNA, 31 bp, Homo sapiens; identical to SEQ ID NO: 8348
  chr1:47652619-47652650
  hypo

SEQ ID NO: 41368 - DNA, 238 bp, Homo sapiens; identical to SEQ ID NO: 261
  chr1:47903679-47903917
  hypo

SEQ ID NO: 41369 - DNA, 31 bp, Homo sapiens; identical to SEQ ID NO: 8351
  chr1:48187538-48187569
  hypo

SEQ ID NO: 41370 - DNA, 31 bp, Homo sapiens; identical to SEQ ID NO: 8352
  chr1:48187610-48187641
  hypo

SEQ ID NO: 41371 - DNA, 31 bp, Homo sapiens; identical to SEQ ID NO: 8353
  chr1:48231659-48231690
  hypo

SEQ ID NO: 41372 - DNA, 31 bp, Homo sapiens; identical to SEQ ID NO: 8354
  chr1:48257293-48257324
  hypo

SEQ ID NO: 41373 - DNA, 31 bp, Homo sapiens; identical to SEQ ID NO: 8355
  chr1:48257348-48257379
  hypo

SEQ ID NO: 41374 - DNA, 37 bp, Homo sapiens; identical to SEQ ID NO: 8356
  chr1:48257407-48257444
  hypo

SEQ ID NO: 41375 - DNA, 37 bp, Homo sapiens; identical to SEQ ID NO: 8357
  chr1:48257445-48257482
  hypo

SEQ ID NO: 41376 - DNA, 31 bp, Homo sapiens; identical to SEQ ID NO: 8358
  chr1:48459839-48459870
  hypo

SEQ ID NO: 41377 - DNA, 31 bp, Homo sapiens; identical to SEQ ID NO: 268
  chr1:48463141-48463172
  hypo

SEQ ID NO: 41378 - DNA, 60 bp, Homo sapiens; identical to SEQ ID NO: 269
  chr1:48463405-48463465
  hypo

SEQ ID NO: 41379 - DNA, 31 bp, Homo sapiens; identical to SEQ ID NO: 8361
  chr1:48694609-48694640
  hypo

SEQ ID NO: 41380 - DNA, 31 bp, Homo sapiens; identical to SEQ ID NO: 8362
  chr1:48733207-48733238
  hypo

SEQ ID NO: 41381 - DNA, 36 bp, Homo sapiens; identical to SEQ ID NO: 8365
  chr1:51424029-51424065
  hypo

SEQ ID NO: 41382 - DNA, 31 bp, Homo sapiens; identical to SEQ ID NO: 8367
  chr1:51767451-51767482
  hypo

SEQ ID NO: 41383 - DNA, 191 bp, Homo sapiens; identical to SEQ ID NO: 278
  chr1:52195012-52195203
  hypo

SEQ ID NO: 41384 - DNA, 2 bp, Homo sapiens
  chr1:52832631-52832633
  hypo
tt

SEQ ID NO: 41385 - DNA, 31 bp, Homo sapiens; identical to SEQ ID NO: 8377
  chr1:53537412-53537443
  hypo

SEQ ID NO: 41386 - DNA, 31 bp, Homo sapiens; identical to SEQ ID NO: 8378
  chr1:53607948-53607979
  hypo

SEQ ID NO: 41387 - DNA, 16 bp, Homo sapiens
  chr1:53703072-53703088
  hypo
gcggtggctcacacct

SEQ ID NO: 41388 - DNA, 104 bp, Homo sapiens; identical to SEQ ID NO: 8381
  chr1:53769706-53769810
  hypo

SEQ ID NO: 41389 - DNA, 57 bp, Homo sapiens; identical to SEQ ID NO: 8382
  chr1:53986259-53986316
  hypo

SEQ ID NO: 41390 - DNA, 76 bp, Homo sapiens; identical to SEQ ID NO: 8383
  chr1:54060384-54060460
  hypo

SEQ ID NO: 41391 - DNA, 31 bp, Homo sapiens; identical to SEQ ID NO: 8384
  chr1:54595917-54595948
  hypo

SEQ ID NO: 41392 - DNA, 31 bp, Homo sapiens; identical to SEQ ID NO: 8385
  chr1:54602394-54602425
  hypo

SEQ ID NO: 41393 - DNA, 31 bp, Homo sapiens; identical to SEQ ID NO: 8386
  chr1:54605373-54605404
  hypo

SEQ ID NO: 41394 - DNA, 31 bp, Homo sapiens; identical to SEQ ID NO: 8387
  chr1:54605547-54605578
  hypo

SEQ ID NO: 41395 - DNA, 51 bp, Homo sapiens; identical to SEQ ID NO: 8388
  chr1:54610115-54610166
  hypo

SEQ ID NO: 41396 - DNA, 2 bp, Homo sapiens
  chr1:54722665-54722667
  hypo
ag

SEQ ID NO: 41397 - DNA, 31 bp, Homo sapiens; identical to SEQ ID NO: 8390
  chr1:54860654-54860685
  hypo

SEQ ID NO: 41398 - DNA, 31 bp, Homo sapiens; identical to SEQ ID NO: 8391
  chr1:54860695-54860726
  hypo

SEQ ID NO: 41399 - DNA, 31 bp, Homo sapiens; identical to SEQ ID NO: 284
  chr1:54871324-54871355
  hypo

SEQ ID NO: 41400 - DNA, 37 bp, Homo sapiens; identical to SEQ ID NO: 8393
  chr1:54944839-54944876
  hypo

SEQ ID NO: 41401 - DNA, 31 bp, Homo sapiens; identical to SEQ ID NO: 8394
  chr1:54961586-54961617
  hypo

SEQ ID NO: 41402 - DNA, 45 bp, Homo sapiens; identical to SEQ ID NO: 8395
  chr1:55009516-55009561
  hypo

SEQ ID NO: 41403 - DNA, 31 bp, Homo sapiens; identical to SEQ ID NO: 8397
  chr1:55033281-55033312
  hypo

SEQ ID NO: 41404 - DNA, 55 bp, Homo sapiens; identical to SEQ ID NO: 8398
  chr1:55050845-55050900
  hypo

SEQ ID NO: 41405 - DNA, 51 bp, Homo sapiens; identical to SEQ ID NO: 8399
  chr1:55050905-55050956
  hypo

SEQ ID NO: 41406 - DNA, 31 bp, Homo sapiens; identical to SEQ ID NO: 8400
  chr1:55050970-55051001
  hypo

SEQ ID NO: 41407 - DNA, 38 bp, Homo sapiens; identical to SEQ ID NO: 8401
  chr1:55074066-55074104
  hypo

SEQ ID NO: 41408 - DNA, 31 bp, Homo sapiens; identical to SEQ ID NO: 8402
  chr1:55074112-55074143
  hypo

SEQ ID NO: 41409 - DNA, 31 bp, Homo sapiens; identical to SEQ ID NO: 8403
  chr1:55074206-55074237
  hypo

SEQ ID NO: 41410 - DNA, 31 bp, Homo sapiens; identical to SEQ ID NO: 8404
  chr1:55074242-55074273
  hypo

SEQ ID NO: 41411 - DNA, 37 bp, Homo sapiens; identical to SEQ ID NO: 8405
  chr1:55146064-55146101
  hypo

SEQ ID NO: 41412 - DNA, 35 bp, Homo sapiens; identical to SEQ ID NO: 8406
  chr1:55146235-55146270
  hypo

SEQ ID NO: 41413 - DNA, 31 bp, Homo sapiens; identical to SEQ ID NO: 8407
  chr1:55160577-55160608
  hypo

SEQ ID NO: 41414 - DNA, 31 bp, Homo sapiens; identical to SEQ ID NO: 8408
  chr1:55166801-55166832
  hypo

SEQ ID NO: 41415 - DNA, 38 bp, Homo sapiens; identical to SEQ ID NO: 8409
  chr1:55261944-55261982
  hypo

SEQ ID NO: 41416 - DNA, 31 bp, Homo sapiens; identical to SEQ ID NO: 285
  chr1:55352447-55352478
  hypo

SEQ ID NO: 41417 - DNA, 101 bp, Homo sapiens; identical to SEQ ID NO: 286
  chr1:55352583-55352684
  hypo

SEQ ID NO: 41418 - DNA, 31 bp, Homo sapiens; identical to SEQ ID NO: 8412
  chr1:55494086-55494117
  hypo

SEQ ID NO: 41419 - DNA, 31 bp, Homo sapiens; identical to SEQ ID NO: 8413
  chr1:55517830-55517861
  hypo

SEQ ID NO: 41420 - DNA, 44 bp, Homo sapiens; identical to SEQ ID NO: 8414
  chr1:55517922-55517966
  hypo

SEQ ID NO: 41421 - DNA, 39 bp, Homo sapiens; identical to SEQ ID NO: 8415
  chr1:55517990-55518029
  hypo

SEQ ID NO: 41422 - DNA, 31 bp, Homo sapiens; identical to SEQ ID NO: 8416
  chr1:55524322-55524353
  hypo

SEQ ID NO: 41423 - DNA, 31 bp, Homo sapiens; identical to SEQ ID NO: 8417
  chr1:55525309-55525340
  hypo

SEQ ID NO: 41424 - DNA, 41 bp, Homo sapiens; identical to SEQ ID NO: 8418
  chr1:55583106-55583147
  hypo

SEQ ID NO: 41425 - DNA, 126 bp, Homo sapiens; identical to SEQ ID NO: 287
  chr1:57044386-57044512
  hypo

SEQ ID NO: 41426 - DNA, 53 bp, Homo sapiens; identical to SEQ ID NO: 288
  chr1:57044989-57045042
  hypo

SEQ ID NO: 41427 - DNA, 31 bp, Homo sapiens; identical to SEQ ID NO: 8421
  chr1:58794164-58794195
  hypo

SEQ ID NO: 41428 - DNA, 31 bp, Homo sapiens; identical to SEQ ID NO: 8422
  chr1:59404584-59404615
  hypo

SEQ ID NO: 41429 - DNA, 55 bp, Homo sapiens; identical to SEQ ID NO: 293
  chr1:59762086-59762141
  hypo

SEQ ID NO: 41430 - DNA, 42 bp, Homo sapiens; identical to SEQ ID NO: 294
  chr1:59762154-59762196
  hypo

SEQ ID NO: 41431 - DNA, 62 bp, Homo sapiens; identical to SEQ ID NO: 296
  chr1:60280812-60280874
  hypo

SEQ ID NO: 41432 - DNA, 63 bp, Homo sapiens; identical to SEQ ID NO: 8427
  chr1:61445391-61445454
  hypo

SEQ ID NO: 41433 - DNA, 41 bp, Homo sapiens; identical to SEQ ID NO: 297
  chr1:61516033-61516074
  hypo

SEQ ID NO: 41434 - DNA, 31 bp, Homo sapiens; identical to SEQ ID NO: 8430
  chr1:61530060-61530091
  hypo

SEQ ID NO: 41435 - DNA, 31 bp, Homo sapiens; identical to SEQ ID NO: 8431
  chr1:61543522-61543553
  hypo

SEQ ID NO: 41436 - DNA, 314 bp, Homo sapiens; identical to SEQ ID NO: 299
  chr1:61547870-61548184
  hypo

SEQ ID NO: 41437 - DNA, 76 bp, Homo sapiens; identical to SEQ ID NO: 300
  chr1:61548948-61549024
  hypo

SEQ ID NO: 41438 - DNA, 31 bp, Homo sapiens; identical to SEQ ID NO: 301
  chr1:61549048-61549079
  hypo

SEQ ID NO: 41439 - DNA, 31 bp, Homo sapiens; identical to SEQ ID NO: 302
  chr1:61549083-61549114
  hypo

SEQ ID NO: 41440 - DNA, 31 bp, Homo sapiens; identical to SEQ ID NO: 8436
  chr1:61655354-61655385
  hypo

SEQ ID NO: 41441 - DNA, 48 bp, Homo sapiens; identical to SEQ ID NO: 8438
  chr1:61875329-61875377
  hypo

SEQ ID NO: 41442 - DNA, 31 bp, Homo sapiens; identical to SEQ ID NO: 8439
  chr1:61875389-61875420
  hypo

SEQ ID NO: 41443 - DNA, 31 bp, Homo sapiens; identical to SEQ ID NO: 8440
  chr1:61875423-61875454
  hypo

SEQ ID NO: 41444 - DNA, 31 bp, Homo sapiens; identical to SEQ ID NO: 8441
  chr1:61875458-61875489
  hypo

SEQ ID NO: 41445 - DNA, 31 bp, Homo sapiens; identical to SEQ ID NO: 8442
  chr1:61959223-61959254
  hypo

SEQ ID NO: 41446 - DNA, 31 bp, Homo sapiens; identical to SEQ ID NO: 8443
  chr1:62120543-62120574
  hypo

SEQ ID NO: 41447 - DNA, 51 bp, Homo sapiens; identical to SEQ ID NO: 304
  chr1:62207888-62207939
  hypo

SEQ ID NO: 41448 - DNA, 94 bp, Homo sapiens; identical to SEQ ID NO: 305
  chr1:62207948-62208042
  hypo

SEQ ID NO: 41449 - DNA, 218 bp, Homo sapiens; identical to SEQ ID NO: 309
  chr1:62208505-62208723
  hypo

SEQ ID NO: 41450 - DNA, 31 bp, Homo sapiens; identical to SEQ ID NO: 8447
  chr1:62285410-62285441
  hypo

SEQ ID NO: 41451 - DNA, 31 bp, Homo sapiens; identical to SEQ ID NO: 8448
  chr1:62734254-62734285
  hypo

SEQ ID NO: 41452 - DNA, 31 bp, Homo sapiens; identical to SEQ ID NO: 310
  chr1:63153559-63153590
  hypo

SEQ ID NO: 41453 - DNA, 108 bp, Homo sapiens; identical to SEQ ID NO: 315
  chr1:65210939-65211047
  hypo

SEQ ID NO: 41454 - DNA, 40 bp, Homo sapiens; identical to SEQ ID NO: 322
  chr1:65720328-65720368
  hypo

SEQ ID NO: 41455 - DNA, 31 bp, Homo sapiens; identical to SEQ ID NO: 323
  chr1:65886883-65886914
  hypo

SEQ ID NO: 41456 - DNA, 31 bp, Homo sapiens; identical to SEQ ID NO: 8455
  chr1:67797228-67797259
  hypo

SEQ ID NO: 41457 - DNA, 18 bp, Homo sapiens
  chr1:70710351-70710369
  hypo
cttttacactattaggcg

SEQ ID NO: 41458 - DNA, 48 bp, Homo sapiens
  chr1:70710406-70710454
  hypo
tctaggagtcggcgacgatccaaaagcccaaggcggagaagatctcat

SEQ ID NO: 41459 - DNA, 31 bp, Homo sapiens; identical to SEQ ID NO: 8459
  chr1:71519946-71519977
  hypo

SEQ ID NO: 41460 - DNA, 22 bp, Homo sapiens
  chr1:71519979-71520001
  hypo
ctgtgttcccagccagcgctag

SEQ ID NO: 41461 - DNA, 31 bp, Homo sapiens; identical to SEQ ID NO: 8461
  chr1:72740461-72740492
  hypo

SEQ ID NO: 41462 - DNA, 31 bp, Homo sapiens; identical to SEQ ID NO: 8462
  chr1:72740575-72740606
  hypo

SEQ ID NO: 41463 - DNA, 31 bp, Homo sapiens; identical to SEQ ID NO: 8463
  chr1:72885249-72885280
  hypo

SEQ ID NO: 41464 - DNA, 74 bp, Homo sapiens; identical to SEQ ID NO: 8464
  chr1:77165570-77165644
  hypo

SEQ ID NO: 41465 - DNA, 31 bp, Homo sapiens; identical to SEQ ID NO: 8465
  chr1:77992103-77992134
  hypo

SEQ ID NO: 41466 - DNA, 156 bp, Homo sapiens; identical to SEQ ID NO: 341
  chr1:85666851-85667007
  hypo

SEQ ID NO: 41467 - DNA, 51 bp, Homo sapiens; identical to SEQ ID NO: 342
  chr1:85667112-85667163
  hypo

SEQ ID NO: 41468 - DNA, 37 bp, Homo sapiens; identical to SEQ ID NO: 8471
  chr1:85725177-85725214
  hypo

SEQ ID NO: 41469 - DNA, 189 bp, Homo sapiens; identical to SEQ ID NO: 347
  chr1:85930279-85930468
  hypo

SEQ ID NO: 41470 - DNA, 49 bp, Homo sapiens; identical to SEQ ID NO: 348
  chr1:85930496-85930545
  hypo

SEQ ID NO: 41471 - DNA, 157 bp, Homo sapiens; identical to SEQ ID NO: 349
  chr1:85930555-85930712
  hypo

SEQ ID NO: 41472 - DNA, 56 bp, Homo sapiens; identical to SEQ ID NO: 350
  chr1:85930890-85930946
  hypo

SEQ ID NO: 41473 - DNA, 31 bp, Homo sapiens; identical to SEQ ID NO: 8477
  chr1:89148527-89148558
  hypo

SEQ ID NO: 41474 - DNA, 31 bp, Homo sapiens; identical to SEQ ID NO: 8478
  chr1:89228940-89228971
  hypo

SEQ ID NO: 41475 - DNA, 16 bp, Homo sapiens
  chr1:90309277-90309293
  hypo
ggagctcgcccaagcc

SEQ ID NO: 41476 - DNA, 61 bp, Homo sapiens; identical to SEQ ID NO: 8482
  chr1:92102534-92102595
  hypo

SEQ ID NO: 41477 - DNA, 53 bp, Homo sapiens; identical to SEQ ID NO: 8483
  chr1:92102677-92102730
  hypo

SEQ ID NO: 41478 - DNA, 107 bp, Homo sapiens; identical to SEQ ID NO: 382
  chr1:93250728-93250835
  hypo

SEQ ID NO: 41479 - DNA, 151 bp, Homo sapiens; identical to SEQ ID NO: 383
  chr1:93250907-93251058
  hypo

SEQ ID NO: 41480 - DNA, 31 bp, Homo sapiens; identical to SEQ ID NO: 8493
  chr1:93647179-93647210
  hypo

SEQ ID NO: 41481 - DNA, 88 bp, Homo sapiens; identical to SEQ ID NO: 384
  chr1:93913453-93913541
  hypo

SEQ ID NO: 41482 - DNA, 378 bp, Homo sapiens; identical to SEQ ID NO: 385
  chr1:93913688-93914066
  hypo

SEQ ID NO: 41483 - DNA, 63 bp, Homo sapiens; identical to SEQ ID NO: 386
  chr1:93914095-93914158
  hypo

SEQ ID NO: 41484 - DNA, 31 bp, Homo sapiens; identical to SEQ ID NO: 387
  chr1:93914232-93914263
  hypo

SEQ ID NO: 41485 - DNA, 47 bp, Homo sapiens; identical to SEQ ID NO: 388
  chr1:93914301-93914348
  hypo

SEQ ID NO: 41486 - DNA, 61 bp, Homo sapiens; identical to SEQ ID NO: 389
  chr1:93914404-93914465
  hypo

SEQ ID NO: 41487 - DNA, 31 bp, Homo sapiens; identical to SEQ ID NO: 8500
  chr1:93917485-93917516
  hypo

SEQ ID NO: 41488 - DNA, 72 bp, Homo sapiens; identical to SEQ ID NO: 8501
  chr1:94047870-94047942
  hypo

SEQ ID NO: 41489 - DNA, 31 bp, Homo sapiens; identical to SEQ ID NO: 8502
  chr1:94047972-94048003
  hypo

SEQ ID NO: 41490 - DNA, 42 bp, Homo sapiens; identical to SEQ ID NO: 8503
  chr1:94048009-94048051
  hypo

SEQ ID NO: 41491 - DNA, 49 bp, Homo sapiens
  chr1:94345699-94345748
  hypo
tgcatgtctttagggacggcatctaaaagagaggaggccgtccctgact

SEQ ID NO: 41492 - DNA, 54 bp, Homo sapiens; identical to SEQ ID NO: 8506
  chr1:94466587-94466641
  hypo

SEQ ID NO: 41493 - DNA, 31 bp, Homo sapiens; identical to SEQ ID NO: 8507
  chr1:94466749-94466780
  hypo

SEQ ID NO: 41494 - DNA, 31 bp, Homo sapiens; identical to SEQ ID NO: 8508
  chr1:94507307-94507338
  hypo

SEQ ID NO: 41495 - DNA, 39 bp, Homo sapiens; identical to SEQ ID NO: 8509
  chr1:94507721-94507760
  hypo

SEQ ID NO: 41496 - DNA, 42 bp, Homo sapiens; identical to SEQ ID NO: 8510
  chr1:94507771-94507813
  hypo

SEQ ID NO: 41497 - DNA, 31 bp, Homo sapiens; identical to SEQ ID NO: 8511
  chr1:94528402-94528433
  hypo

SEQ ID NO: 41498 - DNA, 31 bp, Homo sapiens; identical to SEQ ID NO: 8512
  chr1:94546399-94546430
  hypo

SEQ ID NO: 41499 - DNA, 112 bp, Homo sapiens; identical to SEQ ID NO: 35185
  chr1:94702824-94702936
  hypo

SEQ ID NO: 41500 - DNA, 31 bp, Homo sapiens; identical to SEQ ID NO: 35186
  chr1:94702990-94703021
  hypo

SEQ ID NO: 41501 - DNA, 79 bp, Homo sapiens; identical to SEQ ID NO: 402
  chr1:95007290-95007369
  hypo

SEQ ID NO: 41502 - DNA, 138 bp, Homo sapiens; identical to SEQ ID NO: 403
  chr1:95007378-95007516
  hypo

SEQ ID NO: 41503 - DNA, 32 bp, Homo sapiens; identical to SEQ ID NO: 8517
  chr1:95222490-95222522
  hypo

SEQ ID NO: 41504 - DNA, 31 bp, Homo sapiens; identical to SEQ ID NO: 8518
  chr1:95314374-95314405
  hypo

SEQ ID NO: 41505 - DNA, 31 bp, Homo sapiens; identical to SEQ ID NO: 407
  chr1:95391394-95391425
  hypo

SEQ ID NO: 41506 - DNA, 31 bp, Homo sapiens; identical to SEQ ID NO: 414
  chr1:95582867-95582898
  hypo

SEQ ID NO: 41507 - DNA, 41 bp, Homo sapiens; identical to SEQ ID NO: 415
  chr1:95583056-95583097
  hypo

SEQ ID NO: 41508 - DNA, 138 bp, Homo sapiens; identical to SEQ ID NO: 416
  chr1:95583267-95583405
  hypo

SEQ ID NO: 41509 - DNA, 31 bp, Homo sapiens; identical to SEQ ID NO: 419
  chr1:99127080-99127111
  hypo

SEQ ID NO: 41510 - DNA, 37 bp, Homo sapiens; identical to SEQ ID NO: 420
  chr1:99127233-99127270
  hypo

SEQ ID NO: 41511 - DNA, 53 bp, Homo sapiens; identical to SEQ ID NO: 421
  chr1:99127286-99127339
  hypo

SEQ ID NO: 41512 - DNA, 95 bp, Homo sapiens; identical to SEQ ID NO: 422
  chr1:99127365-99127460
  hypo

SEQ ID NO: 41513 - DNA, 31 bp, Homo sapiens; identical to SEQ ID NO: 423
  chr1:99127771-99127802
  hypo

SEQ ID NO: 41514 - DNA, 42 bp, Homo sapiens; identical to SEQ ID NO: 8530
  chr1:100106763-100106805
  hypo

SEQ ID NO: 41515 - DNA, 31 bp, Homo sapiens; identical to SEQ ID NO: 8531
  chr1:100106827-100106858
  hypo

SEQ ID NO: 41516 - DNA, 31 bp, Homo sapiens; identical to SEQ ID NO: 8532
  chr1:100106896-100106927
  hypo

SEQ ID NO: 41517 - DNA, 21 bp, Homo sapiens
  chr1:100437130-100437151
  hypo
gggattacaggcgtgagccac

SEQ ID NO: 41518 - DNA, 39 bp, Homo sapiens; identical to SEQ ID NO: 8535
  chr1:100928458-100928497
  hypo

SEQ ID NO: 41519 - DNA, 26 bp, Homo sapiens
  chr1:101702344-101702370
  hypo
ctcagcagttcagatccgggggcccc

SEQ ID NO: 41520 - DNA, 31 bp, Homo sapiens; identical to SEQ ID NO: 433
  chr1:101702806-101702837
  hypo

SEQ ID NO: 41521 - DNA, 31 bp, Homo sapiens; identical to SEQ ID NO: 434
  chr1:101702879-101702910
  hypo

SEQ ID NO: 41522 - DNA, 31 bp, Homo sapiens; identical to SEQ ID NO: 435
  chr1:101702911-101702942
  hypo

SEQ ID NO: 41523 - DNA, 72 bp, Homo sapiens; identical to SEQ ID NO: 442
  chr1:107600099-107600171
  hypo

SEQ ID NO: 41524 - DNA, 31 bp, Homo sapiens; identical to SEQ ID NO: 460
  chr1:109420435-109420466
  hypo

SEQ ID NO: 41525 - DNA, 31 bp, Homo sapiens; identical to SEQ ID NO: 8557
  chr1:109725167-109725198
  hypo

SEQ ID NO: 41526 - DNA, 68 bp, Homo sapiens; identical to SEQ ID NO: 8558
  chr1:109812119-109812187
  hypo

SEQ ID NO: 41527 - DNA, 95 bp, Homo sapiens; identical to SEQ ID NO: 8559
  chr1:109816184-109816279
  hypo

SEQ ID NO: 41528 - DNA, 71 bp, Homo sapiens; identical to SEQ ID NO: 463
  chr1:109940218-109940289
  hypo

SEQ ID NO: 41529 - DNA, 137 bp, Homo sapiens; identical to SEQ ID NO: 464
  chr1:109940368-109940505
  hypo

SEQ ID NO: 41530 - DNA, 45 bp, Homo sapiens; identical to SEQ ID NO: 465
  chr1:109940574-109940619
  hypo

SEQ ID NO: 41531 - DNA, 31 bp, Homo sapiens; identical to SEQ ID NO: 466
  chr1:109940635-109940666
  hypo

SEQ ID NO: 41532 - DNA, 31 bp, Homo sapiens; identical to SEQ ID NO: 467
  chr1:109940704-109940735
  hypo

SEQ ID NO: 41533 - DNA, 31 bp, Homo sapiens; identical to SEQ ID NO: 8565
  chr1:110027020-110027051
  hypo

SEQ ID NO: 41534 - DNA, 31 bp, Homo sapiens; identical to SEQ ID NO: 8567
  chr1:110042318-110042349
  hypo

SEQ ID NO: 41535 - DNA, 31 bp, Homo sapiens; identical to SEQ ID NO: 470
  chr1:110052254-110052285
  hypo

SEQ ID NO: 41536 - DNA, 31 bp, Homo sapiens; identical to SEQ ID NO: 8569
  chr1:110061030-110061061
  hypo

SEQ ID NO: 41537 - DNA, 31 bp, Homo sapiens; identical to SEQ ID NO: 8570
  chr1:110085338-110085369
  hypo

SEQ ID NO: 41538 - DNA, 31 bp, Homo sapiens; identical to SEQ ID NO: 8571
  chr1:110085374-110085405
  hypo

SEQ ID NO: 41539 - DNA, 31 bp, Homo sapiens; identical to SEQ ID NO: 8572
  chr1:110085422-110085453
  hypo

SEQ ID NO: 41540 - DNA, 40 bp, Homo sapiens; identical to SEQ ID NO: 8573
  chr1:110085469-110085509
  hypo

SEQ ID NO: 41541 - DNA, 45 bp, Homo sapiens; identical to SEQ ID NO: 8574
  chr1:110085847-110085892
  hypo

SEQ ID NO: 41542 - DNA, 31 bp, Homo sapiens; identical to SEQ ID NO: 8575
  chr1:110307261-110307292
  hypo

SEQ ID NO: 41543 - DNA, 31 bp, Homo sapiens; identical to SEQ ID NO: 8576
  chr1:110338330-110338361
  hypo

SEQ ID NO: 41544 - DNA, 148 bp, Homo sapiens; identical to SEQ ID NO: 473
  chr1:110453159-110453307
  hypo

SEQ ID NO: 41545 - DNA, 239 bp, Homo sapiens; identical to SEQ ID NO: 474
  chr1:110453530-110453769
  hypo

SEQ ID NO: 41546 - DNA, 160 bp, Homo sapiens; identical to SEQ ID NO: 475
  chr1:110453792-110453952
  hypo

SEQ ID NO: 41547 - DNA, 39 bp, Homo sapiens; identical to SEQ ID NO: 8583
  chr1:110738170-110738209
  hypo

SEQ ID NO: 41548 - DNA, 33 bp, Homo sapiens; identical to SEQ ID NO: 8584
  chr1:111001560-111001593
  hypo

SEQ ID NO: 41549 - DNA, 7 bp, Homo sapiens
  chr1:111204473-111204480
  hypo
aatccca

SEQ ID NO: 41550 - DNA, 31 bp, Homo sapiens; identical to SEQ ID NO: 8592
  chr1:112155751-112155782
  hypo

SEQ ID NO: 41551 - DNA, 43 bp, Homo sapiens; identical to SEQ ID NO: 492
  chr1:113249255-113249298
  hypo

SEQ ID NO: 41552 - DNA, 31 bp, Homo sapiens; identical to SEQ ID NO: 8595
  chr1:113399486-113399517
  hypo

SEQ ID NO: 41553 - DNA, 80 bp, Homo sapiens; identical to SEQ ID NO: 496
  chr1:113499269-113499349
  hypo

SEQ ID NO: 41554 - DNA, 31 bp, Homo sapiens; identical to SEQ ID NO: 497
  chr1:113499352-113499383
  hypo

SEQ ID NO: 41555 - DNA, 229 bp, Homo sapiens; identical to SEQ ID NO: 498
  chr1:113932572-113932801
  hypo

SEQ ID NO: 41556 - DNA, 31 bp, Homo sapiens; identical to SEQ ID NO: 499
  chr1:113932872-113932903
  hypo

SEQ ID NO: 41557 - DNA, 80 bp, Homo sapiens; identical to SEQ ID NO: 500
  chr1:113932989-113933069
  hypo

SEQ ID NO: 41558 - DNA, 162 bp, Homo sapiens; identical to SEQ ID NO: 501
  chr1:113933116-113933278
  hypo

SEQ ID NO: 41559 - DNA, 94 bp, Homo sapiens; identical to SEQ ID NO: 502
  chr1:113933395-113933489
  hypo

SEQ ID NO: 41560 - DNA, 165 bp, Homo sapiens; identical to SEQ ID NO: 503
  chr1:113933515-113933680
  hypo

SEQ ID NO: 41561 - DNA, 136 bp, Homo sapiens; identical to SEQ ID NO: 504
  chr1:113933692-113933828
  hypo

SEQ ID NO: 41562 - DNA, 80 bp, Homo sapiens; identical to SEQ ID NO: 505
  chr1:113933829-113933909
  hypo

SEQ ID NO: 41563 - DNA, 99 bp, Homo sapiens; identical to SEQ ID NO: 506
  chr1:113933912-113934011
  hypo

SEQ ID NO: 41564 - DNA, 71 bp, Homo sapiens; identical to SEQ ID NO: 507
  chr1:113934012-113934083
  hypo

SEQ ID NO: 41565 - DNA, 2 bp, Homo sapiens
  chr1:114355896-114355898
  hypo
ag

SEQ ID NO: 41566 - DNA, 286 bp, Homo sapiens; identical to SEQ ID NO: 508
  chr1:116184426-116184712
  hypo

SEQ ID NO: 41567 - DNA, 75 bp, Homo sapiens; identical to SEQ ID NO: 509
  chr1:116184713-116184788
  hypo

SEQ ID NO: 41568 - DNA, 108 bp, Homo sapiens; identical to SEQ ID NO: 510
  chr1:116184804-116184912
  hypo

SEQ ID NO: 41569 - DNA, 411 bp, Homo sapiens; identical to SEQ ID NO: 511
  chr1:116184919-116185330
  hypo

SEQ ID NO: 41570 - DNA, 57 bp, Homo sapiens; identical to SEQ ID NO: 512
  chr1:116185332-116185389
  hypo

SEQ ID NO: 41571 - DNA, 53 bp, Homo sapiens; identical to SEQ ID NO: 513
  chr1:116185400-116185453
  hypo

SEQ ID NO: 41572 - DNA, 31 bp, Homo sapiens; identical to SEQ ID NO: 514
  chr1:116185470-116185501
  hypo

SEQ ID NO: 41573 - DNA, 65 bp, Homo sapiens; identical to SEQ ID NO: 515
  chr1:116185508-116185573
  hypo

SEQ ID NO: 41574 - DNA, 31 bp, Homo sapiens; identical to SEQ ID NO: 8619
  chr1:116205679-116205710
  hypo

SEQ ID NO: 41575 - DNA, 31 bp, Homo sapiens; identical to SEQ ID NO: 8620
  chr1:116206290-116206321
  hypo

SEQ ID NO: 41576 - DNA, 37 bp, Homo sapiens; identical to SEQ ID NO: 8624
  chr1:116224396-116224433
  hypo

SEQ ID NO: 41577 - DNA, 51 bp, Homo sapiens; identical to SEQ ID NO: 8625
  chr1:116225056-116225107
  hypo

SEQ ID NO: 41578 - DNA, 31 bp, Homo sapiens; identical to SEQ ID NO: 8626
  chr1:116225124-116225155
  hypo

SEQ ID NO: 41579 - DNA, 40 bp, Homo sapiens; identical to SEQ ID NO: 8627
  chr1:116225173-116225213
  hypo

SEQ ID NO: 41580 - DNA, 31 bp, Homo sapiens; identical to SEQ ID NO: 8628
  chr1:116226507-116226538
  hypo

SEQ ID NO: 41581 - DNA, 31 bp, Homo sapiens; identical to SEQ ID NO: 8629
  chr1:116226577-116226608
  hypo

SEQ ID NO: 41582 - DNA, 31 bp, Homo sapiens; identical to SEQ ID NO: 8630
  chr1:116228226-116228257
  hypo

SEQ ID NO: 41583 - DNA, 47 bp, Homo sapiens; identical to SEQ ID NO: 8631
  chr1:116295787-116295834
  hypo

SEQ ID NO: 41584 - DNA, 31 bp, Homo sapiens; identical to SEQ ID NO: 8632
  chr1:116295846-116295877
  hypo

SEQ ID NO: 41585 - DNA, 50 bp, Homo sapiens; identical to SEQ ID NO: 8633
  chr1:116295924-116295974
  hypo

SEQ ID NO: 41586 - DNA, 31 bp, Homo sapiens; identical to SEQ ID NO: 8634
  chr1:116642573-116642604
  hypo

SEQ ID NO: 41587 - DNA, 52 bp, Homo sapiens; identical to SEQ ID NO: 8636
  chr1:116840628-116840680
  hypo

SEQ ID NO: 41588 - DNA, 31 bp, Homo sapiens; identical to SEQ ID NO: 8638
  chr1:117055697-117055728
  hypo

SEQ ID NO: 41589 - DNA, 62 bp, Homo sapiens; identical to SEQ ID NO: 8639
  chr1:117060146-117060208
  hypo

SEQ ID NO: 41590 - DNA, 77 bp, Homo sapiens; identical to SEQ ID NO: 8640
  chr1:117127237-117127314
  hypo

SEQ ID NO: 41591 - DNA, 65 bp, Homo sapiens; identical to SEQ ID NO: 8641
  chr1:117131422-117131487
  hypo

SEQ ID NO: 41592 - DNA, 55 bp, Homo sapiens; identical to SEQ ID NO: 8642
  chr1:117131503-117131558
  hypo

SEQ ID NO: 41593 - DNA, 31 bp, Homo sapiens; identical to SEQ ID NO: 8643
  chr1:117131563-117131594
  hypo

SEQ ID NO: 41594 - DNA, 35 bp, Homo sapiens; identical to SEQ ID NO: 8644
  chr1:117157579-117157614
  hypo

SEQ ID NO: 41595 - DNA, 56 bp, Homo sapiens; identical to SEQ ID NO: 517
  chr1:117210091-117210147
  hypo

SEQ ID NO: 41596 - DNA, 31 bp, Homo sapiens; identical to SEQ ID NO: 8646
  chr1:117250049-117250080
  hypo

SEQ ID NO: 41597 - DNA, 31 bp, Homo sapiens; identical to SEQ ID NO: 8647
  chr1:117371752-117371783
  hypo

SEQ ID NO: 41598 - DNA, 51 bp, Homo sapiens; identical to SEQ ID NO: 8648
  chr1:117450852-117450903
  hypo

SEQ ID NO: 41599 - DNA, 36 bp, Homo sapiens; identical to SEQ ID NO: 8649
  chr1:117451188-117451224
  hypo

SEQ ID NO: 41600 - DNA, 31 bp, Homo sapiens; identical to SEQ ID NO: 8650
  chr1:117452157-117452188
  hypo

SEQ ID NO: 41601 - DNA, 70 bp, Homo sapiens; identical to SEQ ID NO: 8651
  chr1:117503896-117503966
  hypo

SEQ ID NO: 41602 - DNA, 31 bp, Homo sapiens; identical to SEQ ID NO: 8652
  chr1:117509520-117509551
  hypo

SEQ ID NO: 41603 - DNA, 31 bp, Homo sapiens; identical to SEQ ID NO: 8653
  chr1:118163136-118163167
  hypo

SEQ ID NO: 41604 - DNA, 31 bp, Homo sapiens; identical to SEQ ID NO: 8655
  chr1:118163672-118163703
  hypo

SEQ ID NO: 41605 - DNA, 31 bp, Homo sapiens; identical to SEQ ID NO: 8656
  chr1:118163875-118163906
  hypo

SEQ ID NO: 41606 - DNA, 31 bp, Homo sapiens; identical to SEQ ID NO: 8657
  chr1:118166361-118166392
  hypo

SEQ ID NO: 41607 - DNA, 40 bp, Homo sapiens; identical to SEQ ID NO: 8658
  chr1:118166418-118166458
  hypo

SEQ ID NO: 41608 - DNA, 61 bp, Homo sapiens; identical to SEQ ID NO: 8659
  chr1:118166529-118166590
  hypo

SEQ ID NO: 41609 - DNA, 31 bp, Homo sapiens; identical to SEQ ID NO: 8660
  chr1:119876257-119876288
  hypo

SEQ ID NO: 41610 - DNA, 35 bp, Homo sapiens; identical to SEQ ID NO: 8664
  chr1:150283343-150283378
  hypo

SEQ ID NO: 41611 - DNA, 39 bp, Homo sapiens; identical to SEQ ID NO: 8665
  chr1:150504353-150504392
  hypo

SEQ ID NO: 41612 - DNA, 31 bp, Homo sapiens; identical to SEQ ID NO: 8668
  chr1:151164981-151165012
  hypo

SEQ ID NO: 41613 - DNA, 1 bp, Homo sapiens
  chr1:151169637-151169638
  hypo
t

SEQ ID NO: 41614 - DNA, 31 bp, Homo sapiens; identical to SEQ ID NO: 8673
  chr1:151338236-151338267
  hypo

SEQ ID NO: 41615 - DNA, 58 bp, Homo sapiens; identical to SEQ ID NO: 8674
  chr1:151338904-151338962
  hypo

SEQ ID NO: 41616 - DNA, 48 bp, Homo sapiens; identical to SEQ ID NO: 8675
  chr1:151339196-151339244
  hypo

SEQ ID NO: 41617 - DNA, 60 bp, Homo sapiens; identical to SEQ ID NO: 8676
  chr1:151339261-151339321
  hypo

SEQ ID NO: 41618 - DNA, 35 bp, Homo sapiens; identical to SEQ ID NO: 8677
  chr1:151339331-151339366
  hypo

SEQ ID NO: 41619 - DNA, 31 bp, Homo sapiens; identical to SEQ ID NO: 8678
  chr1:151346972-151347003
  hypo

SEQ ID NO: 41620 - DNA, 43 bp, Homo sapiens; identical to SEQ ID NO: 8679
  chr1:151356359-151356402
  hypo

SEQ ID NO: 41621 - DNA, 55 bp, Homo sapiens; identical to SEQ ID NO: 8680
  chr1:151356482-151356537
  hypo

SEQ ID NO: 41622 - DNA, 42 bp, Homo sapiens; identical to SEQ ID NO: 35273
  chr1:151693821-151693863
  hypo

SEQ ID NO: 41623 - DNA, 31 bp, Homo sapiens; identical to SEQ ID NO: 8683
  chr1:151829047-151829078
  hypo

SEQ ID NO: 41624 - DNA, 31 bp, Homo sapiens; identical to SEQ ID NO: 8684
  chr1:153537352-153537383
  hypo

SEQ ID NO: 41625 - DNA, 2 bp, Homo sapiens
  chr1:153540022-153540024
  hypo
aa

SEQ ID NO: 41626 - DNA, 31 bp, Homo sapiens; identical to SEQ ID NO: 8687
  chr1:153540247-153540278
  hypo

SEQ ID NO: 41627 - DNA, 129 bp, Homo sapiens; identical to SEQ ID NO: 538
  chr1:153936614-153936743
  hypo

SEQ ID NO: 41628 - DNA, 38 bp, Homo sapiens; identical to SEQ ID NO: 539
  chr1:153936753-153936791
  hypo

SEQ ID NO: 41629 - DNA, 2 bp, Homo sapiens
  chr1:153937069-153937071
  hypo
ca

SEQ ID NO: 41630 - DNA, 131 bp, Homo sapiens; identical to SEQ ID NO: 543
  chr1:153958680-153958811
  hypo

SEQ ID NO: 41631 - DNA, 87 bp, Homo sapiens; identical to SEQ ID NO: 544
  chr1:153958816-153958903
  hypo

SEQ ID NO: 41632 - DNA, 12 bp, Homo sapiens
  chr1:154098519-154098531
  hypo
aggcgtgagcca

SEQ ID NO: 41633 - DNA, 58 bp, Homo sapiens; identical to SEQ ID NO: 8698
  chr1:154116695-154116753
  hypo

SEQ ID NO: 41634 - DNA, 31 bp, Homo sapiens; identical to SEQ ID NO: 8699
  chr1:154243764-154243795
  hypo

SEQ ID NO: 41635 - DNA, 31 bp, Homo sapiens; identical to SEQ ID NO: 8700
  chr1:154243915-154243946
  hypo

SEQ ID NO: 41636 - DNA, 168 bp, Homo sapiens; identical to SEQ ID NO: 546
  chr1:154297758-154297926
  hypo

SEQ ID NO: 41637 - DNA, 73 bp, Homo sapiens; identical to SEQ ID NO: 35283
  chr1:154298038-154298111
  hypo

SEQ ID NO: 41638 - DNA, 2 bp, Homo sapiens
  chr1:154533445-154533447
  hypo
ta

SEQ ID NO: 41639 - DNA, 31 bp, Homo sapiens; identical to SEQ ID NO: 549
  chr1:154816590-154816621
  hypo

SEQ ID NO: 41640 - DNA, 37 bp, Homo sapiens; identical to SEQ ID NO: 8706
  chr1:154987688-154987725
  hypo

SEQ ID NO: 41641 - DNA, 31 bp, Homo sapiens; identical to SEQ ID NO: 8707
  chr1:155005173-155005204
  hypo

SEQ ID NO: 41642 - DNA, 31 bp, Homo sapiens; identical to SEQ ID NO: 8708
  chr1:155005731-155005762
  hypo

SEQ ID NO: 41643 - DNA, 38 bp, Homo sapiens; identical to SEQ ID NO: 8709
  chr1:155082408-155082446
  hypo

SEQ ID NO: 41644 - DNA, 31 bp, Homo sapiens; identical to SEQ ID NO: 553
  chr1:155099827-155099858
  hypo

SEQ ID NO: 41645 - DNA, 71 bp, Homo sapiens; identical to SEQ ID NO: 554
  chr1:155099899-155099970
  hypo

SEQ ID NO: 41646 - DNA, 2 bp, Homo sapiens
  chr1:155160924-155160926
  hypo
gc

SEQ ID NO: 41647 - DNA, 34 bp, Homo sapiens
  chr1:155161023-155161057
  hypo
aaggcgggcctgttgtccggggccgaggtgacac

SEQ ID NO: 41648 - DNA, 31 bp, Homo sapiens; identical to SEQ ID NO: 8714
  chr1:155283338-155283369
  hypo

SEQ ID NO: 41649 - DNA, 61 bp, Homo sapiens; identical to SEQ ID NO: 8715
  chr1:155403642-155403703
  hypo

SEQ ID NO: 41650 - DNA, 114 bp, Homo sapiens; identical to SEQ ID NO: 8716
  chr1:155403712-155403826
  hypo

SEQ ID NO: 41651 - DNA, 48 bp, Homo sapiens; identical to SEQ ID NO: 8717
  chr1:155466739-155466787
  hypo

SEQ ID NO: 41652 - DNA, 2 bp, Homo sapiens
  chr1:155659965-155659967
  hypo
aa

SEQ ID NO: 41653 - DNA, 2 bp, Homo sapiens
  chr1:155830323-155830325
  hypo
cc

SEQ ID NO: 41654 - DNA, 19 bp, Homo sapiens
  chr1:155830382-155830401
  hypo
gggcgcgatccaggccgga

SEQ ID NO: 41655 - DNA, 38 bp, Homo sapiens; identical to SEQ ID NO: 8722
  chr1:155862236-155862274
  hypo

SEQ ID NO: 41656 - DNA, 60 bp, Homo sapiens; identical to SEQ ID NO: 8726
  chr1:155911659-155911719
  hypo

SEQ ID NO: 41657 - DNA, 51 bp, Homo sapiens; identical to SEQ ID NO: 8727
  chr1:155911720-155911771
  hypo

SEQ ID NO: 41658 - DNA, 31 bp, Homo sapiens; identical to SEQ ID NO: 563
  chr1:156084628-156084659
  hypo

SEQ ID NO: 41659 - DNA, 31 bp, Homo sapiens; identical to SEQ ID NO: 8730
  chr1:156085875-156085906
  hypo

SEQ ID NO: 41660 - DNA, 31 bp, Homo sapiens; identical to SEQ ID NO: 8731
  chr1:156111391-156111422
  hypo

SEQ ID NO: 41661 - DNA, 45 bp, Homo sapiens; identical to SEQ ID NO: 8732
  chr1:156111503-156111548
  hypo

SEQ ID NO: 41662 - DNA, 31 bp, Homo sapiens; identical to SEQ ID NO: 8733
  chr1:156111549-156111580
  hypo

SEQ ID NO: 41663 - DNA, 31 bp, Homo sapiens; identical to SEQ ID NO: 8735
  chr1:156276676-156276707
  hypo

SEQ ID NO: 41664 - DNA, 39 bp, Homo sapiens; identical to SEQ ID NO: 8736
  chr1:156362386-156362425
  hypo

SEQ ID NO: 41665 - DNA, 48 bp, Homo sapiens; identical to SEQ ID NO: 8737
  chr1:156362432-156362480
  hypo

SEQ ID NO: 41666 - DNA, 31 bp, Homo sapiens; identical to SEQ ID NO: 8738
  chr1:156362506-156362537
  hypo

SEQ ID NO: 41667 - DNA, 31 bp, Homo sapiens; identical to SEQ ID NO: 8744
  chr1:156432017-156432048
  hypo

SEQ ID NO: 41668 - DNA, 31 bp, Homo sapiens; identical to SEQ ID NO: 8748
  chr1:156716807-156716838
  hypo

SEQ ID NO: 41669 - DNA, 2 bp, Homo sapiens
  chr1:157458772-157458774
  hypo
gg

SEQ ID NO: 41670 - DNA, 31 bp, Homo sapiens; identical to SEQ ID NO: 8753
  chr1:158098451-158098482
  hypo

SEQ ID NO: 41671 - DNA, 31 bp, Homo sapiens; identical to SEQ ID NO: 8754
  chr1:158098484-158098515
  hypo

SEQ ID NO: 41672 - DNA, 43 bp, Homo sapiens; identical to SEQ ID NO: 8756
  chr1:160121589-160121632
  hypo

SEQ ID NO: 41673 - DNA, 31 bp, Homo sapiens; identical to SEQ ID NO: 586
  chr1:160175619-160175650
  hypo

SEQ ID NO: 41674 - DNA, 31 bp, Homo sapiens; identical to SEQ ID NO: 8759
  chr1:160986424-160986455
  hypo

SEQ ID NO: 41675 - DNA, 2 bp, Homo sapiens
  chr1:161007586-161007588
  hypo
tc

SEQ ID NO: 41676 - DNA, 31 bp, Homo sapiens; identical to SEQ ID NO: 8763
  chr1:161145826-161145857
  hypo

SEQ ID NO: 41677 - DNA, 57 bp, Homo sapiens; identical to SEQ ID NO: 8765
  chr1:161367419-161367476
  hypo

SEQ ID NO: 41678 - DNA, 48 bp, Homo sapiens; identical to SEQ ID NO: 8766
  chr1:161367559-161367607
  hypo

SEQ ID NO: 41679 - DNA, 31 bp, Homo sapiens; identical to SEQ ID NO: 8770
  chr1:161370752-161370783
  hypo

SEQ ID NO: 41680 - DNA, 2 bp, Homo sapiens
  chr1:161879451-161879453
  hypo
ag

SEQ ID NO: 41681 - DNA, 135 bp, Homo sapiens; identical to SEQ ID NO: 603
  chr1:162039283-162039418
  hypo

SEQ ID NO: 41682 - DNA, 117 bp, Homo sapiens; identical to SEQ ID NO: 604
  chr1:162039485-162039602
  hypo

SEQ ID NO: 41683 - DNA, 82 bp, Homo sapiens; identical to SEQ ID NO: 605
  chr1:162039725-162039807
  hypo

SEQ ID NO: 41684 - DNA, 81 bp, Homo sapiens; identical to SEQ ID NO: 606
  chr1:162039811-162039892
  hypo

SEQ ID NO: 41685 - DNA, 55 bp, Homo sapiens; identical to SEQ ID NO: 607
  chr1:162039917-162039972
  hypo

SEQ ID NO: 41686 - DNA, 82 bp, Homo sapiens; identical to SEQ ID NO: 608
  chr1:162039983-162040065
  hypo

SEQ ID NO: 41687 - DNA, 36 bp, Homo sapiens; identical to SEQ ID NO: 8778
  chr1:162116824-162116860
  hypo

SEQ ID NO: 41688 - DNA, 31 bp, Homo sapiens; identical to SEQ ID NO: 8779
  chr1:162344601-162344632
  hypo

SEQ ID NO: 41689 - DNA, 31 bp, Homo sapiens; identical to SEQ ID NO: 8780
  chr1:162344656-162344687
  hypo

SEQ ID NO: 41690 - DNA, 31 bp, Homo sapiens; identical to SEQ ID NO: 8781
  chr1:164550440-164550471
  hypo

SEQ ID NO: 41691 - DNA, 31 bp, Homo sapiens; identical to SEQ ID NO: 8782
  chr1:164550735-164550766
  hypo

SEQ ID NO: 41692 - DNA, 31 bp, Homo sapiens; identical to SEQ ID NO: 8783
  chr1:164579428-164579459
  hypo

SEQ ID NO: 41693 - DNA, 31 bp, Homo sapiens; identical to SEQ ID NO: 8784
  chr1:164590593-164590624
  hypo

SEQ ID NO: 41694 - DNA, 31 bp, Homo sapiens; identical to SEQ ID NO: 8785
  chr1:164667271-164667302
  hypo

SEQ ID NO: 41695 - DNA, 31 bp, Homo sapiens; identical to SEQ ID NO: 8786
  chr1:164769264-164769295
  hypo

SEQ ID NO: 41696 - DNA, 42 bp, Homo sapiens; identical to SEQ ID NO: 610
  chr1:166135600-166135642
  hypo

SEQ ID NO: 41697 - DNA, 31 bp, Homo sapiens; identical to SEQ ID NO: 8789
  chr1:167065623-167065654
  hypo

SEQ ID NO: 41698 - DNA, 44 bp, Homo sapiens; identical to SEQ ID NO: 612
  chr1:167190357-167190401
  hypo

SEQ ID NO: 41699 - DNA, 2 bp, Homo sapiens
  chr1:167393582-167393584
  hypo
tc

SEQ ID NO: 41700 - DNA, 47 bp, Homo sapiens; identical to SEQ ID NO: 613
  chr1:167423948-167423995
  hypo

SEQ ID NO: 41701 - DNA, 40 bp, Homo sapiens; identical to SEQ ID NO: 8799
  chr1:167852541-167852581
  hypo

SEQ ID NO: 41702 - DNA, 6 bp, Homo sapiens
  chr1:168116155-168116161
  hypo
ggctct

SEQ ID NO: 41703 - DNA, 31 bp, Homo sapiens; identical to SEQ ID NO: 8802
  chr1:168150960-168150991
  hypo

SEQ ID NO: 41704 - DNA, 31 bp, Homo sapiens; identical to SEQ ID NO: 8806
  chr1:168882769-168882800
  hypo

SEQ ID NO: 41705 - DNA, 59 bp, Homo sapiens; identical to SEQ ID NO: 8807
  chr1:168882837-168882896
  hypo

SEQ ID NO: 41706 - DNA, 48 bp, Homo sapiens; identical to SEQ ID NO: 623
  chr1:169076041-169076089
  hypo

SEQ ID NO: 41707 - DNA, 76 bp, Homo sapiens; identical to SEQ ID NO: 624
  chr1:169076134-169076210
  hypo

SEQ ID NO: 41708 - DNA, 82 bp, Homo sapiens; identical to SEQ ID NO: 625
  chr1:169076243-169076325
  hypo

SEQ ID NO: 41709 - DNA, 31 bp, Homo sapiens; identical to SEQ ID NO: 8812
  chr1:169575616-169575647
  hypo

SEQ ID NO: 41710 - DNA, 2 bp, Homo sapiens
  chr1:169838015-169838017
  hypo
gc

SEQ ID NO: 41711 - DNA, 31 bp, Homo sapiens; identical to SEQ ID NO: 8816
  chr1:170521417-170521448
  hypo

SEQ ID NO: 41712 - DNA, 82 bp, Homo sapiens; identical to SEQ ID NO: 8817
  chr1:171554920-171555002
  hypo

SEQ ID NO: 41713 - DNA, 2 bp, Homo sapiens
  chr1:171555004-171555006
  hypo
tt

SEQ ID NO: 41714 - DNA, 31 bp, Homo sapiens; identical to SEQ ID NO: 8819
  chr1:171563323-171563354
  hypo

SEQ ID NO: 41715 - DNA, 2 bp, Homo sapiens
  chr1:171625524-171625526
  hypo
aa

SEQ ID NO: 41716 - DNA, 31 bp, Homo sapiens; identical to SEQ ID NO: 633
  chr1:173991621-173991652
  hypo

SEQ ID NO: 41717 - DNA, 2 bp, Homo sapiens
  chr1:173993035-173993037
  hypo
ag

SEQ ID NO: 41718 - DNA, 10 bp, Homo sapiens
  chr1:173993120-173993130
  hypo
cacgcctgta

SEQ ID NO: 41719 - DNA, 51 bp, Homo sapiens; identical to SEQ ID NO: 8824
  chr1:174634544-174634595
  hypo

SEQ ID NO: 41720 - DNA, 31 bp, Homo sapiens; identical to SEQ ID NO: 8825
  chr1:174903583-174903614
  hypo

SEQ ID NO: 41721 - DNA, 39 bp, Homo sapiens; identical to SEQ ID NO: 8826
  chr1:178007138-178007177
  hypo

SEQ ID NO: 41722 - DNA, 104 bp, Homo sapiens; identical to SEQ ID NO: 634
  chr1:178062639-178062743
  hypo

SEQ ID NO: 41723 - DNA, 346 bp, Homo sapiens; identical to SEQ ID NO: 635
  chr1:178062745-178063091
  hypo

SEQ ID NO: 41724 - DNA, 2 bp, Homo sapiens
  chr1:178063111-178063113
  hypo
cc

SEQ ID NO: 41725 - DNA, 87 bp, Homo sapiens; identical to SEQ ID NO: 35345
  chr1:178063150-178063237
  hypo

SEQ ID NO: 41726 - DNA, 200 bp, Homo sapiens; identical to SEQ ID NO: 637
  chr1:178063273-178063473
  hypo

SEQ ID NO: 41727 - DNA, 59 bp, Homo sapiens; identical to SEQ ID NO: 35347
  chr1:178063567-178063626
  hypo

SEQ ID NO: 41728 - DNA, 40 bp, Homo sapiens; identical to SEQ ID NO: 35348
  chr1:178063733-178063773
  hypo

SEQ ID NO: 41729 - DNA, 31 bp, Homo sapiens; identical to SEQ ID NO: 8833
  chr1:178099910-178099941
  hypo

SEQ ID NO: 41730 - DNA, 31 bp, Homo sapiens; identical to SEQ ID NO: 8836
  chr1:178228197-178228228
  hypo

SEQ ID NO: 41731 - DNA, 31 bp, Homo sapiens; identical to SEQ ID NO: 8837
  chr1:178228553-178228584
  hypo

SEQ ID NO: 41732 - DNA, 31 bp, Homo sapiens; identical to SEQ ID NO: 8838
  chr1:178271748-178271779
  hypo

SEQ ID NO: 41733 - DNA, 31 bp, Homo sapiens; identical to SEQ ID NO: 8839
  chr1:178271785-178271816
  hypo

SEQ ID NO: 41734 - DNA, 40 bp, Homo sapiens; identical to SEQ ID NO: 8841
  chr1:178465303-178465343
  hypo

SEQ ID NO: 41735 - DNA, 31 bp, Homo sapiens; identical to SEQ ID NO: 640
  chr1:178694819-178694850
  hypo

SEQ ID NO: 41736 - DNA, 31 bp, Homo sapiens; identical to SEQ ID NO: 8845
  chr1:178988944-178988975
  hypo

SEQ ID NO: 41737 - DNA, 4 bp, Homo sapiens
  chr1:178994344-178994348
  hypo
gacc

SEQ ID NO: 41738 - DNA, 45 bp, Homo sapiens; identical to SEQ ID NO: 8850
  chr1:180478156-180478201
  hypo

SEQ ID NO: 41739 - DNA, 52 bp, Homo sapiens; identical to SEQ ID NO: 8851
  chr1:180885189-180885241
  hypo

SEQ ID NO: 41740 - DNA, 82 bp, Homo sapiens; identical to SEQ ID NO: 8852
  chr1:180888524-180888606
  hypo

SEQ ID NO: 41741 - DNA, 31 bp, Homo sapiens; identical to SEQ ID NO: 8853
  chr1:180888618-180888649
  hypo

SEQ ID NO: 41742 - DNA, 31 bp, Homo sapiens; identical to SEQ ID NO: 8854
  chr1:180888672-180888703
  hypo

SEQ ID NO: 41743 - DNA, 29 bp, Homo sapiens
  chr1:180925243-180925272
  hypo
aagaagctctgcccagcgctctctggctg

SEQ ID NO: 41744 - DNA, 36 bp, Homo sapiens; identical to SEQ ID NO: 8856
  chr1:181382649-181382685
  hypo

SEQ ID NO: 41745 - DNA, 31 bp, Homo sapiens; identical to SEQ ID NO: 8857
  chr1:181382823-181382854
  hypo

SEQ ID NO: 41746 - DNA, 31 bp, Homo sapiens; identical to SEQ ID NO: 8858
  chr1:182148662-182148693
  hypo

SEQ ID NO: 41747 - DNA, 31 bp, Homo sapiens; identical to SEQ ID NO: 8859
  chr1:182292205-182292236
  hypo

SEQ ID NO: 41748 - DNA, 36 bp, Homo sapiens; identical to SEQ ID NO: 8866
  chr1:182992749-182992785
  hypo

SEQ ID NO: 41749 - DNA, 117 bp, Homo sapiens; identical to SEQ ID NO: 649
  chr1:182992919-182993036
  hypo

SEQ ID NO: 41750 - DNA, 31 bp, Homo sapiens; identical to SEQ ID NO: 8868
  chr1:183129204-183129235
  hypo

SEQ ID NO: 41751 - DNA, 2 bp, Homo sapiens
  chr1:183129381-183129383
  hypo
cc

SEQ ID NO: 41752 - DNA, 31 bp, Homo sapiens; identical to SEQ ID NO: 8870
  chr1:184333000-184333031
  hypo

SEQ ID NO: 41753 - DNA, 31 bp, Homo sapiens; identical to SEQ ID NO: 8871
  chr1:184333052-184333083
  hypo

SEQ ID NO: 41754 - DNA, 31 bp, Homo sapiens; identical to SEQ ID NO: 8872
  chr1:184333135-184333166
  hypo

SEQ ID NO: 41755 - DNA, 74 bp, Homo sapiens; identical to SEQ ID NO: 653
  chr1:184355814-184355888
  hypo

SEQ ID NO: 41756 - DNA, 71 bp, Homo sapiens; identical to SEQ ID NO: 654
  chr1:184355957-184356028
  hypo

SEQ ID NO: 41757 - DNA, 141 bp, Homo sapiens; identical to SEQ ID NO: 655
  chr1:184356073-184356214
  hypo

SEQ ID NO: 41758 - DNA, 97 bp, Homo sapiens; identical to SEQ ID NO: 656
  chr1:184356590-184356687
  hypo

SEQ ID NO: 41759 - DNA, 31 bp, Homo sapiens; identical to SEQ ID NO: 8877
  chr1:184442500-184442531
  hypo

SEQ ID NO: 41760 - DNA, 53 bp, Homo sapiens; identical to SEQ ID NO: 8878
  chr1:184764468-184764521
  hypo

SEQ ID NO: 41761 - DNA, 31 bp, Homo sapiens; identical to SEQ ID NO: 8879
  chr1:184774919-184774950
  hypo

SEQ ID NO: 41762 - DNA, 31 bp, Homo sapiens; identical to SEQ ID NO: 8880
  chr1:185413916-185413947
  hypo

SEQ ID NO: 41763 - DNA, 31 bp, Homo sapiens; identical to SEQ ID NO: 8881
  chr1:185630509-185630540
  hypo

SEQ ID NO: 41764 - DNA, 49 bp, Homo sapiens; identical to SEQ ID NO: 8882
  chr1:186344812-186344861
  hypo

SEQ ID NO: 41765 - DNA, 65 bp, Homo sapiens; identical to SEQ ID NO: 8883
  chr1:193149420-193149485
  hypo

SEQ ID NO: 41766 - DNA, 44 bp, Homo sapiens; identical to SEQ ID NO: 8884
  chr1:193149560-193149604
  hypo

SEQ ID NO: 41767 - DNA, 18 bp, Homo sapiens
  chr1:198124781-198124799
  hypo
tttcgctctttcacccac

SEQ ID NO: 41768 - DNA, 31 bp, Homo sapiens; identical to SEQ ID NO: 8886
  chr1:200513746-200513777
  hypo

SEQ ID NO: 41769 - DNA, 31 bp, Homo sapiens; identical to SEQ ID NO: 8887
  chr1:200556915-200556946
  hypo

SEQ ID NO: 41770 - DNA, 31 bp, Homo sapiens; identical to SEQ ID NO: 8888
  chr1:200589466-200589497
  hypo

SEQ ID NO: 41771 - DNA, 236 bp, Homo sapiens; identical to SEQ ID NO: 657
  chr1:200708631-200708867
  hypo

SEQ ID NO: 41772 - DNA, 31 bp, Homo sapiens; identical to SEQ ID NO: 8890
  chr1:200937987-200938018
  hypo

SEQ ID NO: 41773 - DNA, 2 bp, Homo sapiens
  chr1:200941619-200941621
  hypo
cc

SEQ ID NO: 41774 - DNA, 39 bp, Homo sapiens; identical to SEQ ID NO: 8892
  chr1:200942599-200942638
  hypo

SEQ ID NO: 41775 - DNA, 68 bp, Homo sapiens; identical to SEQ ID NO: 8893
  chr1:200942643-200942711
  hypo

SEQ ID NO: 41776 - DNA, 31 bp, Homo sapiens; identical to SEQ ID NO: 8894
  chr1:200951960-200951991
  hypo

SEQ ID NO: 41777 - DNA, 51 bp, Homo sapiens; identical to SEQ ID NO: 8895
  chr1:200956135-200956186
  hypo

SEQ ID NO: 41778 - DNA, 31 bp, Homo sapiens; identical to SEQ ID NO: 8896
  chr1:200964905-200964936
  hypo

SEQ ID NO: 41779 - DNA, 31 bp, Homo sapiens; identical to SEQ ID NO: 8898
  chr1:201036179-201036210
  hypo

SEQ ID NO: 41780 - DNA, 31 bp, Homo sapiens; identical to SEQ ID NO: 658
  chr1:201050380-201050411
  hypo

SEQ ID NO: 41781 - DNA, 31 bp, Homo sapiens; identical to SEQ ID NO: 8900
  chr1:201069412-201069443
  hypo

SEQ ID NO: 41782 - DNA, 59 bp, Homo sapiens; identical to SEQ ID NO: 660
  chr1:201083369-201083428
  hypo

SEQ ID NO: 41783 - DNA, 122 bp, Homo sapiens; identical to SEQ ID NO: 661
  chr1:201083442-201083564
  hypo

SEQ ID NO: 41784 - DNA, 31 bp, Homo sapiens; identical to SEQ ID NO: 662
  chr1:201083641-201083672
  hypo

SEQ ID NO: 41785 - DNA, 37 bp, Homo sapiens; identical to SEQ ID NO: 8904
  chr1:201168309-201168346
  hypo

SEQ ID NO: 41786 - DNA, 31 bp, Homo sapiens; identical to SEQ ID NO: 8905
  chr1:201168413-201168444
  hypo

SEQ ID NO: 41787 - DNA, 59 bp, Homo sapiens; identical to SEQ ID NO: 8906
  chr1:201168453-201168512
  hypo

SEQ ID NO: 41788 - DNA, 31 bp, Homo sapiens; identical to SEQ ID NO: 8907
  chr1:201187509-201187540
  hypo

SEQ ID NO: 41789 - DNA, 38 bp, Homo sapiens; identical to SEQ ID NO: 8908
  chr1:201244906-201244944
  hypo

SEQ ID NO: 41790 - DNA, 31 bp, Homo sapiens; identical to SEQ ID NO: 8909
  chr1:201244970-201245001
  hypo

SEQ ID NO: 41791 - DNA, 49 bp, Homo sapiens; identical to SEQ ID NO: 8910
  chr1:201245047-201245096
  hypo

SEQ ID NO: 41792 - DNA, 51 bp, Homo sapiens; identical to SEQ ID NO: 8911
  chr1:201261830-201261881
  hypo

SEQ ID NO: 41793 - DNA, 51 bp, Homo sapiens; identical to SEQ ID NO: 8912
  chr1:201261955-201262006
  hypo

SEQ ID NO: 41794 - DNA, 31 bp, Homo sapiens; identical to SEQ ID NO: 8913
  chr1:201262008-201262039
  hypo

SEQ ID NO: 41795 - DNA, 56 bp, Homo sapiens; identical to SEQ ID NO: 8914
  chr1:201355457-201355513
  hypo

SEQ ID NO: 41796 - DNA, 40 bp, Homo sapiens; identical to SEQ ID NO: 8915
  chr1:201355587-201355627
  hypo

SEQ ID NO: 41797 - DNA, 31 bp, Homo sapiens; identical to SEQ ID NO: 8916
  chr1:201358467-201358498
  hypo

SEQ ID NO: 41798 - DNA, 31 bp, Homo sapiens; identical to SEQ ID NO: 8917
  chr1:201380508-201380539
  hypo

SEQ ID NO: 41799 - DNA, 31 bp, Homo sapiens; identical to SEQ ID NO: 666
  chr1:201507612-201507643
  hypo

SEQ ID NO: 41800 - DNA, 31 bp, Homo sapiens; identical to SEQ ID NO: 8921
  chr1:202022786-202022817
  hypo

SEQ ID NO: 41801 - DNA, 31 bp, Homo sapiens; identical to SEQ ID NO: 8924
  chr1:202032940-202032971
  hypo

SEQ ID NO: 41802 - DNA, 31 bp, Homo sapiens; identical to SEQ ID NO: 8925
  chr1:202049891-202049922
  hypo

SEQ ID NO: 41803 - DNA, 39 bp, Homo sapiens; identical to SEQ ID NO: 8927
  chr1:202052583-202052622
  hypo

SEQ ID NO: 41804 - DNA, 43 bp, Homo sapiens; identical to SEQ ID NO: 8928
  chr1:202058379-202058422
  hypo

SEQ ID NO: 41805 - DNA, 62 bp, Homo sapiens; identical to SEQ ID NO: 8930
  chr1:202097361-202097423
  hypo

SEQ ID NO: 41806 - DNA, 31 bp, Homo sapiens; identical to SEQ ID NO: 8931
  chr1:202115853-202115884
  hypo

SEQ ID NO: 41807 - DNA, 31 bp, Homo sapiens; identical to SEQ ID NO: 8932
  chr1:202115900-202115931
  hypo

SEQ ID NO: 41808 - DNA, 31 bp, Homo sapiens; identical to SEQ ID NO: 8933
  chr1:202127154-202127185
  hypo

SEQ ID NO: 41809 - DNA, 31 bp, Homo sapiens; identical to SEQ ID NO: 8934
  chr1:202218131-202218162
  hypo

SEQ ID NO: 41810 - DNA, 61 bp, Homo sapiens; identical to SEQ ID NO: 8935
  chr1:202218200-202218261
  hypo

SEQ ID NO: 41811 - DNA, 31 bp, Homo sapiens; identical to SEQ ID NO: 8936
  chr1:202218290-202218321
  hypo

SEQ ID NO: 41812 - DNA, 50 bp, Homo sapiens; identical to SEQ ID NO: 8937
  chr1:202287418-202287468
  hypo

SEQ ID NO: 41813 - DNA, 31 bp, Homo sapiens; identical to SEQ ID NO: 8938
  chr1:202287547-202287578
  hypo

SEQ ID NO: 41814 - DNA, 31 bp, Homo sapiens; identical to SEQ ID NO: 8939
  chr1:202287658-202287689
  hypo

SEQ ID NO: 41815 - DNA, 31 bp, Homo sapiens; identical to SEQ ID NO: 8940
  chr1:202287691-202287722
  hypo

SEQ ID NO: 41816 - DNA, 41 bp, Homo sapiens; identical to SEQ ID NO: 8941
  chr1:202287825-202287866
  hypo

SEQ ID NO: 41817 - DNA, 31 bp, Homo sapiens; identical to SEQ ID NO: 8942
  chr1:202306342-202306373
  hypo

SEQ ID NO: 41818 - DNA, 31 bp, Homo sapiens; identical to SEQ ID NO: 8943
  chr1:202455900-202455931
  hypo

SEQ ID NO: 41819 - DNA, 31 bp, Homo sapiens; identical to SEQ ID NO: 672
  chr1:202612864-202612895
  hypo

SEQ ID NO: 41820 - DNA, 91 bp, Homo sapiens; identical to SEQ ID NO: 673
  chr1:202612931-202613022
  hypo

SEQ ID NO: 41821 - DNA, 2 bp, Homo sapiens
  chr1:202933729-202933731
  hypo
tg

SEQ ID NO: 41822 - DNA, 31 bp, Homo sapiens; identical to SEQ ID NO: 675
  chr1:202935961-202935992
  hypo

SEQ ID NO: 41823 - DNA, 31 bp, Homo sapiens; identical to SEQ ID NO: 8950
  chr1:202940672-202940703
  hypo

SEQ ID NO: 41824 - DNA, 2 bp, Homo sapiens
  chr1:202995300-202995302
  hypo
tt

SEQ ID NO: 41825 - DNA, 31 bp, Homo sapiens; identical to SEQ ID NO: 8952
  chr1:203054705-203054736
  hypo

SEQ ID NO: 41826 - DNA, 36 bp, Homo sapiens; identical to SEQ ID NO: 8953
  chr1:203140949-203140985
  hypo

SEQ ID NO: 41827 - DNA, 31 bp, Homo sapiens; identical to SEQ ID NO: 676
  chr1:203143408-203143439
  hypo

SEQ ID NO: 41828 - DNA, 31 bp, Homo sapiens; identical to SEQ ID NO: 8955
  chr1:203242259-203242290
  hypo

SEQ ID NO: 41829 - DNA, 31 bp, Homo sapiens; identical to SEQ ID NO: 678
  chr1:203561334-203561365
  hypo

SEQ ID NO: 41830 - DNA, 31 bp, Homo sapiens; identical to SEQ ID NO: 8957
  chr1:204003760-204003791
  hypo

SEQ ID NO: 41831 - DNA, 31 bp, Homo sapiens; identical to SEQ ID NO: 8958
  chr1:204003834-204003865
  hypo

SEQ ID NO: 41832 - DNA, 31 bp, Homo sapiens; identical to SEQ ID NO: 8960
  chr1:204031964-204031995
  hypo

SEQ ID NO: 41833 - DNA, 88 bp, Homo sapiens; identical to SEQ ID NO: 686
  chr1:204043483-204043571
  hypo

SEQ ID NO: 41834 - DNA, 31 bp, Homo sapiens; identical to SEQ ID NO: 8963
  chr1:204091447-204091478
  hypo

SEQ ID NO: 41835 - DNA, 31 bp, Homo sapiens; identical to SEQ ID NO: 8964
  chr1:204092697-204092728
  hypo

SEQ ID NO: 41836 - DNA, 31 bp, Homo sapiens; identical to SEQ ID NO: 8965
  chr1:204093984-204094015
  hypo

SEQ ID NO: 41837 - DNA, 35 bp, Homo sapiens; identical to SEQ ID NO: 8966
  chr1:204094089-204094124
  hypo

SEQ ID NO: 41838 - DNA, 40 bp, Homo sapiens; identical to SEQ ID NO: 8967
  chr1:204094128-204094168
  hypo

SEQ ID NO: 41839 - DNA, 31 bp, Homo sapiens; identical to SEQ ID NO: 8968
  chr1:204106497-204106528
  hypo

SEQ ID NO: 41840 - DNA, 31 bp, Homo sapiens; identical to SEQ ID NO: 8970
  chr1:204125071-204125102
  hypo

SEQ ID NO: 41841 - DNA, 31 bp, Homo sapiens; identical to SEQ ID NO: 8971
  chr1:204187311-204187342
  hypo

SEQ ID NO: 41842 - DNA, 31 bp, Homo sapiens; identical to SEQ ID NO: 8972
  chr1:204197938-204197969
  hypo

SEQ ID NO: 41843 - DNA, 31 bp, Homo sapiens; identical to SEQ ID NO: 8973
  chr1:204198307-204198338
  hypo

SEQ ID NO: 41844 - DNA, 31 bp, Homo sapiens; identical to SEQ ID NO: 8974
  chr1:204199618-204199649
  hypo

SEQ ID NO: 41845 - DNA, 59 bp, Homo sapiens; identical to SEQ ID NO: 8975
  chr1:204212335-204212394
  hypo

SEQ ID NO: 41846 - DNA, 31 bp, Homo sapiens; identical to SEQ ID NO: 8976
  chr1:204216413-204216444
  hypo

SEQ ID NO: 41847 - DNA, 31 bp, Homo sapiens; identical to SEQ ID NO: 8977
  chr1:204217169-204217200
  hypo

SEQ ID NO: 41848 - DNA, 31 bp, Homo sapiens; identical to SEQ ID NO: 8978
  chr1:204217218-204217249
  hypo

SEQ ID NO: 41849 - DNA, 31 bp, Homo sapiens; identical to SEQ ID NO: 8979
  chr1:204220390-204220421
  hypo

SEQ ID NO: 41850 - DNA, 86 bp, Homo sapiens; identical to SEQ ID NO: 8980
  chr1:204226615-204226701
  hypo

SEQ ID NO: 41851 - DNA, 97 bp, Homo sapiens; identical to SEQ ID NO: 8981
  chr1:204226702-204226799
  hypo

SEQ ID NO: 41852 - DNA, 108 bp, Homo sapiens; identical to SEQ ID NO: 8982
  chr1:204226833-204226941
  hypo

SEQ ID NO: 41853 - DNA, 31 bp, Homo sapiens; identical to SEQ ID NO: 8983
  chr1:204228402-204228433
  hypo

SEQ ID NO: 41854 - DNA, 100 bp, Homo sapiens; identical to SEQ ID NO: 8984
  chr1:204228471-204228571
  hypo

SEQ ID NO: 41855 - DNA, 31 bp, Homo sapiens; identical to SEQ ID NO: 8985
  chr1:204286091-204286122
  hypo

SEQ ID NO: 41856 - DNA, 89 bp, Homo sapiens; identical to SEQ ID NO: 690
  chr1:204347105-204347194
  hypo

SEQ ID NO: 41857 - DNA, 57 bp, Homo sapiens; identical to SEQ ID NO: 691
  chr1:204347196-204347253
  hypo

SEQ ID NO: 41858 - DNA, 54 bp, Homo sapiens; identical to SEQ ID NO: 692
  chr1:204347293-204347347
  hypo

SEQ ID NO: 41859 - DNA, 31 bp, Homo sapiens; identical to SEQ ID NO: 693
  chr1:204347367-204347398
  hypo

SEQ ID NO: 41860 - DNA, 31 bp, Homo sapiens; identical to SEQ ID NO: 8990
  chr1:204358693-204358724
  hypo

SEQ ID NO: 41861 - DNA, 31 bp, Homo sapiens; identical to SEQ ID NO: 8991
  chr1:204394217-204394248
  hypo

SEQ ID NO: 41862 - DNA, 31 bp, Homo sapiens; identical to SEQ ID NO: 8992
  chr1:204487137-204487168
  hypo

SEQ ID NO: 41863 - DNA, 31 bp, Homo sapiens; identical to SEQ ID NO: 694
  chr1:204487762-204487793
  hypo

SEQ ID NO: 41864 - DNA, 31 bp, Homo sapiens; identical to SEQ ID NO: 8994
  chr1:204497982-204498013
  hypo

SEQ ID NO: 41865 - DNA, 31 bp, Homo sapiens; identical to SEQ ID NO: 8995
  chr1:204665809-204665840
  hypo

SEQ ID NO: 41866 - DNA, 31 bp, Homo sapiens; identical to SEQ ID NO: 8997
  chr1:204954944-204954975
  hypo

SEQ ID NO: 41867 - DNA, 31 bp, Homo sapiens; identical to SEQ ID NO: 8998
  chr1:204955016-204955047
  hypo

SEQ ID NO: 41868 - DNA, 42 bp, Homo sapiens; identical to SEQ ID NO: 8999
  chr1:204955102-204955144
  hypo

SEQ ID NO: 41869 - DNA, 31 bp, Homo sapiens; identical to SEQ ID NO: 9000
  chr1:204962416-204962447
  hypo

SEQ ID NO: 41870 - DNA, 46 bp, Homo sapiens; identical to SEQ ID NO: 9003
  chr1:205144483-205144529
  hypo

SEQ ID NO: 41871 - DNA, 31 bp, Homo sapiens; identical to SEQ ID NO: 9005
  chr1:205250964-205250995
  hypo

SEQ ID NO: 41872 - DNA, 31 bp, Homo sapiens; identical to SEQ ID NO: 702
  chr1:205426080-205426111
  hypo

SEQ ID NO: 41873 - DNA, 31 bp, Homo sapiens; identical to SEQ ID NO: 9013
  chr1:207130058-207130089
  hypo

SEQ ID NO: 41874 - DNA, 31 bp, Homo sapiens; identical to SEQ ID NO: 9014
  chr1:207130092-207130123
  hypo

SEQ ID NO: 41875 - DNA, 31 bp, Homo sapiens; identical to SEQ ID NO: 9015
  chr1:207130175-207130206
  hypo

SEQ ID NO: 41876 - DNA, 31 bp, Homo sapiens; identical to SEQ ID NO: 9016
  chr1:207130211-207130242
  hypo

SEQ ID NO: 41877 - DNA, 31 bp, Homo sapiens; identical to SEQ ID NO: 9018
  chr1:207596502-207596533
  hypo

SEQ ID NO: 41878 - DNA, 31 bp, Homo sapiens; identical to SEQ ID NO: 9019
  chr1:207832515-207832546
  hypo

SEQ ID NO: 41879 - DNA, 31 bp, Homo sapiens; identical to SEQ ID NO: 9021
  chr1:208201565-208201596
  hypo

SEQ ID NO: 41880 - DNA, 56 bp, Homo sapiens; identical to SEQ ID NO: 9022
  chr1:208212990-208213046
  hypo

SEQ ID NO: 41881 - DNA, 31 bp, Homo sapiens; identical to SEQ ID NO: 9023
  chr1:208213089-208213120
  hypo

SEQ ID NO: 41882 - DNA, 74 bp, Homo sapiens; identical to SEQ ID NO: 9024
  chr1:208213129-208213203
  hypo

SEQ ID NO: 41883 - DNA, 31 bp, Homo sapiens; identical to SEQ ID NO: 9025
  chr1:208215054-208215085
  hypo

SEQ ID NO: 41884 - DNA, 31 bp, Homo sapiens; identical to SEQ ID NO: 9026
  chr1:208317146-208317177
  hypo

SEQ ID NO: 41885 - DNA, 31 bp, Homo sapiens; identical to SEQ ID NO: 9027
  chr1:208397335-208397366
  hypo

SEQ ID NO: 41886 - DNA, 31 bp, Homo sapiens; identical to SEQ ID NO: 9028
  chr1:208405048-208405079
  hypo

SEQ ID NO: 41887 - DNA, 306 bp, Homo sapiens; identical to SEQ ID NO: 709
  chr1:208416771-208417077
  hypo

SEQ ID NO: 41888 - DNA, 42 bp, Homo sapiens; identical to SEQ ID NO: 711
  chr1:208417260-208417302
  hypo

SEQ ID NO: 41889 - DNA, 31 bp, Homo sapiens; identical to SEQ ID NO: 713
  chr1:208418805-208418836
  hypo

SEQ ID NO: 41890 - DNA, 31 bp, Homo sapiens; identical to SEQ ID NO: 9032
  chr1:209790962-209790993
  hypo

SEQ ID NO: 41891 - DNA, 31 bp, Homo sapiens; identical to SEQ ID NO: 9033
  chr1:209808685-209808716
  hypo

SEQ ID NO: 41892 - DNA, 47 bp, Homo sapiens; identical to SEQ ID NO: 9035
  chr1:210560010-210560057
  hypo

SEQ ID NO: 41893 - DNA, 45 bp, Homo sapiens; identical to SEQ ID NO: 9036
  chr1:210857128-210857173
  hypo

SEQ ID NO: 41894 - DNA, 31 bp, Homo sapiens; identical to SEQ ID NO: 9037
  chr1:210857408-210857439
  hypo

SEQ ID NO: 41895 - DNA, 31 bp, Homo sapiens; identical to SEQ ID NO: 9039
  chr1:211430530-211430561
  hypo

SEQ ID NO: 41896 - DNA, 31 bp, Homo sapiens; identical to SEQ ID NO: 9040
  chr1:211518071-211518102
  hypo

SEQ ID NO: 41897 - DNA, 31 bp, Homo sapiens; identical to SEQ ID NO: 9041
  chr1:211824878-211824909
  hypo

SEQ ID NO: 41898 - DNA, 31 bp, Homo sapiens; identical to SEQ ID NO: 9042
  chr1:211824918-211824949
  hypo

SEQ ID NO: 41899 - DNA, 31 bp, Homo sapiens; identical to SEQ ID NO: 9043
  chr1:211969081-211969112
  hypo

SEQ ID NO: 41900 - DNA, 31 bp, Homo sapiens; identical to SEQ ID NO: 9044
  chr1:211990520-211990551
  hypo

SEQ ID NO: 41901 - DNA, 341 bp, Homo sapiens; identical to SEQ ID NO: 717
  chr1:212003415-212003756
  hypo

SEQ ID NO: 41902 - DNA, 62 bp, Homo sapiens; identical to SEQ ID NO: 718
  chr1:212003805-212003867
  hypo

SEQ ID NO: 41903 - DNA, 196 bp, Homo sapiens; identical to SEQ ID NO: 719
  chr1:212003876-212004072
  hypo

SEQ ID NO: 41904 - DNA, 42 bp, Homo sapiens; identical to SEQ ID NO: 720
  chr1:212004141-212004183
  hypo

SEQ ID NO: 41905 - DNA, 31 bp, Homo sapiens; identical to SEQ ID NO: 9049
  chr1:212086234-212086265
  hypo

SEQ ID NO: 41906 - DNA, 31 bp, Homo sapiens; identical to SEQ ID NO: 9050
  chr1:212557992-212558023
  hypo

SEQ ID NO: 41907 - DNA, 123 bp, Homo sapiens; identical to SEQ ID NO: 721
  chr1:212873600-212873723
  hypo

SEQ ID NO: 41908 - DNA, 82 bp, Homo sapiens; identical to SEQ ID NO: 722
  chr1:212873750-212873832
  hypo

SEQ ID NO: 41909 - DNA, 45 bp, Homo sapiens; identical to SEQ ID NO: 723
  chr1:212873837-212873882
  hypo

SEQ ID NO: 41910 - DNA, 31 bp, Homo sapiens; identical to SEQ ID NO: 9056
  chr1:213134378-213134409
  hypo

SEQ ID NO: 41911 - DNA, 31 bp, Homo sapiens; identical to SEQ ID NO: 9057
  chr1:213134449-213134480
  hypo

SEQ ID NO: 41912 - DNA, 58 bp, Homo sapiens; identical to SEQ ID NO: 9058
  chr1:213134525-213134583
  hypo

SEQ ID NO: 41913 - DNA, 31 bp, Homo sapiens; identical to SEQ ID NO: 9062
  chr1:214543809-214543840
  hypo

SEQ ID NO: 41914 - DNA, 39 bp, Homo sapiens; identical to SEQ ID NO: 9063
  chr1:214557875-214557914
  hypo

SEQ ID NO: 41915 - DNA, 31 bp, Homo sapiens; identical to SEQ ID NO: 9064
  chr1:214569255-214569286
  hypo

SEQ ID NO: 41916 - DNA, 31 bp, Homo sapiens; identical to SEQ ID NO: 9065
  chr1:214569287-214569318
  hypo

SEQ ID NO: 41917 - DNA, 79 bp, Homo sapiens; identical to SEQ ID NO: 9066
  chr1:214569366-214569445
  hypo

SEQ ID NO: 41918 - DNA, 46 bp, Homo sapiens; identical to SEQ ID NO: 9068
  chr1:214662583-214662629
  hypo

SEQ ID NO: 41919 - DNA, 31 bp, Homo sapiens; identical to SEQ ID NO: 9069
  chr1:214662659-214662690
  hypo

SEQ ID NO: 41920 - DNA, 31 bp, Homo sapiens; identical to SEQ ID NO: 9070
  chr1:214662710-214662741
  hypo

SEQ ID NO: 41921 - DNA, 31 bp, Homo sapiens; identical to SEQ ID NO: 9071
  chr1:214662753-214662784
  hypo

SEQ ID NO: 41922 - DNA, 31 bp, Homo sapiens; identical to SEQ ID NO: 9072
  chr1:214679484-214679515
  hypo

SEQ ID NO: 41923 - DNA, 149 bp, Homo sapiens; identical to SEQ ID NO: 733
  chr1:215740889-215741038
  hypo

SEQ ID NO: 41924 - DNA, 31 bp, Homo sapiens; identical to SEQ ID NO: 9076
  chr1:218897274-218897305
  hypo

SEQ ID NO: 41925 - DNA, 38 bp, Homo sapiens; identical to SEQ ID NO: 9080
  chr1:220426846-220426884
  hypo

SEQ ID NO: 41926 - DNA, 31 bp, Homo sapiens; identical to SEQ ID NO: 9081
  chr1:220881047-220881078
  hypo

SEQ ID NO: 41927 - DNA, 31 bp, Homo sapiens; identical to SEQ ID NO: 9082
  chr1:221660545-221660576
  hypo

SEQ ID NO: 41928 - DNA, 31 bp, Homo sapiens; identical to SEQ ID NO: 9084
  chr1:223195635-223195666
  hypo

SEQ ID NO: 41929 - DNA, 40 bp, Homo sapiens; identical to SEQ ID NO: 9085
  chr1:223211665-223211705
  hypo

SEQ ID NO: 41930 - DNA, 31 bp, Homo sapiens; identical to SEQ ID NO: 9086
  chr1:223211738-223211769
  hypo

SEQ ID NO: 41931 - DNA, 60 bp, Homo sapiens; identical to SEQ ID NO: 9087
  chr1:223211801-223211861
  hypo

SEQ ID NO: 41932 - DNA, 31 bp, Homo sapiens; identical to SEQ ID NO: 9088
  chr1:223212020-223212051
  hypo

SEQ ID NO: 41933 - DNA, 93 bp, Homo sapiens; identical to SEQ ID NO: 745
  chr1:223307233-223307326
  hypo

SEQ ID NO: 41934 - DNA, 31 bp, Homo sapiens; identical to SEQ ID NO: 9091
  chr1:223396862-223396893
  hypo

SEQ ID NO: 41935 - DNA, 50 bp, Homo sapiens; identical to SEQ ID NO: 9092
  chr1:223813495-223813545
  hypo

SEQ ID NO: 41936 - DNA, 56 bp, Homo sapiens; identical to SEQ ID NO: 9093
  chr1:223813552-223813608
  hypo

SEQ ID NO: 41937 - DNA, 35 bp, Homo sapiens; identical to SEQ ID NO: 9094
  chr1:223813625-223813660
  hypo

SEQ ID NO: 41938 - DNA, 31 bp, Homo sapiens; identical to SEQ ID NO: 9095
  chr1:223894432-223894463
  hypo

SEQ ID NO: 41939 - DNA, 41 bp, Homo sapiens; identical to SEQ ID NO: 9096
  chr1:223894492-223894533
  hypo

SEQ ID NO: 41940 - DNA, 339 bp, Homo sapiens; identical to SEQ ID NO: 748
  chr1:223899974-223900313
  hypo

SEQ ID NO: 41941 - DNA, 2 bp, Homo sapiens
  chr1:223907490-223907492
  hypo
tt

SEQ ID NO: 41942 - DNA, 38 bp, Homo sapiens; identical to SEQ ID NO: 9106
  chr1:224368627-224368665
  hypo

SEQ ID NO: 41943 - DNA, 31 bp, Homo sapiens; identical to SEQ ID NO: 9107
  chr1:224368687-224368718
  hypo

SEQ ID NO: 41944 - DNA, 31 bp, Homo sapiens; identical to SEQ ID NO: 9108
  chr1:224447974-224448005
  hypo

SEQ ID NO: 41945 - DNA, 31 bp, Homo sapiens; identical to SEQ ID NO: 754
  chr1:224481115-224481146
  hypo

SEQ ID NO: 41946 - DNA, 35 bp, Homo sapiens; identical to SEQ ID NO: 755
  chr1:224622765-224622800
  hypo

SEQ ID NO: 41947 - DNA, 97 bp, Homo sapiens; identical to SEQ ID NO: 756
  chr1:224691179-224691276
  hypo

SEQ ID NO: 41948 - DNA, 31 bp, Homo sapiens; identical to SEQ ID NO: 9114
  chr1:225645397-225645428
  hypo

SEQ ID NO: 41949 - DNA, 31 bp, Homo sapiens; identical to SEQ ID NO: 9116
  chr1:225920495-225920526
  hypo

SEQ ID NO: 41950 - DNA, 31 bp, Homo sapiens; identical to SEQ ID NO: 9117
  chr1:225920535-225920566
  hypo

SEQ ID NO: 41951 - DNA, 31 bp, Homo sapiens; identical to SEQ ID NO: 9118
  chr1:225945259-225945290
  hypo

SEQ ID NO: 41952 - DNA, 51 bp, Homo sapiens; identical to SEQ ID NO: 759
  chr1:225998106-225998157
  hypo

SEQ ID NO: 41953 - DNA, 56 bp, Homo sapiens; identical to SEQ ID NO: 9121
  chr1:226026644-226026700
  hypo

SEQ ID NO: 41954 - DNA, 31 bp, Homo sapiens; identical to SEQ ID NO: 9122
  chr1:226053431-226053462
  hypo

SEQ ID NO: 41955 - DNA, 31 bp, Homo sapiens; identical to SEQ ID NO: 9123
  chr1:226062778-226062809
  hypo

SEQ ID NO: 41956 - DNA, 31 bp, Homo sapiens; identical to SEQ ID NO: 9124
  chr1:226062823-226062854
  hypo

SEQ ID NO: 41957 - DNA, 2 bp, Homo sapiens
  chr1:226062877-226062879
  hypo
ag

SEQ ID NO: 41958 - DNA, 31 bp, Homo sapiens; identical to SEQ ID NO: 9127
  chr1:226094607-226094638
  hypo

SEQ ID NO: 41959 - DNA, 50 bp, Homo sapiens; identical to SEQ ID NO: 9128
  chr1:226109782-226109832
  hypo

SEQ ID NO: 41960 - DNA, 31 bp, Homo sapiens; identical to SEQ ID NO: 9129
  chr1:226196858-226196889
  hypo

SEQ ID NO: 41961 - DNA, 31 bp, Homo sapiens; identical to SEQ ID NO: 9130
  chr1:226250006-226250037
  hypo

SEQ ID NO: 41962 - DNA, 40 bp, Homo sapiens; identical to SEQ ID NO: 760
  chr1:226297511-226297551
  hypo

SEQ ID NO: 41963 - DNA, 31 bp, Homo sapiens; identical to SEQ ID NO: 9135
  chr1:226774439-226774470
  hypo

SEQ ID NO: 41964 - DNA, 31 bp, Homo sapiens; identical to SEQ ID NO: 9136
  chr1:226822615-226822646
  hypo

SEQ ID NO: 41965 - DNA, 31 bp, Homo sapiens; identical to SEQ ID NO: 9137
  chr1:226911753-226911784
  hypo

SEQ ID NO: 41966 - DNA, 31 bp, Homo sapiens; identical to SEQ ID NO: 9138
  chr1:227248037-227248068
  hypo

SEQ ID NO: 41967 - DNA, 31 bp, Homo sapiens; identical to SEQ ID NO: 9139
  chr1:227248089-227248120
  hypo

SEQ ID NO: 41968 - DNA, 31 bp, Homo sapiens; identical to SEQ ID NO: 9140
  chr1:227254155-227254186
  hypo

SEQ ID NO: 41969 - DNA, 31 bp, Homo sapiens; identical to SEQ ID NO: 9141
  chr1:227311005-227311036
  hypo

SEQ ID NO: 41970 - DNA, 31 bp, Homo sapiens; identical to SEQ ID NO: 9143
  chr1:227370568-227370599
  hypo

SEQ ID NO: 41971 - DNA, 31 bp, Homo sapiens; identical to SEQ ID NO: 9144
  chr1:227370635-227370666
  hypo

SEQ ID NO: 41972 - DNA, 61 bp, Homo sapiens; identical to SEQ ID NO: 9145
  chr1:227370679-227370740
  hypo

SEQ ID NO: 41973 - DNA, 31 bp, Homo sapiens; identical to SEQ ID NO: 9146
  chr1:227376435-227376466
  hypo

SEQ ID NO: 41974 - DNA, 31 bp, Homo sapiens; identical to SEQ ID NO: 9147
  chr1:227422354-227422385
  hypo

SEQ ID NO: 41975 - DNA, 31 bp, Homo sapiens; identical to SEQ ID NO: 9148
  chr1:227422394-227422425
  hypo

SEQ ID NO: 41976 - DNA, 31 bp, Homo sapiens; identical to SEQ ID NO: 9149
  chr1:227422443-227422474
  hypo

SEQ ID NO: 41977 - DNA, 31 bp, Homo sapiens; identical to SEQ ID NO: 9150
  chr1:227463300-227463331
  hypo

SEQ ID NO: 41978 - DNA, 31 bp, Homo sapiens; identical to SEQ ID NO: 9152
  chr1:227488696-227488727
  hypo

SEQ ID NO: 41979 - DNA, 31 bp, Homo sapiens; identical to SEQ ID NO: 9153
  chr1:227545941-227545972
  hypo

SEQ ID NO: 41980 - DNA, 38 bp, Homo sapiens; identical to SEQ ID NO: 9155
  chr1:227618269-227618307
  hypo

SEQ ID NO: 41981 - DNA, 47 bp, Homo sapiens; identical to SEQ ID NO: 9156
  chr1:227618322-227618369
  hypo

SEQ ID NO: 41982 - DNA, 31 bp, Homo sapiens; identical to SEQ ID NO: 9157
  chr1:227618406-227618437
  hypo

SEQ ID NO: 41983 - DNA, 31 bp, Homo sapiens; identical to SEQ ID NO: 9158
  chr1:227618449-227618480
  hypo

SEQ ID NO: 41984 - DNA, 31 bp, Homo sapiens; identical to SEQ ID NO: 9160
  chr1:227825261-227825292
  hypo

SEQ ID NO: 41985 - DNA, 31 bp, Homo sapiens; identical to SEQ ID NO: 9161
  chr1:227948692-227948723
  hypo

SEQ ID NO: 41986 - DNA, 57 bp, Homo sapiens; identical to SEQ ID NO: 9162
  chr1:227948760-227948817
  hypo

SEQ ID NO: 41987 - DNA, 31 bp, Homo sapiens; identical to SEQ ID NO: 9163
  chr1:227948866-227948897
  hypo

SEQ ID NO: 41988 - DNA, 31 bp, Homo sapiens; identical to SEQ ID NO: 9164
  chr1:228003874-228003905
  hypo

SEQ ID NO: 41989 - DNA, 31 bp, Homo sapiens; identical to SEQ ID NO: 9165
  chr1:228030205-228030236
  hypo

SEQ ID NO: 41990 - DNA, 31 bp, Homo sapiens; identical to SEQ ID NO: 9166
  chr1:228078002-228078033
  hypo

SEQ ID NO: 41991 - DNA, 46 bp, Homo sapiens; identical to SEQ ID NO: 9167
  chr1:228092975-228093021
  hypo

SEQ ID NO: 41992 - DNA, 31 bp, Homo sapiens; identical to SEQ ID NO: 9168
  chr1:228111801-228111832
  hypo

SEQ ID NO: 41993 - DNA, 31 bp, Homo sapiens; identical to SEQ ID NO: 9169
  chr1:228361363-228361394
  hypo

SEQ ID NO: 41994 - DNA, 43 bp, Homo sapiens; identical to SEQ ID NO: 9170
  chr1:228406667-228406710
  hypo

SEQ ID NO: 41995 - DNA, 31 bp, Homo sapiens; identical to SEQ ID NO: 776
  chr1:228444739-228444770
  hypo

SEQ ID NO: 41996 - DNA, 31 bp, Homo sapiens; identical to SEQ ID NO: 9172
  chr1:228525868-228525899
  hypo

SEQ ID NO: 41997 - DNA, 31 bp, Homo sapiens; identical to SEQ ID NO: 9173
  chr1:228551865-228551896
  hypo

SEQ ID NO: 41998 - DNA, 31 bp, Homo sapiens; identical to SEQ ID NO: 9174
  chr1:228601706-228601737
  hypo

SEQ ID NO: 41999 - DNA, 48 bp, Homo sapiens; identical to SEQ ID NO: 779
  chr1:228871131-228871179
  hypo

SEQ ID NO: 42000 - DNA, 55 bp, Homo sapiens; identical to SEQ ID NO: 9176
  chr1:229073282-229073337
  hypo

SEQ ID NO: 42001 - DNA, 41 bp, Homo sapiens; identical to SEQ ID NO: 9177
  chr1:229104402-229104443
  hypo

SEQ ID NO: 42002 - DNA, 31 bp, Homo sapiens; identical to SEQ ID NO: 9178
  chr1:229116092-229116123
  hypo

SEQ ID NO: 42003 - DNA, 31 bp, Homo sapiens; identical to SEQ ID NO: 9179
  chr1:229134663-229134694
  hypo

SEQ ID NO: 42004 - DNA, 31 bp, Homo sapiens; identical to SEQ ID NO: 9180
  chr1:229141514-229141545
  hypo

SEQ ID NO: 42005 - DNA, 60 bp, Homo sapiens; identical to SEQ ID NO: 9181
  chr1:229202156-229202216
  hypo

SEQ ID NO: 42006 - DNA, 54 bp, Homo sapiens; identical to SEQ ID NO: 9182
  chr1:229202261-229202315
  hypo

SEQ ID NO: 42007 - DNA, 31 bp, Homo sapiens; identical to SEQ ID NO: 9183
  chr1:229210259-229210290
  hypo

SEQ ID NO: 42008 - DNA, 31 bp, Homo sapiens; identical to SEQ ID NO: 9184
  chr1:229252144-229252175
  hypo

SEQ ID NO: 42009 - DNA, 31 bp, Homo sapiens; identical to SEQ ID NO: 9185
  chr1:229462408-229462439
  hypo

SEQ ID NO: 42010 - DNA, 62 bp, Homo sapiens; identical to SEQ ID NO: 9186
  chr1:229462463-229462525
  hypo

SEQ ID NO: 42011 - DNA, 36 bp, Homo sapiens; identical to SEQ ID NO: 9187
  chr1:229678577-229678613
  hypo

SEQ ID NO: 42012 - DNA, 62 bp, Homo sapiens; identical to SEQ ID NO: 9188
  chr1:230213775-230213837
  hypo

SEQ ID NO: 42013 - DNA, 71 bp, Homo sapiens; identical to SEQ ID NO: 9189
  chr1:230256266-230256337
  hypo

SEQ ID NO: 42014 - DNA, 31 bp, Homo sapiens; identical to SEQ ID NO: 9190
  chr1:230256345-230256376
  hypo

SEQ ID NO: 42015 - DNA, 31 bp, Homo sapiens; identical to SEQ ID NO: 9191
  chr1:230398380-230398411
  hypo

SEQ ID NO: 42016 - DNA, 31 bp, Homo sapiens; identical to SEQ ID NO: 9192
  chr1:230404128-230404159
  hypo

SEQ ID NO: 42017 - DNA, 2 bp, Homo sapiens
  chr1:230404216-230404218
  hypo
ct

SEQ ID NO: 42018 - DNA, 31 bp, Homo sapiens; identical to SEQ ID NO: 9194
  chr1:230404439-230404470
  hypo

SEQ ID NO: 42019 - DNA, 31 bp, Homo sapiens; identical to SEQ ID NO: 9195
  chr1:230404544-230404575
  hypo

SEQ ID NO: 42020 - DNA, 31 bp, Homo sapiens; identical to SEQ ID NO: 9196
  chr1:230414970-230415001
  hypo

SEQ ID NO: 42021 - DNA, 31 bp, Homo sapiens; identical to SEQ ID NO: 9197
  chr1:230446596-230446627
  hypo

SEQ ID NO: 42022 - DNA, 2 bp, Homo sapiens
  chr1:230453631-230453633
  hypo
gc

SEQ ID NO: 42023 - DNA, 31 bp, Homo sapiens; identical to SEQ ID NO: 9199
  chr1:230469989-230470020
  hypo

SEQ ID NO: 42024 - DNA, 31 bp, Homo sapiens; identical to SEQ ID NO: 9200
  chr1:230485876-230485907
  hypo

SEQ ID NO: 42025 - DNA, 31 bp, Homo sapiens; identical to SEQ ID NO: 9201
  chr1:230840798-230840829
  hypo

SEQ ID NO: 42026 - DNA, 36 bp, Homo sapiens; identical to SEQ ID NO: 9202
  chr1:230870970-230871006
  hypo

SEQ ID NO: 42027 - DNA, 31 bp, Homo sapiens; identical to SEQ ID NO: 9203
  chr1:230872266-230872297
  hypo

SEQ ID NO: 42028 - DNA, 31 bp, Homo sapiens; identical to SEQ ID NO: 9204
  chr1:230898510-230898541
  hypo

SEQ ID NO: 42029 - DNA, 31 bp, Homo sapiens; identical to SEQ ID NO: 9205
  chr1:230898550-230898581
  hypo

SEQ ID NO: 42030 - DNA, 85 bp, Homo sapiens; identical to SEQ ID NO: 9206
  chr1:230898633-230898718
  hypo

SEQ ID NO: 42031 - DNA, 82 bp, Homo sapiens; identical to SEQ ID NO: 9207
  chr1:230898788-230898870
  hypo

SEQ ID NO: 42032 - DNA, 31 bp, Homo sapiens; identical to SEQ ID NO: 9208
  chr1:230953934-230953965
  hypo

SEQ ID NO: 42033 - DNA, 31 bp, Homo sapiens; identical to SEQ ID NO: 9209
  chr1:230976920-230976951
  hypo

SEQ ID NO: 42034 - DNA, 73 bp, Homo sapiens; identical to SEQ ID NO: 9210
  chr1:230979559-230979632
  hypo

SEQ ID NO: 42035 - DNA, 96 bp, Homo sapiens; identical to SEQ ID NO: 9211
  chr1:230979676-230979772
  hypo

SEQ ID NO: 42036 - DNA, 31 bp, Homo sapiens; identical to SEQ ID NO: 9212
  chr1:230979804-230979835
  hypo

SEQ ID NO: 42037 - DNA, 31 bp, Homo sapiens; identical to SEQ ID NO: 9213
  chr1:230979843-230979874
  hypo

SEQ ID NO: 42038 - DNA, 31 bp, Homo sapiens; identical to SEQ ID NO: 9215
  chr1:230980022-230980053
  hypo

SEQ ID NO: 42039 - DNA, 31 bp, Homo sapiens; identical to SEQ ID NO: 9216
  chr1:230980101-230980132
  hypo

SEQ ID NO: 42040 - DNA, 31 bp, Homo sapiens; identical to SEQ ID NO: 9217
  chr1:230986634-230986665
  hypo

SEQ ID NO: 42041 - DNA, 88 bp, Homo sapiens; identical to SEQ ID NO: 9218
  chr1:230986671-230986759
  hypo

SEQ ID NO: 42042 - DNA, 31 bp, Homo sapiens; identical to SEQ ID NO: 9219
  chr1:230988835-230988866
  hypo

SEQ ID NO: 42043 - DNA, 31 bp, Homo sapiens; identical to SEQ ID NO: 9220
  chr1:230988873-230988904
  hypo

SEQ ID NO: 42044 - DNA, 31 bp, Homo sapiens; identical to SEQ ID NO: 9221
  chr1:231012508-231012539
  hypo

SEQ ID NO: 42045 - DNA, 31 bp, Homo sapiens; identical to SEQ ID NO: 9222
  chr1:231345006-231345037
  hypo

SEQ ID NO: 42046 - DNA, 39 bp, Homo sapiens; identical to SEQ ID NO: 9223
  chr1:231475547-231475586
  hypo

SEQ ID NO: 42047 - DNA, 51 bp, Homo sapiens; identical to SEQ ID NO: 9224
  chr1:231475606-231475657
  hypo

SEQ ID NO: 42048 - DNA, 2 bp, Homo sapiens
  chr1:231475673-231475675
  hypo
ta

SEQ ID NO: 42049 - DNA, 31 bp, Homo sapiens; identical to SEQ ID NO: 9227
  chr1:231476371-231476402
  hypo

SEQ ID NO: 42050 - DNA, 31 bp, Homo sapiens; identical to SEQ ID NO: 9229
  chr1:232550812-232550843
  hypo

SEQ ID NO: 42051 - DNA, 31 bp, Homo sapiens; identical to SEQ ID NO: 9230
  chr1:232566619-232566650
  hypo

SEQ ID NO: 42052 - DNA, 31 bp, Homo sapiens; identical to SEQ ID NO: 9231
  chr1:232566661-232566692
  hypo

SEQ ID NO: 42053 - DNA, 31 bp, Homo sapiens; identical to SEQ ID NO: 9232
  chr1:232566710-232566741
  hypo

SEQ ID NO: 42054 - DNA, 31 bp, Homo sapiens; identical to SEQ ID NO: 9233
  chr1:232566745-232566776
  hypo

SEQ ID NO: 42055 - DNA, 31 bp, Homo sapiens; identical to SEQ ID NO: 9234
  chr1:232566787-232566818
  hypo

SEQ ID NO: 42056 - DNA, 59 bp, Homo sapiens; identical to SEQ ID NO: 9235
  chr1:232568781-232568840
  hypo

SEQ ID NO: 42057 - DNA, 68 bp, Homo sapiens; identical to SEQ ID NO: 9236
  chr1:232568906-232568974
  hypo

SEQ ID NO: 42058 - DNA, 61 bp, Homo sapiens; identical to SEQ ID NO: 9237
  chr1:232649853-232649914
  hypo

SEQ ID NO: 42059 - DNA, 96 bp, Homo sapiens; identical to SEQ ID NO: 784
  chr1:232765940-232766036
  hypo

SEQ ID NO: 42060 - DNA, 31 bp, Homo sapiens; identical to SEQ ID NO: 785
  chr1:232766315-232766346
  hypo

SEQ ID NO: 42061 - DNA, 31 bp, Homo sapiens; identical to SEQ ID NO: 9240
  chr1:232889010-232889041
  hypo

SEQ ID NO: 42062 - DNA, 35 bp, Homo sapiens; identical to SEQ ID NO: 9241
  chr1:232889055-232889090
  hypo

SEQ ID NO: 42063 - DNA, 62 bp, Homo sapiens; identical to SEQ ID NO: 9242
  chr1:232909164-232909226
  hypo

SEQ ID NO: 42064 - DNA, 31 bp, Homo sapiens; identical to SEQ ID NO: 9243
  chr1:233015538-233015569
  hypo

SEQ ID NO: 42065 - DNA, 31 bp, Homo sapiens; identical to SEQ ID NO: 9244
  chr1:233135996-233136027
  hypo

SEQ ID NO: 42066 - DNA, 96 bp, Homo sapiens; identical to SEQ ID NO: 788
  chr1:233749825-233749921
  hypo

SEQ ID NO: 42067 - DNA, 31 bp, Homo sapiens; identical to SEQ ID NO: 9247
  chr1:234541032-234541063
  hypo

SEQ ID NO: 42068 - DNA, 72 bp, Homo sapiens; identical to SEQ ID NO: 9248
  chr1:234541078-234541150
  hypo

SEQ ID NO: 42069 - DNA, 50 bp, Homo sapiens; identical to SEQ ID NO: 9249
  chr1:234541151-234541201
  hypo

SEQ ID NO: 42070 - DNA, 31 bp, Homo sapiens; identical to SEQ ID NO: 9250
  chr1:234541213-234541244
  hypo

SEQ ID NO: 42071 - DNA, 44 bp, Homo sapiens; identical to SEQ ID NO: 9251
  chr1:234541508-234541552
  hypo

SEQ ID NO: 42072 - DNA, 64 bp, Homo sapiens; identical to SEQ ID NO: 9252
  chr1:234541606-234541670
  hypo

SEQ ID NO: 42073 - DNA, 31 bp, Homo sapiens; identical to SEQ ID NO: 9253
  chr1:234548569-234548600
  hypo

SEQ ID NO: 42074 - DNA, 36 bp, Homo sapiens; identical to SEQ ID NO: 9254
  chr1:234604774-234604810
  hypo

SEQ ID NO: 42075 - DNA, 36 bp, Homo sapiens; identical to SEQ ID NO: 9255
  chr1:234604830-234604866
  hypo

SEQ ID NO: 42076 - DNA, 31 bp, Homo sapiens; identical to SEQ ID NO: 9256
  chr1:234621891-234621922
  hypo

SEQ ID NO: 42077 - DNA, 31 bp, Homo sapiens; identical to SEQ ID NO: 9257
  chr1:234641873-234641904
  hypo

SEQ ID NO: 42078 - DNA, 31 bp, Homo sapiens; identical to SEQ ID NO: 9258
  chr1:234691149-234691180
  hypo

SEQ ID NO: 42079 - DNA, 59 bp, Homo sapiens; identical to SEQ ID NO: 9259
  chr1:234691189-234691248
  hypo

SEQ ID NO: 42080 - DNA, 53 bp, Homo sapiens; identical to SEQ ID NO: 9260
  chr1:234691278-234691331
  hypo

SEQ ID NO: 42081 - DNA, 31 bp, Homo sapiens; identical to SEQ ID NO: 9261
  chr1:234721944-234721975
  hypo

SEQ ID NO: 42082 - DNA, 51 bp, Homo sapiens; identical to SEQ ID NO: 792
  chr1:234828256-234828307
  hypo

SEQ ID NO: 42083 - DNA, 31 bp, Homo sapiens; identical to SEQ ID NO: 9264
  chr1:234828324-234828355
  hypo

SEQ ID NO: 42084 - DNA, 69 bp, Homo sapiens; identical to SEQ ID NO: 9265
  chr1:234868846-234868915
  hypo

SEQ ID NO: 42085 - DNA, 44 bp, Homo sapiens; identical to SEQ ID NO: 9266
  chr1:234868936-234868980
  hypo

SEQ ID NO: 42086 - DNA, 81 bp, Homo sapiens; identical to SEQ ID NO: 9268
  chr1:234893918-234893999
  hypo

SEQ ID NO: 42087 - DNA, 31 bp, Homo sapiens; identical to SEQ ID NO: 9269
  chr1:234895629-234895660
  hypo

SEQ ID NO: 42088 - DNA, 31 bp, Homo sapiens; identical to SEQ ID NO: 9270
  chr1:234957453-234957484
  hypo

SEQ ID NO: 42089 - DNA, 53 bp, Homo sapiens; identical to SEQ ID NO: 9271
  chr1:234957530-234957583
  hypo

SEQ ID NO: 42090 - DNA, 31 bp, Homo sapiens; identical to SEQ ID NO: 9272
  chr1:234957614-234957645
  hypo

SEQ ID NO: 42091 - DNA, 31 bp, Homo sapiens; identical to SEQ ID NO: 9273
  chr1:235009660-235009691
  hypo

SEQ ID NO: 42092 - DNA, 31 bp, Homo sapiens; identical to SEQ ID NO: 9274
  chr1:235019853-235019884
  hypo

SEQ ID NO: 42093 - DNA, 31 bp, Homo sapiens; identical to SEQ ID NO: 9275
  chr1:235036867-235036898
  hypo

SEQ ID NO: 42094 - DNA, 66 bp, Homo sapiens; identical to SEQ ID NO: 9276
  chr1:235037096-235037162
  hypo

SEQ ID NO: 42095 - DNA, 31 bp, Homo sapiens; identical to SEQ ID NO: 9277
  chr1:235037192-235037223
  hypo

SEQ ID NO: 42096 - DNA, 31 bp, Homo sapiens; identical to SEQ ID NO: 9278
  chr1:235037247-235037278
  hypo

SEQ ID NO: 42097 - DNA, 40 bp, Homo sapiens; identical to SEQ ID NO: 9280
  chr1:235042146-235042186
  hypo

SEQ ID NO: 42098 - DNA, 31 bp, Homo sapiens; identical to SEQ ID NO: 9281
  chr1:235044522-235044553
  hypo

SEQ ID NO: 42099 - DNA, 34 bp, Homo sapiens; identical to SEQ ID NO: 9282
  chr1:235044573-235044607
  hypo

SEQ ID NO: 42100 - DNA, 59 bp, Homo sapiens; identical to SEQ ID NO: 9283
  chr1:235044611-235044670
  hypo

SEQ ID NO: 42101 - DNA, 49 bp, Homo sapiens; identical to SEQ ID NO: 9284
  chr1:235044754-235044803
  hypo

SEQ ID NO: 42102 - DNA, 31 bp, Homo sapiens; identical to SEQ ID NO: 9285
  chr1:235067967-235067998
  hypo

SEQ ID NO: 42103 - DNA, 31 bp, Homo sapiens; identical to SEQ ID NO: 9286
  chr1:235068013-235068044
  hypo

SEQ ID NO: 42104 - DNA, 37 bp, Homo sapiens; identical to SEQ ID NO: 9287
  chr1:235129829-235129866
  hypo

SEQ ID NO: 42105 - DNA, 31 bp, Homo sapiens; identical to SEQ ID NO: 9288
  chr1:235129901-235129932
  hypo

SEQ ID NO: 42106 - DNA, 50 bp, Homo sapiens; identical to SEQ ID NO: 9289
  chr1:235129957-235130007
  hypo

SEQ ID NO: 42107 - DNA, 2 bp, Homo sapiens
  chr1:235292637-235292639
  hypo
aa

SEQ ID NO: 42108 - DNA, 31 bp, Homo sapiens; identical to SEQ ID NO: 9295
  chr1:235751252-235751283
  hypo

SEQ ID NO: 42109 - DNA, 31 bp, Homo sapiens; identical to SEQ ID NO: 9296
  chr1:235754113-235754144
  hypo

SEQ ID NO: 42110 - DNA, 31 bp, Homo sapiens; identical to SEQ ID NO: 9298
  chr1:235855353-235855384
  hypo

SEQ ID NO: 42111 - DNA, 31 bp, Homo sapiens; identical to SEQ ID NO: 9299
  chr1:236055034-236055065
  hypo

SEQ ID NO: 42112 - DNA, 31 bp, Homo sapiens; identical to SEQ ID NO: 9300
  chr1:236062561-236062592
  hypo

SEQ ID NO: 42113 - DNA, 31 bp, Homo sapiens; identical to SEQ ID NO: 9301
  chr1:236062611-236062642
  hypo

SEQ ID NO: 42114 - DNA, 31 bp, Homo sapiens; identical to SEQ ID NO: 9303
  chr1:236125189-236125220
  hypo

SEQ ID NO: 42115 - DNA, 31 bp, Homo sapiens; identical to SEQ ID NO: 9304
  chr1:236156642-236156673
  hypo

SEQ ID NO: 42116 - DNA, 31 bp, Homo sapiens; identical to SEQ ID NO: 9305
  chr1:236156679-236156710
  hypo

SEQ ID NO: 42117 - DNA, 41 bp, Homo sapiens; identical to SEQ ID NO: 9306
  chr1:236189393-236189434
  hypo

SEQ ID NO: 42118 - DNA, 31 bp, Homo sapiens; identical to SEQ ID NO: 9307
  chr1:236194740-236194771
  hypo

SEQ ID NO: 42119 - DNA, 31 bp, Homo sapiens; identical to SEQ ID NO: 9308
  chr1:236194790-236194821
  hypo

SEQ ID NO: 42120 - DNA, 31 bp, Homo sapiens; identical to SEQ ID NO: 9311
  chr1:236514729-236514760
  hypo

SEQ ID NO: 42121 - DNA, 31 bp, Homo sapiens; identical to SEQ ID NO: 9313
  chr1:236540836-236540867
  hypo

SEQ ID NO: 42122 - DNA, 57 bp, Homo sapiens; identical to SEQ ID NO: 9315
  chr1:236561304-236561361
  hypo

SEQ ID NO: 42123 - DNA, 31 bp, Homo sapiens; identical to SEQ ID NO: 9316
  chr1:236660745-236660776
  hypo

SEQ ID NO: 42124 - DNA, 41 bp, Homo sapiens; identical to SEQ ID NO: 9318
  chr1:240064134-240064175
  hypo

SEQ ID NO: 42125 - DNA, 31 bp, Homo sapiens; identical to SEQ ID NO: 9319
  chr1:240064183-240064214
  hypo

SEQ ID NO: 42126 - DNA, 47 bp, Homo sapiens; identical to SEQ ID NO: 9320
  chr1:240064288-240064335
  hypo

SEQ ID NO: 42127 - DNA, 31 bp, Homo sapiens; identical to SEQ ID NO: 794
  chr1:243418478-243418509
  hypo

SEQ ID NO: 42128 - DNA, 75 bp, Homo sapiens; identical to SEQ ID NO: 9322
  chr1:243637639-243637714
  hypo

SEQ ID NO: 42129 - DNA, 68 bp, Homo sapiens; identical to SEQ ID NO: 9323
  chr1:243637859-243637927
  hypo

SEQ ID NO: 42130 - DNA, 58 bp, Homo sapiens; identical to SEQ ID NO: 795
  chr1:244013023-244013081
  hypo

SEQ ID NO: 42131 - DNA, 31 bp, Homo sapiens; identical to SEQ ID NO: 9325
  chr1:244455411-244455442
  hypo

SEQ ID NO: 42132 - DNA, 31 bp, Homo sapiens; identical to SEQ ID NO: 9326
  chr1:244641920-244641951
  hypo

SEQ ID NO: 42133 - DNA, 31 bp, Homo sapiens; identical to SEQ ID NO: 9328
  chr1:244943827-244943858
  hypo

SEQ ID NO: 42134 - DNA, 31 bp, Homo sapiens; identical to SEQ ID NO: 9330
  chr1:245032254-245032285
  hypo

SEQ ID NO: 42135 - DNA, 31 bp, Homo sapiens; identical to SEQ ID NO: 9331
  chr1:245032655-245032686
  hypo

SEQ ID NO: 42136 - DNA, 31 bp, Homo sapiens; identical to SEQ ID NO: 9333
  chr1:245481235-245481266
  hypo

SEQ ID NO: 42137 - DNA, 31 bp, Homo sapiens; identical to SEQ ID NO: 9334
  chr1:245492187-245492218
  hypo

SEQ ID NO: 42138 - DNA, 56 bp, Homo sapiens; identical to SEQ ID NO: 9335
  chr1:245576465-245576521
  hypo

SEQ ID NO: 42139 - DNA, 31 bp, Homo sapiens; identical to SEQ ID NO: 9336
  chr1:245576592-245576623
  hypo

SEQ ID NO: 42140 - DNA, 31 bp, Homo sapiens; identical to SEQ ID NO: 9337
  chr1:245576627-245576658
  hypo

SEQ ID NO: 42141 - DNA, 36 bp, Homo sapiens; identical to SEQ ID NO: 9338
  chr1:245704934-245704970
  hypo

SEQ ID NO: 42142 - DNA, 68 bp, Homo sapiens; identical to SEQ ID NO: 9339
  chr1:245866075-245866143
  hypo

SEQ ID NO: 42143 - DNA, 47 bp, Homo sapiens; identical to SEQ ID NO: 9340
  chr1:245866222-245866269
  hypo

SEQ ID NO: 42144 - DNA, 55 bp, Homo sapiens; identical to SEQ ID NO: 9344
  chr1:246094265-246094320
  hypo

SEQ ID NO: 42145 - DNA, 70 bp, Homo sapiens; identical to SEQ ID NO: 9345
  chr1:246094331-246094401
  hypo

SEQ ID NO: 42146 - DNA, 31 bp, Homo sapiens; identical to SEQ ID NO: 9346
  chr1:246518820-246518851
  hypo

SEQ ID NO: 42147 - DNA, 44 bp, Homo sapiens; identical to SEQ ID NO: 9347
  chr1:246518872-246518916
  hypo

SEQ ID NO: 42148 - DNA, 31 bp, Homo sapiens; identical to SEQ ID NO: 9348
  chr1:246625741-246625772
  hypo

SEQ ID NO: 42149 - DNA, 31 bp, Homo sapiens; identical to SEQ ID NO: 9349
  chr1:246864972-246865003
  hypo

SEQ ID NO: 42150 - DNA, 195 bp, Homo sapiens; identical to SEQ ID NO: 796
  chr1:246887363-246887558
  hypo

SEQ ID NO: 42151 - DNA, 31 bp, Homo sapiens; identical to SEQ ID NO: 9351
  chr1:246913294-246913325
  hypo

SEQ ID NO: 42152 - DNA, 31 bp, Homo sapiens; identical to SEQ ID NO: 9352
  chr1:246944243-246944274
  hypo

SEQ ID NO: 42153 - DNA, 31 bp, Homo sapiens; identical to SEQ ID NO: 9353
  chr1:246944304-246944335
  hypo

SEQ ID NO: 42154 - DNA, 53 bp, Homo sapiens; identical to SEQ ID NO: 9354
  chr1:246954178-246954231
  hypo

SEQ ID NO: 42155 - DNA, 31 bp, Homo sapiens; identical to SEQ ID NO: 9355
  chr1:246954579-246954610
  hypo

SEQ ID NO: 42156 - DNA, 31 bp, Homo sapiens; identical to SEQ ID NO: 9358
  chr1:247129039-247129070
  hypo

SEQ ID NO: 42157 - DNA, 34 bp, Homo sapiens; identical to SEQ ID NO: 9359
  chr1:249218263-249218297
  hypo

SEQ ID NO: 42158 - DNA, 31 bp, Homo sapiens; identical to SEQ ID NO: 9360
  chr1:249218299-249218330
  hypo

SEQ ID NO: 42159 - DNA, 31 bp, Homo sapiens; identical to SEQ ID NO: 9361
  chr1:249218350-249218381
  hypo

SEQ ID NO: 42160 - DNA, 31 bp, Homo sapiens; identical to SEQ ID NO: 9362
  chr1:249218425-249218456
  hypo

SEQ ID NO: 42161 - DNA, 31 bp, Homo sapiens; identical to SEQ ID NO: 9364
  chr2:266542-266573
  hypo

SEQ ID NO: 42162 - DNA, 31 bp, Homo sapiens; identical to SEQ ID NO: 9367
  chr2:1461907-1461938
  hypo

SEQ ID NO: 42163 - DNA, 31 bp, Homo sapiens; identical to SEQ ID NO: 9368
  chr2:1501007-1501038
  hypo

SEQ ID NO: 42164 - DNA, 31 bp, Homo sapiens; identical to SEQ ID NO: 9369
  chr2:1501046-1501077
  hypo

SEQ ID NO: 42165 - DNA, 31 bp, Homo sapiens; identical to SEQ ID NO: 9370
  chr2:1771824-1771855
  hypo

SEQ ID NO: 42166 - DNA, 31 bp, Homo sapiens; identical to SEQ ID NO: 9371
  chr2:1816187-1816218
  hypo

SEQ ID NO: 42167 - DNA, 31 bp, Homo sapiens; identical to SEQ ID NO: 9372
  chr2:1816309-1816340
  hypo

SEQ ID NO: 42168 - DNA, 35 bp, Homo sapiens; identical to SEQ ID NO: 9373
  chr2:1863597-1863632
  hypo

SEQ ID NO: 42169 - DNA, 31 bp, Homo sapiens; identical to SEQ ID NO: 9374
  chr2:1933005-1933036
  hypo

SEQ ID NO: 42170 - DNA, 31 bp, Homo sapiens; identical to SEQ ID NO: 9375
  chr2:3084233-3084264
  hypo

SEQ ID NO: 42171 - DNA, 31 bp, Homo sapiens; identical to SEQ ID NO: 9376
  chr2:3213314-3213345
  hypo

SEQ ID NO: 42172 - DNA, 78 bp, Homo sapiens; identical to SEQ ID NO: 9377
  chr2:3352457-3352535
  hypo

SEQ ID NO: 42173 - DNA, 64 bp, Homo sapiens; identical to SEQ ID NO: 9378
  chr2:3352589-3352653
  hypo

SEQ ID NO: 42174 - DNA, 2 bp, Homo sapiens
  chr2:3352676-3352678
  hypo
gc

SEQ ID NO: 42175 - DNA, 116 bp, Homo sapiens; identical to SEQ ID NO: 805
  chr2:3465148-3465264
  hypo

SEQ ID NO: 42176 - DNA, 31 bp, Homo sapiens; identical to SEQ ID NO: 9381
  chr2:3507168-3507199
  hypo

SEQ ID NO: 42177 - DNA, 23 bp, Homo sapiens
  chr2:3990922-3990945
  hypo
ggtgccaccgacattacagctag

SEQ ID NO: 42178 - DNA, 31 bp, Homo sapiens; identical to SEQ ID NO: 9383
  chr2:3991026-3991057
  hypo

SEQ ID NO: 42179 - DNA, 52 bp, Homo sapiens; identical to SEQ ID NO: 9384
  chr2:3991068-3991120
  hypo

SEQ ID NO: 42180 - DNA, 31 bp, Homo sapiens; identical to SEQ ID NO: 9385
  chr2:4271695-4271726
  hypo

SEQ ID NO: 42181 - DNA, 38 bp, Homo sapiens; identical to SEQ ID NO: 806
  chr2:7005629-7005667
  hypo

SEQ ID NO: 42182 - DNA, 182 bp, Homo sapiens; identical to SEQ ID NO: 807
  chr2:7005741-7005923
  hypo

SEQ ID NO: 42183 - DNA, 263 bp, Homo sapiens; identical to SEQ ID NO: 808
  chr2:7005935-7006198
  hypo

SEQ ID NO: 42184 - DNA, 31 bp, Homo sapiens; identical to SEQ ID NO: 9389
  chr2:7064666-7064697
  hypo

SEQ ID NO: 42185 - DNA, 31 bp, Homo sapiens; identical to SEQ ID NO: 9390
  chr2:7109818-7109849
  hypo

SEQ ID NO: 42186 - DNA, 34 bp, Homo sapiens; identical to SEQ ID NO: 9392
  chr2:7180009-7180043
  hypo

SEQ ID NO: 42187 - DNA, 24 bp, Homo sapiens
  chr2:8658285-8658309
  hypo
ggattccagtggggtgcgggagtg

SEQ ID NO: 42188 - DNA, 42 bp, Homo sapiens; identical to SEQ ID NO: 809
  chr2:8818538-8818580
  hypo

SEQ ID NO: 42189 - DNA, 442 bp, Homo sapiens; identical to SEQ ID NO: 810
  chr2:8818828-8819270
  hypo

SEQ ID NO: 42190 - DNA, 31 bp, Homo sapiens; identical to SEQ ID NO: 811
  chr2:8821591-8821622
  hypo

SEQ ID NO: 42191 - DNA, 31 bp, Homo sapiens; identical to SEQ ID NO: 812
  chr2:8821625-8821656
  hypo

SEQ ID NO: 42192 - DNA, 277 bp, Homo sapiens; identical to SEQ ID NO: 813
  chr2:8821975-8822252
  hypo

SEQ ID NO: 42193 - DNA, 146 bp, Homo sapiens; identical to SEQ ID NO: 814
  chr2:8822253-8822399
  hypo

SEQ ID NO: 42194 - DNA, 61 bp, Homo sapiens; identical to SEQ ID NO: 815
  chr2:8822479-8822540
  hypo

SEQ ID NO: 42195 - DNA, 31 bp, Homo sapiens; identical to SEQ ID NO: 816
  chr2:8822640-8822671
  hypo

SEQ ID NO: 42196 - DNA, 44 bp, Homo sapiens; identical to SEQ ID NO: 817
  chr2:8825799-8825843
  hypo

SEQ ID NO: 42197 - DNA, 2 bp, Homo sapiens
  chr2:8833972-8833974
  hypo
tc

SEQ ID NO: 42198 - DNA, 31 bp, Homo sapiens; identical to SEQ ID NO: 9404
  chr2:8854101-8854132
  hypo

SEQ ID NO: 42199 - DNA, 65 bp, Homo sapiens; identical to SEQ ID NO: 9405
  chr2:8854208-8854273
  hypo

SEQ ID NO: 42200 - DNA, 2 bp, Homo sapiens
  chr2:8978037-8978039
  hypo
ct

SEQ ID NO: 42201 - DNA, 20 bp, Homo sapiens
  chr2:8978298-8978318
  hypo
tggtgcggggtggggacaat

SEQ ID NO: 42202 - DNA, 31 bp, Homo sapiens; identical to SEQ ID NO: 9411
  chr2:8983019-8983050
  hypo

SEQ ID NO: 42203 - DNA, 31 bp, Homo sapiens; identical to SEQ ID NO: 9412
  chr2:8983104-8983135
  hypo

SEQ ID NO: 42204 - DNA, 64 bp, Homo sapiens; identical to SEQ ID NO: 9413
  chr2:8983143-8983207
  hypo

SEQ ID NO: 42205 - DNA, 31 bp, Homo sapiens; identical to SEQ ID NO: 9414
  chr2:9119835-9119866
  hypo

SEQ ID NO: 42206 - DNA, 31 bp, Homo sapiens; identical to SEQ ID NO: 818
  chr2:9143657-9143688
  hypo

SEQ ID NO: 42207 - DNA, 45 bp, Homo sapiens; identical to SEQ ID NO: 819
  chr2:9144127-9144172
  hypo

SEQ ID NO: 42208 - DNA, 53 bp, Homo sapiens; identical to SEQ ID NO: 9417
  chr2:9218663-9218716
  hypo

SEQ ID NO: 42209 - DNA, 31 bp, Homo sapiens; identical to SEQ ID NO: 9418
  chr2:9234916-9234947
  hypo

SEQ ID NO: 42210 - DNA, 31 bp, Homo sapiens; identical to SEQ ID NO: 9419
  chr2:9241807-9241838
  hypo

SEQ ID NO: 42211 - DNA, 68 bp, Homo sapiens; identical to SEQ ID NO: 9420
  chr2:9250673-9250741
  hypo

SEQ ID NO: 42212 - DNA, 57 bp, Homo sapiens; identical to SEQ ID NO: 9421
  chr2:9250791-9250848
  hypo

SEQ ID NO: 42213 - DNA, 31 bp, Homo sapiens; identical to SEQ ID NO: 9422
  chr2:9266321-9266352
  hypo

SEQ ID NO: 42214 - DNA, 31 bp, Homo sapiens; identical to SEQ ID NO: 9423
  chr2:9291497-9291528
  hypo

SEQ ID NO: 42215 - DNA, 31 bp, Homo sapiens; identical to SEQ ID NO: 9424
  chr2:9314160-9314191
  hypo

SEQ ID NO: 42216 - DNA, 39 bp, Homo sapiens; identical to SEQ ID NO: 821
  chr2:9346514-9346553
  hypo

SEQ ID NO: 42217 - DNA, 111 bp, Homo sapiens; identical to SEQ ID NO: 822
  chr2:9346710-9346821
  hypo

SEQ ID NO: 42218 - DNA, 388 bp, Homo sapiens; identical to SEQ ID NO: 823
  chr2:9346877-9347265
  hypo

SEQ ID NO: 42219 - DNA, 66 bp, Homo sapiens; identical to SEQ ID NO: 824
  chr2:9347472-9347538
  hypo

SEQ ID NO: 42220 - DNA, 2 bp, Homo sapiens
  chr2:9347559-9347561
  hypo
aa

SEQ ID NO: 42221 - DNA, 139 bp, Homo sapiens; identical to SEQ ID NO: 35488
  chr2:9347677-9347816
  hypo

SEQ ID NO: 42222 - DNA, 46 bp, Homo sapiens; identical to SEQ ID NO: 9431
  chr2:9409364-9409410
  hypo

SEQ ID NO: 42223 - DNA, 81 bp, Homo sapiens; identical to SEQ ID NO: 9432
  chr2:9409458-9409539
  hypo

SEQ ID NO: 42224 - DNA, 86 bp, Homo sapiens; identical to SEQ ID NO: 9433
  chr2:9456807-9456893
  hypo

SEQ ID NO: 42225 - DNA, 35 bp, Homo sapiens; identical to SEQ ID NO: 9434
  chr2:9456911-9456946
  hypo

SEQ ID NO: 42226 - DNA, 31 bp, Homo sapiens; identical to SEQ ID NO: 9435
  chr2:9507573-9507604
  hypo

SEQ ID NO: 42227 - DNA, 31 bp, Homo sapiens; identical to SEQ ID NO: 9436
  chr2:9770735-9770766
  hypo

SEQ ID NO: 42228 - DNA, 31 bp, Homo sapiens; identical to SEQ ID NO: 9437
  chr2:9853194-9853225
  hypo

SEQ ID NO: 42229 - DNA, 31 bp, Homo sapiens; identical to SEQ ID NO: 9438
  chr2:9865161-9865192
  hypo

SEQ ID NO: 42230 - DNA, 2 bp, Homo sapiens
  chr2:9921446-9921448
  hypo
tc

SEQ ID NO: 42231 - DNA, 31 bp, Homo sapiens; identical to SEQ ID NO: 9440
  chr2:9949033-9949064
  hypo

SEQ ID NO: 42232 - DNA, 31 bp, Homo sapiens; identical to SEQ ID NO: 9443
  chr2:9962491-9962522
  hypo

SEQ ID NO: 42233 - DNA, 31 bp, Homo sapiens; identical to SEQ ID NO: 9444
  chr2:9964325-9964356
  hypo

SEQ ID NO: 42234 - DNA, 31 bp, Homo sapiens; identical to SEQ ID NO: 9445
  chr2:10047694-10047725
  hypo

SEQ ID NO: 42235 - DNA, 31 bp, Homo sapiens; identical to SEQ ID NO: 9446
  chr2:10107384-10107415
  hypo

SEQ ID NO: 42236 - DNA, 34 bp, Homo sapiens; identical to SEQ ID NO: 35493
  chr2:10151689-10151723
  hypo

SEQ ID NO: 42237 - DNA, 56 bp, Homo sapiens; identical to SEQ ID NO: 833
  chr2:10152417-10152473
  hypo

SEQ ID NO: 42238 - DNA, 80 bp, Homo sapiens; identical to SEQ ID NO: 834
  chr2:10152482-10152562
  hypo

SEQ ID NO: 42239 - DNA, 49 bp, Homo sapiens
  chr2:10153000-10153049
  hypo
gggtcaggtgggcaggcgtgcgtatggtcgggtcatgtgggcaggcgtg

SEQ ID NO: 42240 - DNA, 27 bp, Homo sapiens
  chr2:10153468-10153495
  hypo
atatgggtatgtgtatgggcgggtcag

SEQ ID NO: 42241 - DNA, 129 bp, Homo sapiens; identical to SEQ ID NO: 9457
  chr2:10153587-10153716
  hypo

SEQ ID NO: 42242 - DNA, 60 bp, Homo sapiens; identical to SEQ ID NO: 9458
  chr2:10153805-10153865
  hypo

SEQ ID NO: 42243 - DNA, 18 bp, Homo sapiens
  chr2:10153871-10153889
  hypo
caggcatgtgtatgggcg

SEQ ID NO: 42244 - DNA, 27 bp, Homo sapiens
  chr2:10154188-10154215
  hypo
gacaggcgtgcatatgagcgagtcagg

SEQ ID NO: 42245 - DNA, 35 bp, Homo sapiens
  chr2:10154874-10154909
  hypo
gcatgcgtacgggcaggtcaggtgggcaggcgtgc

SEQ ID NO: 42246 - DNA, 54 bp, Homo sapiens; identical to SEQ ID NO: 9463
  chr2:10155174-10155228
  hypo

SEQ ID NO: 42247 - DNA, 35 bp, Homo sapiens
  chr2:10155230-10155265
  hypo
tgtgcgtatgggtgtgcgtatgggcgagtcaggtg

SEQ ID NO: 42248 - DNA, 27 bp, Homo sapiens
  chr2:10155388-10155415
  hypo
gtgcttatgggcgggtctggtggacag

SEQ ID NO: 42249 - DNA, 46 bp, Homo sapiens; identical to SEQ ID NO: 9466
  chr2:10155774-10155820
  hypo

SEQ ID NO: 42250 - DNA, 89 bp, Homo sapiens; identical to SEQ ID NO: 9467
  chr2:10155830-10155919
  hypo

SEQ ID NO: 42251 - DNA, 60 bp, Homo sapiens
  chr2:10156254-10156314
  hypo
atggctgtgcgtttgggcgagtcaggtgggcagacgtgcgtatgggcagtcaggtggaca

SEQ ID NO: 42252 - DNA, 31 bp, Homo sapiens; identical to SEQ ID NO: 9471
  chr2:10172772-10172803
  hypo

SEQ ID NO: 42253 - DNA, 62 bp, Homo sapiens; identical to SEQ ID NO: 9472
  chr2:10178431-10178493
  hypo

SEQ ID NO: 42254 - DNA, 71 bp, Homo sapiens; identical to SEQ ID NO: 9473
  chr2:10178521-10178592
  hypo

SEQ ID NO: 42255 - DNA, 71 bp, Homo sapiens; identical to SEQ ID NO: 835
  chr2:10183603-10183674
  hypo

SEQ ID NO: 42256 - DNA, 39 bp, Homo sapiens; identical to SEQ ID NO: 836
  chr2:10183763-10183802
  hypo

SEQ ID NO: 42257 - DNA, 43 bp, Homo sapiens; identical to SEQ ID NO: 837
  chr2:10183844-10183887
  hypo

SEQ ID NO: 42258 - DNA, 236 bp, Homo sapiens; identical to SEQ ID NO: 838
  chr2:10183982-10184218
  hypo

SEQ ID NO: 42259 - DNA, 31 bp, Homo sapiens; identical to SEQ ID NO: 9478
  chr2:10381198-10381229
  hypo

SEQ ID NO: 42260 - DNA, 31 bp, Homo sapiens; identical to SEQ ID NO: 9479
  chr2:10397608-10397639
  hypo

SEQ ID NO: 42261 - DNA, 2 bp, Homo sapiens
  chr2:10577315-10577317
  hypo
ca

SEQ ID NO: 42262 - DNA, 55 bp, Homo sapiens; identical to SEQ ID NO: 9481
  chr2:10577403-10577458
  hypo

SEQ ID NO: 42263 - DNA, 57 bp, Homo sapiens; identical to SEQ ID NO: 9482
  chr2:10577460-10577517
  hypo

SEQ ID NO: 42264 - DNA, 37 bp, Homo sapiens; identical to SEQ ID NO: 843
  chr2:10589000-10589037
  hypo

SEQ ID NO: 42265 - DNA, 31 bp, Homo sapiens; identical to SEQ ID NO: 844
  chr2:10589038-10589069
  hypo

SEQ ID NO: 42266 - DNA, 73 bp, Homo sapiens; identical to SEQ ID NO: 845
  chr2:10589095-10589168
  hypo

SEQ ID NO: 42267 - DNA, 31 bp, Homo sapiens; identical to SEQ ID NO: 9486
  chr2:10615283-10615314
  hypo

SEQ ID NO: 42268 - DNA, 42 bp, Homo sapiens; identical to SEQ ID NO: 9487
  chr2:10615321-10615363
  hypo

SEQ ID NO: 42269 - DNA, 31 bp, Homo sapiens; identical to SEQ ID NO: 9488
  chr2:10615572-10615603
  hypo

SEQ ID NO: 42270 - DNA, 41 bp, Homo sapiens; identical to SEQ ID NO: 9489
  chr2:10615616-10615657
  hypo

SEQ ID NO: 42271 - DNA, 44 bp, Homo sapiens; identical to SEQ ID NO: 9490
  chr2:10642585-10642629
  hypo

SEQ ID NO: 42272 - DNA, 31 bp, Homo sapiens; identical to SEQ ID NO: 9491
  chr2:10645139-10645170
  hypo

SEQ ID NO: 42273 - DNA, 45 bp, Homo sapiens; identical to SEQ ID NO: 9492
  chr2:10645203-10645248
  hypo

SEQ ID NO: 42274 - DNA, 31 bp, Homo sapiens; identical to SEQ ID NO: 9493
  chr2:10659326-10659357
  hypo

SEQ ID NO: 42275 - DNA, 31 bp, Homo sapiens; identical to SEQ ID NO: 9494
  chr2:10676513-10676544
  hypo

SEQ ID NO: 42276 - DNA, 31 bp, Homo sapiens; identical to SEQ ID NO: 9496
  chr2:11209932-11209963
  hypo

SEQ ID NO: 42277 - DNA, 1 bp, Homo sapiens
  chr2:11312055-11312056
  hypo
a

SEQ ID NO: 42278 - DNA, 31 bp, Homo sapiens; identical to SEQ ID NO: 9498
  chr2:11758939-11758970
  hypo

SEQ ID NO: 42279 - DNA, 31 bp, Homo sapiens; identical to SEQ ID NO: 9499
  chr2:11995229-11995260
  hypo

SEQ ID NO: 42280 - DNA, 31 bp, Homo sapiens; identical to SEQ ID NO: 9500
  chr2:12005881-12005912
  hypo

SEQ ID NO: 42281 - DNA, 31 bp, Homo sapiens; identical to SEQ ID NO: 9501
  chr2:12005916-12005947
  hypo

SEQ ID NO: 42282 - DNA, 31 bp, Homo sapiens; identical to SEQ ID NO: 9502
  chr2:12005987-12006018
  hypo

SEQ ID NO: 42283 - DNA, 46 bp, Homo sapiens; identical to SEQ ID NO: 9503
  chr2:12006020-12006066
  hypo

SEQ ID NO: 42284 - DNA, 31 bp, Homo sapiens; identical to SEQ ID NO: 9504
  chr2:12006067-12006098
  hypo

SEQ ID NO: 42285 - DNA, 49 bp, Homo sapiens; identical to SEQ ID NO: 9506
  chr2:15307223-15307272
  hypo

SEQ ID NO: 42286 - DNA, 31 bp, Homo sapiens; identical to SEQ ID NO: 9508
  chr2:15474652-15474683
  hypo

SEQ ID NO: 42287 - DNA, 2 bp, Homo sapiens
  chr2:15579676-15579678
  hypo
gg

SEQ ID NO: 42288 - DNA, 31 bp, Homo sapiens; identical to SEQ ID NO: 9510
  chr2:15792394-15792425
  hypo

SEQ ID NO: 42289 - DNA, 31 bp, Homo sapiens; identical to SEQ ID NO: 9511
  chr2:15910903-15910934
  hypo

SEQ ID NO: 42290 - DNA, 31 bp, Homo sapiens; identical to SEQ ID NO: 849
  chr2:16079904-16079935
  hypo

SEQ ID NO: 42291 - DNA, 31 bp, Homo sapiens; identical to SEQ ID NO: 850
  chr2:16079966-16079997
  hypo

SEQ ID NO: 42292 - DNA, 38 bp, Homo sapiens; identical to SEQ ID NO: 851
  chr2:16080353-16080391
  hypo

SEQ ID NO: 42293 - DNA, 31 bp, Homo sapiens; identical to SEQ ID NO: 852
  chr2:16080605-16080636
  hypo

SEQ ID NO: 42294 - DNA, 93 bp, Homo sapiens; identical to SEQ ID NO: 853
  chr2:16080681-16080774
  hypo

SEQ ID NO: 42295 - DNA, 31 bp, Homo sapiens; identical to SEQ ID NO: 9517
  chr2:16121785-16121816
  hypo

SEQ ID NO: 42296 - DNA, 31 bp, Homo sapiens; identical to SEQ ID NO: 9519
  chr2:16274090-16274121
  hypo

SEQ ID NO: 42297 - DNA, 31 bp, Homo sapiens; identical to SEQ ID NO: 9520
  chr2:16396900-16396931
  hypo

SEQ ID NO: 42298 - DNA, 31 bp, Homo sapiens; identical to SEQ ID NO: 9521
  chr2:16705037-16705068
  hypo

SEQ ID NO: 42299 - DNA, 31 bp, Homo sapiens; identical to SEQ ID NO: 9522
  chr2:19605841-19605872
  hypo

SEQ ID NO: 42300 - DNA, 31 bp, Homo sapiens; identical to SEQ ID NO: 9523
  chr2:20047967-20047998
  hypo

SEQ ID NO: 42301 - DNA, 2 bp, Homo sapiens
  chr2:20253273-20253275
  hypo
at

SEQ ID NO: 42302 - DNA, 41 bp, Homo sapiens; identical to SEQ ID NO: 860
  chr2:20424155-20424196
  hypo

SEQ ID NO: 42303 - DNA, 2 bp, Homo sapiens
  chr2:20456197-20456199
  hypo
at

SEQ ID NO: 42304 - DNA, 48 bp, Homo sapiens; identical to SEQ ID NO: 9527
  chr2:20456250-20456298
  hypo

SEQ ID NO: 42305 - DNA, 31 bp, Homo sapiens; identical to SEQ ID NO: 9528
  chr2:20456304-20456335
  hypo

SEQ ID NO: 42306 - DNA, 42 bp, Homo sapiens; identical to SEQ ID NO: 863
  chr2:20646412-20646454
  hypo

SEQ ID NO: 42307 - DNA, 71 bp, Homo sapiens; identical to SEQ ID NO: 864
  chr2:20646463-20646534
  hypo

SEQ ID NO: 42308 - DNA, 235 bp, Homo sapiens; identical to SEQ ID NO: 865
  chr2:20646538-20646773
  hypo

SEQ ID NO: 42309 - DNA, 103 bp, Homo sapiens; identical to SEQ ID NO: 867
  chr2:20646863-20646966
  hypo

SEQ ID NO: 42310 - DNA, 35 bp, Homo sapiens; identical to SEQ ID NO: 868
  chr2:20646981-20647016
  hypo

SEQ ID NO: 42311 - DNA, 84 bp, Homo sapiens; identical to SEQ ID NO: 869
  chr2:20647037-20647121
  hypo

SEQ ID NO: 42312 - DNA, 44 bp, Homo sapiens; identical to SEQ ID NO: 9535
  chr2:20666563-20666607
  hypo

SEQ ID NO: 42313 - DNA, 31 bp, Homo sapiens; identical to SEQ ID NO: 9540
  chr2:23767027-23767058
  hypo

SEQ ID NO: 42314 - DNA, 31 bp, Homo sapiens; identical to SEQ ID NO: 9541
  chr2:23785121-23785152
  hypo

SEQ ID NO: 42315 - DNA, 31 bp, Homo sapiens; identical to SEQ ID NO: 9542
  chr2:23793021-23793052
  hypo

SEQ ID NO: 42316 - DNA, 59 bp, Homo sapiens; identical to SEQ ID NO: 9543
  chr2:23793177-23793236
  hypo

SEQ ID NO: 42317 - DNA, 31 bp, Homo sapiens; identical to SEQ ID NO: 9544
  chr2:23841356-23841387
  hypo

SEQ ID NO: 42318 - DNA, 31 bp, Homo sapiens; identical to SEQ ID NO: 9545
  chr2:23841412-23841443
  hypo

SEQ ID NO: 42319 - DNA, 31 bp, Homo sapiens; identical to SEQ ID NO: 9546
  chr2:23841467-23841498
  hypo

SEQ ID NO: 42320 - DNA, 31 bp, Homo sapiens; identical to SEQ ID NO: 9547
  chr2:23841501-23841532
  hypo

SEQ ID NO: 42321 - DNA, 38 bp, Homo sapiens; identical to SEQ ID NO: 9548
  chr2:23842952-23842990
  hypo

SEQ ID NO: 42322 - DNA, 31 bp, Homo sapiens; identical to SEQ ID NO: 9549
  chr2:23843019-23843050
  hypo

SEQ ID NO: 42323 - DNA, 65 bp, Homo sapiens; identical to SEQ ID NO: 9550
  chr2:23843098-23843163
  hypo

SEQ ID NO: 42324 - DNA, 36 bp, Homo sapiens; identical to SEQ ID NO: 9551
  chr2:23863677-23863713
  hypo

SEQ ID NO: 42325 - DNA, 31 bp, Homo sapiens; identical to SEQ ID NO: 9552
  chr2:23865087-23865118
  hypo

SEQ ID NO: 42326 - DNA, 31 bp, Homo sapiens; identical to SEQ ID NO: 9553
  chr2:23865122-23865153
  hypo

SEQ ID NO: 42327 - DNA, 31 bp, Homo sapiens; identical to SEQ ID NO: 9554
  chr2:23881925-23881956
  hypo

SEQ ID NO: 42328 - DNA, 31 bp, Homo sapiens; identical to SEQ ID NO: 9555
  chr2:23901107-23901138
  hypo

SEQ ID NO: 42329 - DNA, 31 bp, Homo sapiens; identical to SEQ ID NO: 9556
  chr2:23906650-23906681
  hypo

SEQ ID NO: 42330 - DNA, 31 bp, Homo sapiens; identical to SEQ ID NO: 9557
  chr2:23918783-23918814
  hypo

SEQ ID NO: 42331 - DNA, 31 bp, Homo sapiens; identical to SEQ ID NO: 9558
  chr2:23925991-23926022
  hypo

SEQ ID NO: 42332 - DNA, 31 bp, Homo sapiens; identical to SEQ ID NO: 9559
  chr2:24060294-24060325
  hypo

SEQ ID NO: 42333 - DNA, 31 bp, Homo sapiens; identical to SEQ ID NO: 9560
  chr2:24060337-24060368
  hypo

SEQ ID NO: 42334 - DNA, 31 bp, Homo sapiens; identical to SEQ ID NO: 9561
  chr2:24060372-24060403
  hypo

SEQ ID NO: 42335 - DNA, 48 bp, Homo sapiens; identical to SEQ ID NO: 9562
  chr2:24060421-24060469
  hypo

SEQ ID NO: 42336 - DNA, 35 bp, Homo sapiens; identical to SEQ ID NO: 9563
  chr2:24279839-24279874
  hypo

SEQ ID NO: 42337 - DNA, 39 bp, Homo sapiens; identical to SEQ ID NO: 9565
  chr2:25141801-25141840
  hypo

SEQ ID NO: 42338 - DNA, 80 bp, Homo sapiens; identical to SEQ ID NO: 879
  chr2:25265054-25265134
  hypo

SEQ ID NO: 42339 - DNA, 60 bp, Homo sapiens; identical to SEQ ID NO: 9567
  chr2:25369950-25370010
  hypo

SEQ ID NO: 42340 - DNA, 31 bp, Homo sapiens; identical to SEQ ID NO: 9568
  chr2:25444163-25444194
  hypo

SEQ ID NO: 42341 - DNA, 107 bp, Homo sapiens; identical to SEQ ID NO: 9569
  chr2:25536769-25536876
  hypo

SEQ ID NO: 42342 - DNA, 47 bp, Homo sapiens; identical to SEQ ID NO: 9570
  chr2:25627753-25627800
  hypo

SEQ ID NO: 42343 - DNA, 31 bp, Homo sapiens; identical to SEQ ID NO: 9571
  chr2:25684629-25684660
  hypo

SEQ ID NO: 42344 - DNA, 45 bp, Homo sapiens; identical to SEQ ID NO: 9572
  chr2:25924789-25924834
  hypo

SEQ ID NO: 42345 - DNA, 31 bp, Homo sapiens; identical to SEQ ID NO: 9573
  chr2:25980216-25980247
  hypo

SEQ ID NO: 42346 - DNA, 31 bp, Homo sapiens; identical to SEQ ID NO: 9574
  chr2:26027550-26027581
  hypo

SEQ ID NO: 42347 - DNA, 32 bp, Homo sapiens; identical to SEQ ID NO: 9575
  chr2:26027623-26027655
  hypo

SEQ ID NO: 42348 - DNA, 31 bp, Homo sapiens; identical to SEQ ID NO: 9576
  chr2:26153168-26153199
  hypo

SEQ ID NO: 42349 - DNA, 31 bp, Homo sapiens; identical to SEQ ID NO: 9578
  chr2:26215604-26215635
  hypo

SEQ ID NO: 42350 - DNA, 31 bp, Homo sapiens; identical to SEQ ID NO: 9579
  chr2:26362292-26362323
  hypo

SEQ ID NO: 42351 - DNA, 31 bp, Homo sapiens; identical to SEQ ID NO: 9580
  chr2:26362353-26362384
  hypo

SEQ ID NO: 42352 - DNA, 31 bp, Homo sapiens; identical to SEQ ID NO: 9581
  chr2:26362425-26362456
  hypo

SEQ ID NO: 42353 - DNA, 31 bp, Homo sapiens; identical to SEQ ID NO: 9582
  chr2:26385183-26385214
  hypo

SEQ ID NO: 42354 - DNA, 31 bp, Homo sapiens; identical to SEQ ID NO: 9583
  chr2:26405759-26405790
  hypo

SEQ ID NO: 42355 - DNA, 50 bp, Homo sapiens; identical to SEQ ID NO: 9585
  chr2:26534836-26534886
  hypo

SEQ ID NO: 42356 - DNA, 58 bp, Homo sapiens; identical to SEQ ID NO: 9586
  chr2:26534954-26535012
  hypo

SEQ ID NO: 42357 - DNA, 63 bp, Homo sapiens; identical to SEQ ID NO: 9587
  chr2:26706035-26706098
  hypo

SEQ ID NO: 42358 - DNA, 31 bp, Homo sapiens; identical to SEQ ID NO: 9588
  chr2:26706136-26706167
  hypo

SEQ ID NO: 42359 - DNA, 31 bp, Homo sapiens; identical to SEQ ID NO: 881
  chr2:26749880-26749911
  hypo

SEQ ID NO: 42360 - DNA, 55 bp, Homo sapiens; identical to SEQ ID NO: 9590
  chr2:26788318-26788373
  hypo

SEQ ID NO: 42361 - DNA, 31 bp, Homo sapiens; identical to SEQ ID NO: 9591
  chr2:26965248-26965279
  hypo

SEQ ID NO: 42362 - DNA, 36 bp, Homo sapiens; identical to SEQ ID NO: 9592
  chr2:26965291-26965327
  hypo

SEQ ID NO: 42363 - DNA, 58 bp, Homo sapiens; identical to SEQ ID NO: 9593
  chr2:26965378-26965436
  hypo

SEQ ID NO: 42364 - DNA, 31 bp, Homo sapiens; identical to SEQ ID NO: 9596
  chr2:27246589-27246620
  hypo

SEQ ID NO: 42365 - DNA, 216 bp, Homo sapiens; identical to SEQ ID NO: 884
  chr2:27308892-27309108
  hypo

SEQ ID NO: 42366 - DNA, 45 bp, Homo sapiens; identical to SEQ ID NO: 886
  chr2:27309206-27309251
  hypo

SEQ ID NO: 42367 - DNA, 57 bp, Homo sapiens; identical to SEQ ID NO: 887
  chr2:27309260-27309317
  hypo

SEQ ID NO: 42368 - DNA, 42 bp, Homo sapiens; identical to SEQ ID NO: 9601
  chr2:27433174-27433216
  hypo

SEQ ID NO: 42369 - DNA, 56 bp, Homo sapiens; identical to SEQ ID NO: 9606
  chr2:27668570-27668626
  hypo

SEQ ID NO: 42370 - DNA, 31 bp, Homo sapiens; identical to SEQ ID NO: 9607
  chr2:27711607-27711638
  hypo

SEQ ID NO: 42371 - DNA, 31 bp, Homo sapiens; identical to SEQ ID NO: 9608
  chr2:28058161-28058192
  hypo

SEQ ID NO: 42372 - DNA, 51 bp, Homo sapiens; identical to SEQ ID NO: 9609
  chr2:28572402-28572453
  hypo

SEQ ID NO: 42373 - DNA, 31 bp, Homo sapiens; identical to SEQ ID NO: 9610
  chr2:28577899-28577930
  hypo

SEQ ID NO: 42374 - DNA, 31 bp, Homo sapiens; identical to SEQ ID NO: 9611
  chr2:28581021-28581052
  hypo

SEQ ID NO: 42375 - DNA, 52 bp, Homo sapiens; identical to SEQ ID NO: 9612
  chr2:28586479-28586531
  hypo

SEQ ID NO: 42376 - DNA, 66 bp, Homo sapiens; identical to SEQ ID NO: 9613
  chr2:28586563-28586629
  hypo

SEQ ID NO: 42377 - DNA, 31 bp, Homo sapiens; identical to SEQ ID NO: 9614
  chr2:28919663-28919694
  hypo

SEQ ID NO: 42378 - DNA, 31 bp, Homo sapiens; identical to SEQ ID NO: 9615
  chr2:29225584-29225615
  hypo

SEQ ID NO: 42379 - DNA, 31 bp, Homo sapiens; identical to SEQ ID NO: 898
  chr2:30369485-30369516
  hypo

SEQ ID NO: 42380 - DNA, 31 bp, Homo sapiens; identical to SEQ ID NO: 9626
  chr2:30521569-30521600
  hypo

SEQ ID NO: 42381 - DNA, 31 bp, Homo sapiens; identical to SEQ ID NO: 9627
  chr2:30870559-30870590
  hypo

SEQ ID NO: 42382 - DNA, 69 bp, Homo sapiens; identical to SEQ ID NO: 35539
  chr2:31361021-31361090
  hypo

SEQ ID NO: 42383 - DNA, 48 bp, Homo sapiens; identical to SEQ ID NO: 35540
  chr2:31361118-31361166
  hypo

SEQ ID NO: 42384 - DNA, 2 bp, Homo sapiens
  chr2:31361295-31361297
  hypo
ga

SEQ ID NO: 42385 - DNA, 31 bp, Homo sapiens; identical to SEQ ID NO: 9636
  chr2:31551360-31551391
  hypo

SEQ ID NO: 42386 - DNA, 48 bp, Homo sapiens; identical to SEQ ID NO: 9639
  chr2:32367737-32367785
  hypo

SEQ ID NO: 42387 - DNA, 31 bp, Homo sapiens; identical to SEQ ID NO: 9640
  chr2:32482237-32482268
  hypo

SEQ ID NO: 42388 - DNA, 2 bp, Homo sapiens
  chr2:36824206-36824208
  hypo
tc

SEQ ID NO: 42389 - DNA, 39 bp, Homo sapiens; identical to SEQ ID NO: 9645
  chr2:37149991-37150030
  hypo

SEQ ID NO: 42390 - DNA, 31 bp, Homo sapiens; identical to SEQ ID NO: 9646
  chr2:37195421-37195452
  hypo

SEQ ID NO: 42391 - DNA, 31 bp, Homo sapiens; identical to SEQ ID NO: 9647
  chr2:37227245-37227276
  hypo

SEQ ID NO: 42392 - DNA, 31 bp, Homo sapiens; identical to SEQ ID NO: 9650
  chr2:37241637-37241668
  hypo

SEQ ID NO: 42393 - DNA, 31 bp, Homo sapiens; identical to SEQ ID NO: 919
  chr2:37980872-37980903
  hypo

SEQ ID NO: 42394 - DNA, 49 bp, Homo sapiens; identical to SEQ ID NO: 9653
  chr2:38157988-38158037
  hypo

SEQ ID NO: 42395 - DNA, 31 bp, Homo sapiens; identical to SEQ ID NO: 9654
  chr2:38571500-38571531
  hypo

SEQ ID NO: 42396 - DNA, 31 bp, Homo sapiens; identical to SEQ ID NO: 9655
  chr2:38649876-38649907
  hypo

SEQ ID NO: 42397 - DNA, 31 bp, Homo sapiens; identical to SEQ ID NO: 9656
  chr2:38709159-38709190
  hypo

SEQ ID NO: 42398 - DNA, 218 bp, Homo sapiens; identical to SEQ ID NO: 35545
  chr2:42274691-42274909
  hypo

SEQ ID NO: 42399 - DNA, 70 bp, Homo sapiens; identical to SEQ ID NO: 922
  chr2:42274911-42274981
  hypo

SEQ ID NO: 42400 - DNA, 58 bp, Homo sapiens; identical to SEQ ID NO: 924
  chr2:42275208-42275266
  hypo

SEQ ID NO: 42401 - DNA, 405 bp, Homo sapiens; identical to SEQ ID NO: 925
  chr2:42275281-42275686
  hypo

SEQ ID NO: 42402 - DNA, 31 bp, Homo sapiens; identical to SEQ ID NO: 9662
  chr2:43002055-43002086
  hypo

SEQ ID NO: 42403 - DNA, 31 bp, Homo sapiens; identical to SEQ ID NO: 9663
  chr2:43147316-43147347
  hypo

SEQ ID NO: 42404 - DNA, 41 bp, Homo sapiens; identical to SEQ ID NO: 9664
  chr2:43147360-43147401
  hypo

SEQ ID NO: 42405 - DNA, 31 bp, Homo sapiens; identical to SEQ ID NO: 9665
  chr2:43147404-43147435
  hypo

SEQ ID NO: 42406 - DNA, 31 bp, Homo sapiens; identical to SEQ ID NO: 9666
  chr2:43148272-43148303
  hypo

SEQ ID NO: 42407 - DNA, 31 bp, Homo sapiens; identical to SEQ ID NO: 9667
  chr2:43148317-43148348
  hypo

SEQ ID NO: 42408 - DNA, 56 bp, Homo sapiens; identical to SEQ ID NO: 9668
  chr2:43159424-43159480
  hypo

SEQ ID NO: 42409 - DNA, 59 bp, Homo sapiens; identical to SEQ ID NO: 9669
  chr2:43173212-43173271
  hypo

SEQ ID NO: 42410 - DNA, 31 bp, Homo sapiens; identical to SEQ ID NO: 9671
  chr2:43185202-43185233
  hypo

SEQ ID NO: 42411 - DNA, 54 bp, Homo sapiens; identical to SEQ ID NO: 9672
  chr2:43185301-43185355
  hypo

SEQ ID NO: 42412 - DNA, 31 bp, Homo sapiens; identical to SEQ ID NO: 9673
  chr2:43185372-43185403
  hypo

SEQ ID NO: 42413 - DNA, 31 bp, Homo sapiens; identical to SEQ ID NO: 9674
  chr2:43198399-43198430
  hypo

SEQ ID NO: 42414 - DNA, 31 bp, Homo sapiens; identical to SEQ ID NO: 9675
  chr2:43270310-43270341
  hypo

SEQ ID NO: 42415 - DNA, 31 bp, Homo sapiens; identical to SEQ ID NO: 9676
  chr2:43271000-43271031
  hypo

SEQ ID NO: 42416 - DNA, 37 bp, Homo sapiens; identical to SEQ ID NO: 9677
  chr2:43299387-43299424
  hypo

SEQ ID NO: 42417 - DNA, 61 bp, Homo sapiens; identical to SEQ ID NO: 9678
  chr2:43299435-43299496
  hypo

SEQ ID NO: 42418 - DNA, 31 bp, Homo sapiens; identical to SEQ ID NO: 9679
  chr2:43299530-43299561
  hypo

SEQ ID NO: 42419 - DNA, 31 bp, Homo sapiens; identical to SEQ ID NO: 9680
  chr2:43306146-43306177
  hypo

SEQ ID NO: 42420 - DNA, 2 bp, Homo sapiens
  chr2:43408167-43408169
  hypo
tc

SEQ ID NO: 42421 - DNA, 59 bp, Homo sapiens; identical to SEQ ID NO: 9684
  chr2:44047672-44047731
  hypo

SEQ ID NO: 42422 - DNA, 48 bp, Homo sapiens; identical to SEQ ID NO: 9685
  chr2:44047781-44047829
  hypo

SEQ ID NO: 42423 - DNA, 31 bp, Homo sapiens; identical to SEQ ID NO: 9686
  chr2:44079072-44079103
  hypo

SEQ ID NO: 42424 - DNA, 5 bp, Homo sapiens
  chr2:44126097-44126102
  hypo
ctacc

SEQ ID NO: 42425 - DNA, 7 bp, Homo sapiens
  chr2:44126131-44126138
  hypo
caattct

SEQ ID NO: 42426 - DNA, 31 bp, Homo sapiens; identical to SEQ ID NO: 9688
  chr2:44126198-44126229
  hypo

SEQ ID NO: 42427 - DNA, 36 bp, Homo sapiens; identical to SEQ ID NO: 9690
  chr2:44528015-44528051
  hypo

SEQ ID NO: 42428 - DNA, 31 bp, Homo sapiens; identical to SEQ ID NO: 9691
  chr2:45318688-45318719
  hypo

SEQ ID NO: 42429 - DNA, 54 bp, Homo sapiens; identical to SEQ ID NO: 9692
  chr2:45927197-45927251
  hypo

SEQ ID NO: 42430 - DNA, 46 bp, Homo sapiens; identical to SEQ ID NO: 9693
  chr2:45927295-45927341
  hypo

SEQ ID NO: 42431 - DNA, 31 bp, Homo sapiens; identical to SEQ ID NO: 9694
  chr2:45927372-45927403
  hypo

SEQ ID NO: 42432 - DNA, 31 bp, Homo sapiens; identical to SEQ ID NO: 9695
  chr2:45997208-45997239
  hypo

SEQ ID NO: 42433 - DNA, 31 bp, Homo sapiens; identical to SEQ ID NO: 9696
  chr2:46143761-46143792
  hypo

SEQ ID NO: 42434 - DNA, 46 bp, Homo sapiens; identical to SEQ ID NO: 935
  chr2:46524184-46524230
  hypo

SEQ ID NO: 42435 - DNA, 56 bp, Homo sapiens; identical to SEQ ID NO: 936
  chr2:46524317-46524373
  hypo

SEQ ID NO: 42436 - DNA, 122 bp, Homo sapiens; identical to SEQ ID NO: 937
  chr2:46524519-46524641
  hypo

SEQ ID NO: 42437 - DNA, 48 bp, Homo sapiens; identical to SEQ ID NO: 938
  chr2:46524645-46524693
  hypo

SEQ ID NO: 42438 - DNA, 60 bp, Homo sapiens; identical to SEQ ID NO: 939
  chr2:46525000-46525060
  hypo

SEQ ID NO: 42439 - DNA, 97 bp, Homo sapiens; identical to SEQ ID NO: 940
  chr2:46525065-46525162
  hypo

SEQ ID NO: 42440 - DNA, 45 bp, Homo sapiens; identical to SEQ ID NO: 941
  chr2:46525166-46525211
  hypo

SEQ ID NO: 42441 - DNA, 43 bp, Homo sapiens; identical to SEQ ID NO: 942
  chr2:46525215-46525258
  hypo

SEQ ID NO: 42442 - DNA, 31 bp, Homo sapiens; identical to SEQ ID NO: 9705
  chr2:47102025-47102056
  hypo

SEQ ID NO: 42443 - DNA, 31 bp, Homo sapiens; identical to SEQ ID NO: 9706
  chr2:47102070-47102101
  hypo

SEQ ID NO: 42444 - DNA, 56 bp, Homo sapiens; identical to SEQ ID NO: 9707
  chr2:47102130-47102186
  hypo

SEQ ID NO: 42445 - DNA, 46 bp, Homo sapiens; identical to SEQ ID NO: 948
  chr2:47167941-47167987
  hypo

SEQ ID NO: 42446 - DNA, 2 bp, Homo sapiens
  chr2:47193929-47193931
  hypo
tt

SEQ ID NO: 42447 - DNA, 48 bp, Homo sapiens; identical to SEQ ID NO: 9712
  chr2:47475843-47475891
  hypo

SEQ ID NO: 42448 - DNA, 31 bp, Homo sapiens; identical to SEQ ID NO: 9713
  chr2:47475933-47475964
  hypo

SEQ ID NO: 42449 - DNA, 41 bp, Homo sapiens; identical to SEQ ID NO: 9714
  chr2:47475975-47476016
  hypo

SEQ ID NO: 42450 - DNA, 31 bp, Homo sapiens; identical to SEQ ID NO: 9715
  chr2:47536015-47536046
  hypo

SEQ ID NO: 42451 - DNA, 54 bp, Homo sapiens; identical to SEQ ID NO: 9716
  chr2:47574193-47574247
  hypo

SEQ ID NO: 42452 - DNA, 15 bp, Homo sapiens
  chr2:47596551-47596566
  hypo
tgcccggccggctcc

SEQ ID NO: 42453 - DNA, 31 bp, Homo sapiens; identical to SEQ ID NO: 9725
  chr2:48112329-48112360
  hypo

SEQ ID NO: 42454 - DNA, 59 bp, Homo sapiens; identical to SEQ ID NO: 957
  chr2:54683031-54683090
  hypo

SEQ ID NO: 42455 - DNA, 56 bp, Homo sapiens; identical to SEQ ID NO: 958
  chr2:54683116-54683172
  hypo

SEQ ID NO: 42456 - DNA, 2 bp, Homo sapiens
  chr2:58614663-58614665
  hypo
cg

SEQ ID NO: 42457 - DNA, 31 bp, Homo sapiens; identical to SEQ ID NO: 960
  chr2:58777010-58777041
  hypo

SEQ ID NO: 42458 - DNA, 38 bp, Homo sapiens
  chr2:60705870-60705908
  hypo
aggctgaatgaaggagcgctctggtgctgcgaggccag

SEQ ID NO: 42459 - DNA, 73 bp, Homo sapiens
  chr2:60706685-60706758
  hypo
aagccccctctgtcaccggcccacagatctcagctgccatcgcactcaaaccctgtcaggcggtggagagtgt

SEQ ID NO: 42460 - DNA, 31 bp, Homo sapiens; identical to SEQ ID NO: 9740
  chr2:61923842-61923873
  hypo

SEQ ID NO: 42461 - DNA, 52 bp, Homo sapiens; identical to SEQ ID NO: 963
  chr2:61990959-61991011
  hypo

SEQ ID NO: 42462 - DNA, 53 bp, Homo sapiens; identical to SEQ ID NO: 964
  chr2:61991090-61991143
  hypo

SEQ ID NO: 42463 - DNA, 83 bp, Homo sapiens; identical to SEQ ID NO: 965
  chr2:61991157-61991240
  hypo

SEQ ID NO: 42464 - DNA, 31 bp, Homo sapiens; identical to SEQ ID NO: 966
  chr2:61991256-61991287
  hypo

SEQ ID NO: 42465 - DNA, 233 bp, Homo sapiens; identical to SEQ ID NO: 968
  chr2:61991553-61991786
  hypo

SEQ ID NO: 42466 - DNA, 2 bp, Homo sapiens
  chr2:64348215-64348217
  hypo
cc

SEQ ID NO: 42467 - DNA, 26 bp, Homo sapiens
  chr2:64348380-64348406
  hypo
gctcaagaagccggacatgacaaatt

SEQ ID NO: 42468 - DNA, 31 bp, Homo sapiens; identical to SEQ ID NO: 9751
  chr2:64538863-64538894
  hypo

SEQ ID NO: 42469 - DNA, 31 bp, Homo sapiens; identical to SEQ ID NO: 9752
  chr2:64543594-64543625
  hypo

SEQ ID NO: 42470 - DNA, 2 bp, Homo sapiens
  chr2:64835503-64835505
  hypo
ac

SEQ ID NO: 42471 - DNA, 31 bp, Homo sapiens; identical to SEQ ID NO: 9756
  chr2:65267111-65267142
  hypo

SEQ ID NO: 42472 - DNA, 31 bp, Homo sapiens; identical to SEQ ID NO: 9758
  chr2:65740148-65740179
  hypo

SEQ ID NO: 42473 - DNA, 31 bp, Homo sapiens; identical to SEQ ID NO: 9759
  chr2:65740183-65740214
  hypo

SEQ ID NO: 42474 - DNA, 31 bp, Homo sapiens; identical to SEQ ID NO: 974
  chr2:66661598-66661629
  hypo

SEQ ID NO: 42475 - DNA, 2 bp, Homo sapiens
  chr2:66666250-66666252
  hypo
cg

SEQ ID NO: 42476 - DNA, 2 bp, Homo sapiens
  chr2:67625452-67625454
  hypo
tt

SEQ ID NO: 42477 - DNA, 31 bp, Homo sapiens; identical to SEQ ID NO: 9763
  chr2:67747554-67747585
  hypo

SEQ ID NO: 42478 - DNA, 31 bp, Homo sapiens; identical to SEQ ID NO: 9766
  chr2:68433310-68433341
  hypo

SEQ ID NO: 42479 - DNA, 31 bp, Homo sapiens; identical to SEQ ID NO: 9767
  chr2:68672362-68672393
  hypo

SEQ ID NO: 42480 - DNA, 2 bp, Homo sapiens
  chr2:68672688-68672690
  hypo
at

SEQ ID NO: 42481 - DNA, 31 bp, Homo sapiens; identical to SEQ ID NO: 9770
  chr2:69520725-69520756
  hypo

SEQ ID NO: 42482 - DNA, 31 bp, Homo sapiens; identical to SEQ ID NO: 977
  chr2:69614637-69614668
  hypo

SEQ ID NO: 42483 - DNA, 70 bp, Homo sapiens; identical to SEQ ID NO: 978
  chr2:69968733-69968803
  hypo

SEQ ID NO: 42484 - DNA, 31 bp, Homo sapiens; identical to SEQ ID NO: 9773
  chr2:70055298-70055329
  hypo

SEQ ID NO: 42485 - DNA, 73 bp, Homo sapiens; identical to SEQ ID NO: 9774
  chr2:70055358-70055431
  hypo

SEQ ID NO: 42486 - DNA, 2 bp, Homo sapiens
  chr2:70203998-70204000
  hypo
ac

SEQ ID NO: 42487 - DNA, 31 bp, Homo sapiens; identical to SEQ ID NO: 9778
  chr2:70224804-70224835
  hypo

SEQ ID NO: 42488 - DNA, 31 bp, Homo sapiens; identical to SEQ ID NO: 981
  chr2:70351210-70351241
  hypo

SEQ ID NO: 42489 - DNA, 91 bp, Homo sapiens; identical to SEQ ID NO: 982
  chr2:70351300-70351391
  hypo

SEQ ID NO: 42490 - DNA, 53 bp, Homo sapiens; identical to SEQ ID NO: 983
  chr2:70351408-70351461
  hypo

SEQ ID NO: 42491 - DNA, 31 bp, Homo sapiens; identical to SEQ ID NO: 984
  chr2:70369300-70369331
  hypo

SEQ ID NO: 42492 - DNA, 31 bp, Homo sapiens; identical to SEQ ID NO: 985
  chr2:70418190-70418221
  hypo

SEQ ID NO: 42493 - DNA, 30 bp, Homo sapiens; identical to SEQ ID NO: 9785
  chr2:71355581-71355611
  hypo

SEQ ID NO: 42494 - DNA, 33 bp, Homo sapiens; identical to SEQ ID NO: 9786
  chr2:71792490-71792523
  hypo

SEQ ID NO: 42495 - DNA, 50 bp, Homo sapiens; identical to SEQ ID NO: 9787
  chr2:71839445-71839495
  hypo

SEQ ID NO: 42496 - DNA, 45 bp, Homo sapiens; identical to SEQ ID NO: 9788
  chr2:72359981-72360026
  hypo

SEQ ID NO: 42497 - DNA, 31 bp, Homo sapiens; identical to SEQ ID NO: 9789
  chr2:72369008-72369039
  hypo

SEQ ID NO: 42498 - DNA, 34 bp, Homo sapiens; identical to SEQ ID NO: 987
  chr2:72375617-72375651
  hypo

SEQ ID NO: 42499 - DNA, 50 bp, Homo sapiens; identical to SEQ ID NO: 988
  chr2:72375662-72375712
  hypo

SEQ ID NO: 42500 - DNA, 32 bp, Homo sapiens; identical to SEQ ID NO: 9792
  chr2:72459901-72459933
  hypo

SEQ ID NO: 42501 - DNA, 443 bp, Homo sapiens; identical to SEQ ID NO: 991
  chr2:73052797-73053240
  hypo

SEQ ID NO: 42502 - DNA, 31 bp, Homo sapiens; identical to SEQ ID NO: 994
  chr2:73114324-73114355
  hypo

SEQ ID NO: 42503 - DNA, 97 bp, Homo sapiens; identical to SEQ ID NO: 995
  chr2:73114405-73114502
  hypo

SEQ ID NO: 42504 - DNA, 31 bp, Homo sapiens; identical to SEQ ID NO: 9796
  chr2:73384739-73384770
  hypo

SEQ ID NO: 42505 - DNA, 78 bp, Homo sapiens; identical to SEQ ID NO: 9800
  chr2:74152824-74152902
  hypo

SEQ ID NO: 42506 - DNA, 31 bp, Homo sapiens; identical to SEQ ID NO: 9801
  chr2:74152948-74152979
  hypo

SEQ ID NO: 42507 - DNA, 31 bp, Homo sapiens; identical to SEQ ID NO: 9802
  chr2:74152992-74153023
  hypo

SEQ ID NO: 42508 - DNA, 31 bp, Homo sapiens; identical to SEQ ID NO: 9803
  chr2:74155623-74155654
  hypo

SEQ ID NO: 42509 - DNA, 16 bp, Homo sapiens
  chr2:74350345-74350361
  hypo
tgctaacatgtcaaat

SEQ ID NO: 42510 - DNA, 31 bp, Homo sapiens; identical to SEQ ID NO: 9809
  chr2:74460531-74460562
  hypo

SEQ ID NO: 42511 - DNA, 10 bp, Homo sapiens
  chr2:74669803-74669813
  hypo
tggctcacgc

SEQ ID NO: 42512 - DNA, 31 bp, Homo sapiens; identical to SEQ ID NO: 9811
  chr2:74672966-74672997
  hypo

SEQ ID NO: 42513 - DNA, 37 bp, Homo sapiens; identical to SEQ ID NO: 1003
  chr2:74776039-74776076
  hypo

SEQ ID NO: 42514 - DNA, 26 bp, Homo sapiens
  chr2:74781910-74781936
  hypo
ttttttgcagagtcagcgctttggga

SEQ ID NO: 42515 - DNA, 31 bp, Homo sapiens; identical to SEQ ID NO: 9819
  chr2:74856914-74856945
  hypo

SEQ ID NO: 42516 - DNA, 57 bp, Homo sapiens; identical to SEQ ID NO: 9820
  chr2:75105985-75106042
  hypo

SEQ ID NO: 42517 - DNA, 31 bp, Homo sapiens; identical to SEQ ID NO: 9821
  chr2:75106060-75106091
  hypo

SEQ ID NO: 42518 - DNA, 31 bp, Homo sapiens; identical to SEQ ID NO: 9822
  chr2:75803805-75803836
  hypo

SEQ ID NO: 42519 - DNA, 34 bp, Homo sapiens; identical to SEQ ID NO: 9823
  chr2:75825353-75825387
  hypo

SEQ ID NO: 42520 - DNA, 31 bp, Homo sapiens; identical to SEQ ID NO: 9824
  chr2:85227243-85227274
  hypo

SEQ ID NO: 42521 - DNA, 2 bp, Homo sapiens
  chr2:85280280-85280282
  hypo
cc

SEQ ID NO: 42522 - DNA, 31 bp, Homo sapiens; identical to SEQ ID NO: 9826
  chr2:85280357-85280388
  hypo

SEQ ID NO: 42523 - DNA, 31 bp, Homo sapiens; identical to SEQ ID NO: 9827
  chr2:85280390-85280421
  hypo

SEQ ID NO: 42524 - DNA, 31 bp, Homo sapiens; identical to SEQ ID NO: 9828
  chr2:85498072-85498103
  hypo

SEQ ID NO: 42525 - DNA, 31 bp, Homo sapiens; identical to SEQ ID NO: 9829
  chr2:85686736-85686767
  hypo

SEQ ID NO: 42526 - DNA, 35 bp, Homo sapiens; identical to SEQ ID NO: 9830
  chr2:85729114-85729149
  hypo

SEQ ID NO: 42527 - DNA, 84 bp, Homo sapiens; identical to SEQ ID NO: 1010
  chr2:85829250-85829334
  hypo

SEQ ID NO: 42528 - DNA, 31 bp, Homo sapiens; identical to SEQ ID NO: 1011
  chr2:85829368-85829399
  hypo

SEQ ID NO: 42529 - DNA, 50 bp, Homo sapiens; identical to SEQ ID NO: 9833
  chr2:85870243-85870293
  hypo

SEQ ID NO: 42530 - DNA, 31 bp, Homo sapiens; identical to SEQ ID NO: 9835
  chr2:86258592-86258623
  hypo

SEQ ID NO: 42531 - DNA, 31 bp, Homo sapiens; identical to SEQ ID NO: 1013
  chr2:86850367-86850398
  hypo

SEQ ID NO: 42532 - DNA, 68 bp, Homo sapiens; identical to SEQ ID NO: 9839
  chr2:88387491-88387559
  hypo

SEQ ID NO: 42533 - DNA, 62 bp, Homo sapiens; identical to SEQ ID NO: 9841
  chr2:88559424-88559486
  hypo

SEQ ID NO: 42534 - DNA, 31 bp, Homo sapiens; identical to SEQ ID NO: 9842
  chr2:88559499-88559530
  hypo

SEQ ID NO: 42535 - DNA, 31 bp, Homo sapiens; identical to SEQ ID NO: 9843
  chr2:88559544-88559575
  hypo

SEQ ID NO: 42536 - DNA, 31 bp, Homo sapiens; identical to SEQ ID NO: 9844
  chr2:88559590-88559621
  hypo

SEQ ID NO: 42537 - DNA, 31 bp, Homo sapiens; identical to SEQ ID NO: 9847
  chr2:89371576-89371607
  hypo

SEQ ID NO: 42538 - DNA, 31 bp, Homo sapiens; identical to SEQ ID NO: 9848
  chr2:95646408-95646439
  hypo

SEQ ID NO: 42539 - DNA, 30 bp, Homo sapiens; identical to SEQ ID NO: 9849
  chr2:95677207-95677237
  hypo

SEQ ID NO: 42540 - DNA, 35 bp, Homo sapiens; identical to SEQ ID NO: 9850
  chr2:95715630-95715665
  hypo

SEQ ID NO: 42541 - DNA, 31 bp, Homo sapiens; identical to SEQ ID NO: 1014
  chr2:95825322-95825353
  hypo

SEQ ID NO: 42542 - DNA, 42 bp, Homo sapiens; identical to SEQ ID NO: 1015
  chr2:95825489-95825531
  hypo

SEQ ID NO: 42543 - DNA, 44 bp, Homo sapiens; identical to SEQ ID NO: 1016
  chr2:95825584-95825628
  hypo

SEQ ID NO: 42544 - DNA, 31 bp, Homo sapiens; identical to SEQ ID NO: 9855
  chr2:95940204-95940235
  hypo

SEQ ID NO: 42545 - DNA, 31 bp, Homo sapiens; identical to SEQ ID NO: 9856
  chr2:96049659-96049690
  hypo

SEQ ID NO: 42546 - DNA, 31 bp, Homo sapiens; identical to SEQ ID NO: 9857
  chr2:96754441-96754472
  hypo

SEQ ID NO: 42547 - DNA, 31 bp, Homo sapiens; identical to SEQ ID NO: 9858
  chr2:96800289-96800320
  hypo

SEQ ID NO: 42548 - DNA, 31 bp, Homo sapiens; identical to SEQ ID NO: 9859
  chr2:96806866-96806897
  hypo

SEQ ID NO: 42549 - DNA, 31 bp, Homo sapiens; identical to SEQ ID NO: 9860
  chr2:96821949-96821980
  hypo

SEQ ID NO: 42550 - DNA, 31 bp, Homo sapiens; identical to SEQ ID NO: 9861
  chr2:96829030-96829061
  hypo

SEQ ID NO: 42551 - DNA, 23 bp, Homo sapiens
  chr2:96970462-96970485
  hypo
catctgcggtttggtccgttgag

SEQ ID NO: 42552 - DNA, 12 bp, Homo sapiens
  chr2:96987312-96987324
  hypo
aagtgcgtctcc

SEQ ID NO: 42553 - DNA, 34 bp, Homo sapiens; identical to SEQ ID NO: 9864
  chr2:96993130-96993164
  hypo

SEQ ID NO: 42554 - DNA, 31 bp, Homo sapiens; identical to SEQ ID NO: 9865
  chr2:97068615-97068646
  hypo

SEQ ID NO: 42555 - DNA, 92 bp, Homo sapiens; identical to SEQ ID NO: 9866
  chr2:97068713-97068805
  hypo

SEQ ID NO: 42556 - DNA, 56 bp, Homo sapiens; identical to SEQ ID NO: 1018
  chr2:97171201-97171257
  hypo

SEQ ID NO: 42557 - DNA, 31 bp, Homo sapiens; identical to SEQ ID NO: 1019
  chr2:97171276-97171307
  hypo

SEQ ID NO: 42558 - DNA, 46 bp, Homo sapiens; identical to SEQ ID NO: 1020
  chr2:97171366-97171412
  hypo

SEQ ID NO: 42559 - DNA, 37 bp, Homo sapiens; identical to SEQ ID NO: 1021
  chr2:97175301-97175338
  hypo

SEQ ID NO: 42560 - DNA, 31 bp, Homo sapiens; identical to SEQ ID NO: 1028
  chr2:97304170-97304201
  hypo

SEQ ID NO: 42561 - DNA, 37 bp, Homo sapiens; identical to SEQ ID NO: 9873
  chr2:97370002-97370039
  hypo

SEQ ID NO: 42562 - DNA, 31 bp, Homo sapiens; identical to SEQ ID NO: 1029
  chr2:97405566-97405597
  hypo

SEQ ID NO: 42563 - DNA, 36 bp, Homo sapiens; identical to SEQ ID NO: 9875
  chr2:97427362-97427398
  hypo

SEQ ID NO: 42564 - DNA, 31 bp, Homo sapiens; identical to SEQ ID NO: 9876
  chr2:97435406-97435437
  hypo

SEQ ID NO: 42565 - DNA, 2 bp, Homo sapiens
  chr2:97435639-97435641
  hypo
ga

SEQ ID NO: 42566 - DNA, 35 bp, Homo sapiens; identical to SEQ ID NO: 9878
  chr2:97438094-97438129
  hypo

SEQ ID NO: 42567 - DNA, 174 bp, Homo sapiens; identical to SEQ ID NO: 1030
  chr2:97482862-97483036
  hypo

SEQ ID NO: 42568 - DNA, 31 bp, Homo sapiens; identical to SEQ ID NO: 9880
  chr2:97489112-97489143
  hypo

SEQ ID NO: 42569 - DNA, 157 bp, Homo sapiens; identical to SEQ ID NO: 1032
  chr2:97535759-97535916
  hypo

SEQ ID NO: 42570 - DNA, 36 bp, Homo sapiens; identical to SEQ ID NO: 9882
  chr2:97545465-97545501
  hypo

SEQ ID NO: 42571 - DNA, 58 bp, Homo sapiens; identical to SEQ ID NO: 9883
  chr2:97558026-97558084
  hypo

SEQ ID NO: 42572 - DNA, 31 bp, Homo sapiens; identical to SEQ ID NO: 9884
  chr2:97558091-97558122
  hypo

SEQ ID NO: 42573 - DNA, 40 bp, Homo sapiens; identical to SEQ ID NO: 9885
  chr2:97558145-97558185
  hypo

SEQ ID NO: 42574 - DNA, 31 bp, Homo sapiens; identical to SEQ ID NO: 9888
  chr2:97612348-97612379
  hypo

SEQ ID NO: 42575 - DNA, 31 bp, Homo sapiens; identical to SEQ ID NO: 9889
  chr2:97614532-97614563
  hypo

SEQ ID NO: 42576 - DNA, 31 bp, Homo sapiens; identical to SEQ ID NO: 9890
  chr2:97615857-97615888
  hypo

SEQ ID NO: 42577 - DNA, 31 bp, Homo sapiens; identical to SEQ ID NO: 9891
  chr2:97655846-97655877
  hypo

SEQ ID NO: 42578 - DNA, 31 bp, Homo sapiens; identical to SEQ ID NO: 9892
  chr2:97655911-97655942
  hypo

SEQ ID NO: 42579 - DNA, 31 bp, Homo sapiens; identical to SEQ ID NO: 9896
  chr2:99444495-99444526
  hypo

SEQ ID NO: 42580 - DNA, 47 bp, Homo sapiens; identical to SEQ ID NO: 9897
  chr2:99444578-99444625
  hypo

SEQ ID NO: 42581 - DNA, 31 bp, Homo sapiens; identical to SEQ ID NO: 9898
  chr2:99444626-99444657
  hypo

SEQ ID NO: 42582 - DNA, 36 bp, Homo sapiens; identical to SEQ ID NO: 9899
  chr2:99444666-99444702
  hypo

SEQ ID NO: 42583 - DNA, 2 bp, Homo sapiens
  chr2:99795932-99795934
  hypo
gc

SEQ ID NO: 42584 - DNA, 2 bp, Homo sapiens
  chr2:99798645-99798647
  hypo
gt

SEQ ID NO: 42585 - DNA, 29 bp, Homo sapiens
  chr2:99799022-99799051
  hypo
aataaataagataaaataaacgtattctt

SEQ ID NO: 42586 - DNA, 1 bp, Homo sapiens
  chr2:99951500-99951501
  hypo
a

SEQ ID NO: 42587 - DNA, 2 bp, Homo sapiens
  chr2:100107652-100107654
  hypo
tc

SEQ ID NO: 42588 - DNA, 31 bp, Homo sapiens; identical to SEQ ID NO: 9908
  chr2:100293283-100293314
  hypo

SEQ ID NO: 42589 - DNA, 31 bp, Homo sapiens; identical to SEQ ID NO: 9910
  chr2:101006139-101006170
  hypo

SEQ ID NO: 42590 - DNA, 31 bp, Homo sapiens; identical to SEQ ID NO: 1035
  chr2:101033529-101033560
  hypo

SEQ ID NO: 42591 - DNA, 21 bp, Homo sapiens
  chr2:101033571-101033592
  hypo
aagtaaattgtaggctcgcac

SEQ ID NO: 42592 - DNA, 31 bp, Homo sapiens; identical to SEQ ID NO: 9916
  chr2:101362899-101362930
  hypo

SEQ ID NO: 42593 - DNA, 31 bp, Homo sapiens; identical to SEQ ID NO: 9917
  chr2:101362951-101362982
  hypo

SEQ ID NO: 42594 - DNA, 31 bp, Homo sapiens; identical to SEQ ID NO: 9918
  chr2:101363009-101363040
  hypo

SEQ ID NO: 42595 - DNA, 52 bp, Homo sapiens; identical to SEQ ID NO: 9919
  chr2:101363045-101363097
  hypo

SEQ ID NO: 42596 - DNA, 31 bp, Homo sapiens; identical to SEQ ID NO: 9920
  chr2:101607562-101607593
  hypo

SEQ ID NO: 42597 - DNA, 31 bp, Homo sapiens; identical to SEQ ID NO: 9921
  chr2:101612185-101612216
  hypo

SEQ ID NO: 42598 - DNA, 48 bp, Homo sapiens; identical to SEQ ID NO: 9922
  chr2:101612220-101612268
  hypo

SEQ ID NO: 42599 - DNA, 49 bp, Homo sapiens; identical to SEQ ID NO: 9923
  chr2:101612288-101612337
  hypo

SEQ ID NO: 42600 - DNA, 31 bp, Homo sapiens; identical to SEQ ID NO: 9925
  chr2:101649863-101649894
  hypo

SEQ ID NO: 42601 - DNA, 31 bp, Homo sapiens; identical to SEQ ID NO: 9926
  chr2:101651029-101651060
  hypo

SEQ ID NO: 42602 - DNA, 274 bp, Homo sapiens; identical to SEQ ID NO: 1045
  chr2:101767367-101767641
  hypo

SEQ ID NO: 42603 - DNA, 182 bp, Homo sapiens; identical to SEQ ID NO: 1046
  chr2:101767661-101767843
  hypo

SEQ ID NO: 42604 - DNA, 39 bp, Homo sapiens; identical to SEQ ID NO: 9929
  chr2:101772515-101772554
  hypo

SEQ ID NO: 42605 - DNA, 31 bp, Homo sapiens; identical to SEQ ID NO: 9930
  chr2:101833727-101833758
  hypo

SEQ ID NO: 42606 - DNA, 383 bp, Homo sapiens; identical to SEQ ID NO: 1048
  chr2:101924690-101925073
  hypo

SEQ ID NO: 42607 - DNA, 31 bp, Homo sapiens; identical to SEQ ID NO: 1049
  chr2:101925074-101925105
  hypo

SEQ ID NO: 42608 - DNA, 300 bp, Homo sapiens; identical to SEQ ID NO: 1050
  chr2:101925108-101925408
  hypo

SEQ ID NO: 42609 - DNA, 31 bp, Homo sapiens; identical to SEQ ID NO: 9934
  chr2:101955034-101955065
  hypo

SEQ ID NO: 42610 - DNA, 57 bp, Homo sapiens; identical to SEQ ID NO: 9935
  chr2:101970927-101970984
  hypo

SEQ ID NO: 42611 - DNA, 48 bp, Homo sapiens; identical to SEQ ID NO: 9936
  chr2:101971029-101971077
  hypo

SEQ ID NO: 42612 - DNA, 31 bp, Homo sapiens; identical to SEQ ID NO: 9937
  chr2:101971083-101971114
  hypo

SEQ ID NO: 42613 - DNA, 47 bp, Homo sapiens; identical to SEQ ID NO: 1051
  chr2:102313749-102313796
  hypo

SEQ ID NO: 42614 - DNA, 174 bp, Homo sapiens; identical to SEQ ID NO: 1052
  chr2:102313837-102314011
  hypo

SEQ ID NO: 42615 - DNA, 44 bp, Homo sapiens; identical to SEQ ID NO: 1053
  chr2:102314200-102314244
  hypo

SEQ ID NO: 42616 - DNA, 31 bp, Homo sapiens; identical to SEQ ID NO: 9942
  chr2:102347214-102347245
  hypo

SEQ ID NO: 42617 - DNA, 31 bp, Homo sapiens; identical to SEQ ID NO: 9943
  chr2:102349438-102349469
  hypo

SEQ ID NO: 42618 - DNA, 31 bp, Homo sapiens; identical to SEQ ID NO: 9944
  chr2:102356563-102356594
  hypo

SEQ ID NO: 42619 - DNA, 31 bp, Homo sapiens; identical to SEQ ID NO: 9947
  chr2:102450133-102450164
  hypo

SEQ ID NO: 42620 - DNA, 31 bp, Homo sapiens; identical to SEQ ID NO: 9948
  chr2:102452625-102452656
  hypo

SEQ ID NO: 42621 - DNA, 31 bp, Homo sapiens; identical to SEQ ID NO: 9949
  chr2:102636185-102636216
  hypo

SEQ ID NO: 42622 - DNA, 31 bp, Homo sapiens; identical to SEQ ID NO: 9950
  chr2:102636248-102636279
  hypo

SEQ ID NO: 42623 - DNA, 38 bp, Homo sapiens; identical to SEQ ID NO: 9951
  chr2:102636324-102636362
  hypo

SEQ ID NO: 42624 - DNA, 31 bp, Homo sapiens; identical to SEQ ID NO: 9952
  chr2:102683511-102683542
  hypo

SEQ ID NO: 42625 - DNA, 31 bp, Homo sapiens; identical to SEQ ID NO: 9953
  chr2:102849810-102849841
  hypo

SEQ ID NO: 42626 - DNA, 52 bp, Homo sapiens; identical to SEQ ID NO: 9954
  chr2:102867170-102867222
  hypo

SEQ ID NO: 42627 - DNA, 67 bp, Homo sapiens; identical to SEQ ID NO: 9955
  chr2:105887867-105887934
  hypo

SEQ ID NO: 42628 - DNA, 56 bp, Homo sapiens; identical to SEQ ID NO: 9956
  chr2:105888003-105888059
  hypo

SEQ ID NO: 42629 - DNA, 31 bp, Homo sapiens; identical to SEQ ID NO: 9957
  chr2:105888487-105888518
  hypo

SEQ ID NO: 42630 - DNA, 37 bp, Homo sapiens; identical to SEQ ID NO: 9958
  chr2:106064704-106064741
  hypo

SEQ ID NO: 42631 - DNA, 31 bp, Homo sapiens; identical to SEQ ID NO: 9960
  chr2:106730181-106730212
  hypo

SEQ ID NO: 42632 - DNA, 31 bp, Homo sapiens; identical to SEQ ID NO: 9961
  chr2:106730399-106730430
  hypo

SEQ ID NO: 42633 - DNA, 61 bp, Homo sapiens; identical to SEQ ID NO: 9966
  chr2:107919330-107919391
  hypo

SEQ ID NO: 42634 - DNA, 31 bp, Homo sapiens; identical to SEQ ID NO: 9967
  chr2:107919406-107919437
  hypo

SEQ ID NO: 42635 - DNA, 40 bp, Homo sapiens; identical to SEQ ID NO: 9968
  chr2:109225029-109225069
  hypo

SEQ ID NO: 42636 - DNA, 31 bp, Homo sapiens; identical to SEQ ID NO: 9970
  chr2:109523049-109523080
  hypo

SEQ ID NO: 42637 - DNA, 38 bp, Homo sapiens; identical to SEQ ID NO: 9971
  chr2:109536233-109536271
  hypo

SEQ ID NO: 42638 - DNA, 31 bp, Homo sapiens; identical to SEQ ID NO: 9972
  chr2:109543737-109543768
  hypo

SEQ ID NO: 42639 - DNA, 38 bp, Homo sapiens; identical to SEQ ID NO: 9973
  chr2:109556839-109556877
  hypo

SEQ ID NO: 42640 - DNA, 56 bp, Homo sapiens; identical to SEQ ID NO: 9974
  chr2:110007878-110007934
  hypo

SEQ ID NO: 42641 - DNA, 42 bp, Homo sapiens; identical to SEQ ID NO: 9975
  chr2:110008028-110008070
  hypo

SEQ ID NO: 42642 - DNA, 31 bp, Homo sapiens; identical to SEQ ID NO: 9976
  chr2:110011965-110011996
  hypo

SEQ ID NO: 42643 - DNA, 31 bp, Homo sapiens; identical to SEQ ID NO: 9977
  chr2:110016923-110016954
  hypo

SEQ ID NO: 42644 - DNA, 31 bp, Homo sapiens; identical to SEQ ID NO: 9978
  chr2:110022089-110022120
  hypo

SEQ ID NO: 42645 - DNA, 31 bp, Homo sapiens; identical to SEQ ID NO: 9979
  chr2:110025458-110025489
  hypo

SEQ ID NO: 42646 - DNA, 31 bp, Homo sapiens; identical to SEQ ID NO: 9980
  chr2:110025509-110025540
  hypo

SEQ ID NO: 42647 - DNA, 31 bp, Homo sapiens; identical to SEQ ID NO: 9981
  chr2:110025541-110025572
  hypo

SEQ ID NO: 42648 - DNA, 31 bp, Homo sapiens; identical to SEQ ID NO: 9982
  chr2:110033758-110033789
  hypo

SEQ ID NO: 42649 - DNA, 31 bp, Homo sapiens; identical to SEQ ID NO: 9983
  chr2:110040035-110040066
  hypo

SEQ ID NO: 42650 - DNA, 31 bp, Homo sapiens; identical to SEQ ID NO: 9984
  chr2:110040229-110040260
  hypo

SEQ ID NO: 42651 - DNA, 31 bp, Homo sapiens; identical to SEQ ID NO: 9985
  chr2:110105993-110106024
  hypo

SEQ ID NO: 42652 - DNA, 50 bp, Homo sapiens; identical to SEQ ID NO: 9986
  chr2:110256841-110256891
  hypo

SEQ ID NO: 42653 - DNA, 31 bp, Homo sapiens; identical to SEQ ID NO: 9987
  chr2:110259068-110259099
  hypo

SEQ ID NO: 42654 - DNA, 31 bp, Homo sapiens; identical to SEQ ID NO: 9988
  chr2:110266916-110266947
  hypo

SEQ ID NO: 42655 - DNA, 31 bp, Homo sapiens; identical to SEQ ID NO: 9989
  chr2:110267204-110267235
  hypo

SEQ ID NO: 42656 - DNA, 31 bp, Homo sapiens; identical to SEQ ID NO: 9990
  chr2:110853613-110853644
  hypo

SEQ ID NO: 42657 - DNA, 57 bp, Homo sapiens; identical to SEQ ID NO: 9991
  chr2:110853646-110853703
  hypo

SEQ ID NO: 42658 - DNA, 31 bp, Homo sapiens; identical to SEQ ID NO: 9992
  chr2:110853779-110853810
  hypo

SEQ ID NO: 42659 - DNA, 31 bp, Homo sapiens; identical to SEQ ID NO: 1065
  chr2:111880645-111880676
  hypo

SEQ ID NO: 42660 - DNA, 54 bp, Homo sapiens; identical to SEQ ID NO: 1066
  chr2:111880677-111880731
  hypo

SEQ ID NO: 42661 - DNA, 31 bp, Homo sapiens; identical to SEQ ID NO: 1067
  chr2:112655268-112655299
  hypo

SEQ ID NO: 42662 - DNA, 34 bp, Homo sapiens; identical to SEQ ID NO: 9996
  chr2:112655539-112655573
  hypo

SEQ ID NO: 42663 - DNA, 31 bp, Homo sapiens; identical to SEQ ID NO: 9997
  chr2:113242120-113242151
  hypo

SEQ ID NO: 42664 - DNA, 31 bp, Homo sapiens; identical to SEQ ID NO: 9998
  chr2:113451876-113451907
  hypo

SEQ ID NO: 42665 - DNA, 91 bp, Homo sapiens; identical to SEQ ID NO: 9999
  chr2:113973330-113973421
  hypo

SEQ ID NO: 42666 - DNA, 31 bp, Homo sapiens; identical to SEQ ID NO: 10000
  chr2:113973488-113973519
  hypo

SEQ ID NO: 42667 - DNA, 2 bp, Homo sapiens
  chr2:114469901-114469903
  hypo
tt

SEQ ID NO: 42668 - DNA, 13 bp, Homo sapiens
  chr2:114469919-114469932
  hypo
gagtctcgctgtc

SEQ ID NO: 42669 - DNA, 31 bp, Homo sapiens; identical to SEQ ID NO: 10002
  chr2:114737398-114737429
  hypo

SEQ ID NO: 42670 - DNA, 31 bp, Homo sapiens; identical to SEQ ID NO: 10003
  chr2:119997107-119997138
  hypo

SEQ ID NO: 42671 - DNA, 46 bp, Homo sapiens; identical to SEQ ID NO: 10004
  chr2:120011807-120011853
  hypo

SEQ ID NO: 42672 - DNA, 62 bp, Homo sapiens; identical to SEQ ID NO: 10005
  chr2:120011896-120011958
  hypo

SEQ ID NO: 42673 - DNA, 31 bp, Homo sapiens; identical to SEQ ID NO: 10006
  chr2:120012442-120012473
  hypo

SEQ ID NO: 42674 - DNA, 46 bp, Homo sapiens; identical to SEQ ID NO: 10007
  chr2:120020876-120020922
  hypo

SEQ ID NO: 42675 - DNA, 40 bp, Homo sapiens; identical to SEQ ID NO: 10008
  chr2:120247826-120247866
  hypo

SEQ ID NO: 42676 - DNA, 31 bp, Homo sapiens; identical to SEQ ID NO: 10009
  chr2:120247882-120247913
  hypo

SEQ ID NO: 42677 - DNA, 31 bp, Homo sapiens; identical to SEQ ID NO: 10010
  chr2:120247939-120247970
  hypo

SEQ ID NO: 42678 - DNA, 31 bp, Homo sapiens; identical to SEQ ID NO: 10011
  chr2:120247980-120248011
  hypo

SEQ ID NO: 42679 - DNA, 129 bp, Homo sapiens; identical to SEQ ID NO: 1072
  chr2:120770808-120770937
  hypo

SEQ ID NO: 42680 - DNA, 92 bp, Homo sapiens; identical to SEQ ID NO: 1073
  chr2:120771018-120771110
  hypo

SEQ ID NO: 42681 - DNA, 29 bp, Homo sapiens
  chr2:120974105-120974134
  hypo
ccgcctagcacctgcgcaggtgcagtctc

SEQ ID NO: 42682 - DNA, 31 bp, Homo sapiens; identical to SEQ ID NO: 10019
  chr2:121109323-121109354
  hypo

SEQ ID NO: 42683 - DNA, 31 bp, Homo sapiens; identical to SEQ ID NO: 10020
  chr2:121136846-121136877
  hypo

SEQ ID NO: 42684 - DNA, 31 bp, Homo sapiens; identical to SEQ ID NO: 10021
  chr2:121190433-121190464
  hypo

SEQ ID NO: 42685 - DNA, 31 bp, Homo sapiens; identical to SEQ ID NO: 10022
  chr2:121210914-121210945
  hypo

SEQ ID NO: 42686 - DNA, 31 bp, Homo sapiens; identical to SEQ ID NO: 10023
  chr2:121243024-121243055
  hypo

SEQ ID NO: 42687 - DNA, 31 bp, Homo sapiens; identical to SEQ ID NO: 10024
  chr2:121243128-121243159
  hypo

SEQ ID NO: 42688 - DNA, 40 bp, Homo sapiens; identical to SEQ ID NO: 10026
  chr2:121327690-121327730
  hypo

SEQ ID NO: 42689 - DNA, 31 bp, Homo sapiens; identical to SEQ ID NO: 10027
  chr2:121381301-121381332
  hypo

SEQ ID NO: 42690 - DNA, 35 bp, Homo sapiens; identical to SEQ ID NO: 10028
  chr2:121381394-121381429
  hypo

SEQ ID NO: 42691 - DNA, 31 bp, Homo sapiens; identical to SEQ ID NO: 10029
  chr2:121381443-121381474
  hypo

SEQ ID NO: 42692 - DNA, 31 bp, Homo sapiens; identical to SEQ ID NO: 10030
  chr2:121411774-121411805
  hypo

SEQ ID NO: 42693 - DNA, 34 bp, Homo sapiens; identical to SEQ ID NO: 10031
  chr2:121436962-121436996
  hypo

SEQ ID NO: 42694 - DNA, 31 bp, Homo sapiens; identical to SEQ ID NO: 1074
  chr2:121438058-121438089
  hypo

SEQ ID NO: 42695 - DNA, 31 bp, Homo sapiens; identical to SEQ ID NO: 10033
  chr2:121534939-121534970
  hypo

SEQ ID NO: 42696 - DNA, 39 bp, Homo sapiens; identical to SEQ ID NO: 10034
  chr2:121550759-121550798
  hypo

SEQ ID NO: 42697 - DNA, 48 bp, Homo sapiens; identical to SEQ ID NO: 10035
  chr2:121550816-121550864
  hypo

SEQ ID NO: 42698 - DNA, 31 bp, Homo sapiens; identical to SEQ ID NO: 10036
  chr2:121550940-121550971
  hypo

SEQ ID NO: 42699 - DNA, 31 bp, Homo sapiens; identical to SEQ ID NO: 10037
  chr2:121609722-121609753
  hypo

SEQ ID NO: 42700 - DNA, 31 bp, Homo sapiens; identical to SEQ ID NO: 10038
  chr2:121609831-121609862
  hypo

SEQ ID NO: 42701 - DNA, 31 bp, Homo sapiens; identical to SEQ ID NO: 10039
  chr2:121688087-121688118
  hypo

SEQ ID NO: 42702 - DNA, 31 bp, Homo sapiens; identical to SEQ ID NO: 10040
  chr2:121711173-121711204
  hypo

SEQ ID NO: 42703 - DNA, 31 bp, Homo sapiens; identical to SEQ ID NO: 10041
  chr2:121711222-121711253
  hypo

SEQ ID NO: 42704 - DNA, 31 bp, Homo sapiens; identical to SEQ ID NO: 10043
  chr2:121723280-121723311
  hypo

SEQ ID NO: 42705 - DNA, 45 bp, Homo sapiens; identical to SEQ ID NO: 10044
  chr2:121726278-121726323
  hypo

SEQ ID NO: 42706 - DNA, 31 bp, Homo sapiens; identical to SEQ ID NO: 10045
  chr2:121818463-121818494
  hypo

SEQ ID NO: 42707 - DNA, 31 bp, Homo sapiens; identical to SEQ ID NO: 10046
  chr2:121827342-121827373
  hypo

SEQ ID NO: 42708 - DNA, 31 bp, Homo sapiens; identical to SEQ ID NO: 10047
  chr2:121846109-121846140
  hypo

SEQ ID NO: 42709 - DNA, 37 bp, Homo sapiens; identical to SEQ ID NO: 10049
  chr2:121962068-121962105
  hypo

SEQ ID NO: 42710 - DNA, 91 bp, Homo sapiens; identical to SEQ ID NO: 10050
  chr2:121975956-121976047
  hypo

SEQ ID NO: 42711 - DNA, 31 bp, Homo sapiens; identical to SEQ ID NO: 10051
  chr2:121976098-121976129
  hypo

SEQ ID NO: 42712 - DNA, 31 bp, Homo sapiens; identical to SEQ ID NO: 10052
  chr2:121976134-121976165
  hypo

SEQ ID NO: 42713 - DNA, 31 bp, Homo sapiens; identical to SEQ ID NO: 10053
  chr2:121982627-121982658
  hypo

SEQ ID NO: 42714 - DNA, 31 bp, Homo sapiens; identical to SEQ ID NO: 10054
  chr2:122006602-122006633
  hypo

SEQ ID NO: 42715 - DNA, 31 bp, Homo sapiens; identical to SEQ ID NO: 10055
  chr2:122011447-122011478
  hypo

SEQ ID NO: 42716 - DNA, 2 bp, Homo sapiens
  chr2:122104568-122104570
  hypo
gc

SEQ ID NO: 42717 - DNA, 31 bp, Homo sapiens; identical to SEQ ID NO: 10058
  chr2:122409687-122409718
  hypo

SEQ ID NO: 42718 - DNA, 32 bp, Homo sapiens; identical to SEQ ID NO: 10059
  chr2:122497729-122497761
  hypo

SEQ ID NO: 42719 - DNA, 31 bp, Homo sapiens; identical to SEQ ID NO: 10060
  chr2:122783864-122783895
  hypo

SEQ ID NO: 42720 - DNA, 56 bp, Homo sapiens; identical to SEQ ID NO: 10061
  chr2:122783907-122783963
  hypo

SEQ ID NO: 42721 - DNA, 62 bp, Homo sapiens; identical to SEQ ID NO: 10062
  chr2:127428872-127428934
  hypo

SEQ ID NO: 42722 - DNA, 20 bp, Homo sapiens
  chr2:127535179-127535199
  hypo
aagggcgtcccaagaaagga

SEQ ID NO: 42723 - DNA, 31 bp, Homo sapiens; identical to SEQ ID NO: 10070
  chr2:127827840-127827871
  hypo

SEQ ID NO: 42724 - DNA, 40 bp, Homo sapiens; identical to SEQ ID NO: 10071
  chr2:127855674-127855714
  hypo

SEQ ID NO: 42725 - DNA, 31 bp, Homo sapiens; identical to SEQ ID NO: 10072
  chr2:128029535-128029566
  hypo

SEQ ID NO: 42726 - DNA, 31 bp, Homo sapiens; identical to SEQ ID NO: 10073
  chr2:128338346-128338377
  hypo

SEQ ID NO: 42727 - DNA, 30 bp, Homo sapiens; identical to SEQ ID NO: 10074
  chr2:128549955-128549985
  hypo

SEQ ID NO: 42728 - DNA, 34 bp, Homo sapiens; identical to SEQ ID NO: 10075
  chr2:128600139-128600173
  hypo

SEQ ID NO: 42729 - DNA, 31 bp, Homo sapiens; identical to SEQ ID NO: 10080
  chr2:129134897-129134928
  hypo

SEQ ID NO: 42730 - DNA, 31 bp, Homo sapiens; identical to SEQ ID NO: 10081
  chr2:129377450-129377481
  hypo

SEQ ID NO: 42731 - DNA, 48 bp, Homo sapiens; identical to SEQ ID NO: 10082
  chr2:130356760-130356808
  hypo

SEQ ID NO: 42732 - DNA, 31 bp, Homo sapiens; identical to SEQ ID NO: 10083
  chr2:130356817-130356848
  hypo

SEQ ID NO: 42733 - DNA, 31 bp, Homo sapiens; identical to SEQ ID NO: 10084
  chr2:130669986-130670017
  hypo

SEQ ID NO: 42734 - DNA, 37 bp, Homo sapiens; identical to SEQ ID NO: 10085
  chr2:130670340-130670377
  hypo

SEQ ID NO: 42735 - DNA, 40 bp, Homo sapiens; identical to SEQ ID NO: 10086
  chr2:130919035-130919075
  hypo

SEQ ID NO: 42736 - DNA, 139 bp, Homo sapiens; identical to SEQ ID NO: 10087
  chr2:130943150-130943289
  hypo

SEQ ID NO: 42737 - DNA, 24 bp, Homo sapiens
  chr2:130948153-130948177
  hypo
caaggggggcgggcctgggaagag

SEQ ID NO: 42738 - DNA, 31 bp, Homo sapiens; identical to SEQ ID NO: 10090
  chr2:131502559-131502590
  hypo

SEQ ID NO: 42739 - DNA, 31 bp, Homo sapiens; identical to SEQ ID NO: 10091
  chr2:131502617-131502648
  hypo

SEQ ID NO: 42740 - DNA, 31 bp, Homo sapiens; identical to SEQ ID NO: 10092
  chr2:131583858-131583889
  hypo

SEQ ID NO: 42741 - DNA, 49 bp, Homo sapiens; identical to SEQ ID NO: 10093
  chr2:131674645-131674694
  hypo

SEQ ID NO: 42742 - DNA, 2 bp, Homo sapiens
  chr2:131813290-131813292
  hypo
ct

SEQ ID NO: 42743 - DNA, 31 bp, Homo sapiens; identical to SEQ ID NO: 10095
  chr2:131813492-131813523
  hypo

SEQ ID NO: 42744 - DNA, 31 bp, Homo sapiens; identical to SEQ ID NO: 10097
  chr2:131878768-131878799
  hypo

SEQ ID NO: 42745 - DNA, 31 bp, Homo sapiens; identical to SEQ ID NO: 10098
  chr2:132274361-132274392
  hypo

SEQ ID NO: 42746 - DNA, 42 bp, Homo sapiens; identical to SEQ ID NO: 10099
  chr2:132274444-132274486
  hypo

SEQ ID NO: 42747 - DNA, 88 bp, Homo sapiens; identical to SEQ ID NO: 10100
  chr2:132586578-132586666
  hypo

SEQ ID NO: 42748 - DNA, 31 bp, Homo sapiens; identical to SEQ ID NO: 10102
  chr2:135926351-135926382
  hypo

SEQ ID NO: 42749 - DNA, 34 bp, Homo sapiens; identical to SEQ ID NO: 1092
  chr2:136288365-136288399
  hypo

SEQ ID NO: 42750 - DNA, 43 bp, Homo sapiens; identical to SEQ ID NO: 1093
  chr2:136288411-136288454
  hypo

SEQ ID NO: 42751 - DNA, 43 bp, Homo sapiens; identical to SEQ ID NO: 1094
  chr2:136874156-136874199
  hypo

SEQ ID NO: 42752 - DNA, 63 bp, Homo sapiens; identical to SEQ ID NO: 35685
  chr2:136874870-136874933
  hypo

SEQ ID NO: 42753 - DNA, 52 bp, Homo sapiens; identical to SEQ ID NO: 1098
  chr2:136875472-136875524
  hypo

SEQ ID NO: 42754 - DNA, 159 bp, Homo sapiens; identical to SEQ ID NO: 1099
  chr2:136875620-136875779
  hypo

SEQ ID NO: 42755 - DNA, 2 bp, Homo sapiens
  chr2:136875880-136875882
  hypo
gg

SEQ ID NO: 42756 - DNA, 31 bp, Homo sapiens; identical to SEQ ID NO: 10114
  chr2:138689490-138689521
  hypo

SEQ ID NO: 42757 - DNA, 31 bp, Homo sapiens; identical to SEQ ID NO: 10115
  chr2:138689541-138689572
  hypo

SEQ ID NO: 42758 - DNA, 66 bp, Homo sapiens; identical to SEQ ID NO: 10116
  chr2:138689623-138689689
  hypo

SEQ ID NO: 42759 - DNA, 34 bp, Homo sapiens; identical to SEQ ID NO: 1107
  chr2:145090079-145090113
  hypo

SEQ ID NO: 42760 - DNA, 1 bp, Homo sapiens
  chr2:145273327-145273328
  hypo
a

SEQ ID NO: 42761 - DNA, 317 bp, Homo sapiens; identical to SEQ ID NO: 1129
  chr2:148601815-148602132
  hypo

SEQ ID NO: 42762 - DNA, 277 bp, Homo sapiens; identical to SEQ ID NO: 1130
  chr2:148602136-148602413
  hypo

SEQ ID NO: 42763 - DNA, 38 bp, Homo sapiens; identical to SEQ ID NO: 1131
  chr2:148602727-148602765
  hypo

SEQ ID NO: 42764 - DNA, 36 bp, Homo sapiens; identical to SEQ ID NO: 1132
  chr2:148602775-148602811
  hypo

SEQ ID NO: 42765 - DNA, 54 bp, Homo sapiens; identical to SEQ ID NO: 1133
  chr2:148602889-148602943
  hypo

SEQ ID NO: 42766 - DNA, 38 bp, Homo sapiens; identical to SEQ ID NO: 10141
  chr2:149045674-149045712
  hypo

SEQ ID NO: 42767 - DNA, 31 bp, Homo sapiens; identical to SEQ ID NO: 10142
  chr2:150184648-150184679
  hypo

SEQ ID NO: 42768 - DNA, 31 bp, Homo sapiens; identical to SEQ ID NO: 10143
  chr2:152154197-152154228
  hypo

SEQ ID NO: 42769 - DNA, 49 bp, Homo sapiens; identical to SEQ ID NO: 10145
  chr2:152642696-152642745
  hypo

SEQ ID NO: 42770 - DNA, 31 bp, Homo sapiens; identical to SEQ ID NO: 10146
  chr2:152642804-152642835
  hypo

SEQ ID NO: 42771 - DNA, 38 bp, Homo sapiens; identical to SEQ ID NO: 10147
  chr2:152642865-152642903
  hypo

SEQ ID NO: 42772 - DNA, 31 bp, Homo sapiens; identical to SEQ ID NO: 1145
  chr2:153192302-153192333
  hypo

SEQ ID NO: 42773 - DNA, 31 bp, Homo sapiens; identical to SEQ ID NO: 1146
  chr2:153192342-153192373
  hypo

SEQ ID NO: 42774 - DNA, 56 bp, Homo sapiens; identical to SEQ ID NO: 1148
  chr2:157189364-157189420
  hypo

SEQ ID NO: 42775 - DNA, 96 bp, Homo sapiens; identical to SEQ ID NO: 1149
  chr2:157189481-157189577
  hypo

SEQ ID NO: 42776 - DNA, 108 bp, Homo sapiens; identical to SEQ ID NO: 1150
  chr2:157292330-157292438
  hypo

SEQ ID NO: 42777 - DNA, 177 bp, Homo sapiens; identical to SEQ ID NO: 1151
  chr2:157292445-157292622
  hypo

SEQ ID NO: 42778 - DNA, 31 bp, Homo sapiens; identical to SEQ ID NO: 1153
  chr2:158485185-158485216
  hypo

SEQ ID NO: 42779 - DNA, 75 bp, Homo sapiens; identical to SEQ ID NO: 1154
  chr2:158485223-158485298
  hypo

SEQ ID NO: 42780 - DNA, 34 bp, Homo sapiens; identical to SEQ ID NO: 10156
  chr2:158914981-158915015
  hypo

SEQ ID NO: 42781 - DNA, 31 bp, Homo sapiens; identical to SEQ ID NO: 1157
  chr2:159313053-159313084
  hypo

SEQ ID NO: 42782 - DNA, 199 bp, Homo sapiens; identical to SEQ ID NO: 1158
  chr2:159313328-159313527
  hypo

SEQ ID NO: 42783 - DNA, 147 bp, Homo sapiens; identical to SEQ ID NO: 1159
  chr2:159313580-159313727
  hypo

SEQ ID NO: 42784 - DNA, 163 bp, Homo sapiens; identical to SEQ ID NO: 1160
  chr2:159313730-159313893
  hypo

SEQ ID NO: 42785 - DNA, 103 bp, Homo sapiens; identical to SEQ ID NO: 1161
  chr2:159314097-159314200
  hypo

SEQ ID NO: 42786 - DNA, 248 bp, Homo sapiens; identical to SEQ ID NO: 1162
  chr2:159314217-159314465
  hypo

SEQ ID NO: 42787 - DNA, 66 bp, Homo sapiens; identical to SEQ ID NO: 1163
  chr2:159314657-159314723
  hypo

SEQ ID NO: 42788 - DNA, 71 bp, Homo sapiens; identical to SEQ ID NO: 1164
  chr2:159314726-159314797
  hypo

SEQ ID NO: 42789 - DNA, 31 bp, Homo sapiens; identical to SEQ ID NO: 10165
  chr2:159538761-159538792
  hypo

SEQ ID NO: 42790 - DNA, 31 bp, Homo sapiens; identical to SEQ ID NO: 10166
  chr2:159747449-159747480
  hypo

SEQ ID NO: 42791 - DNA, 31 bp, Homo sapiens; identical to SEQ ID NO: 1169
  chr2:160142448-160142479
  hypo

SEQ ID NO: 42792 - DNA, 31 bp, Homo sapiens; identical to SEQ ID NO: 1170
  chr2:160142591-160142622
  hypo

SEQ ID NO: 42793 - DNA, 45 bp, Homo sapiens; identical to SEQ ID NO: 1171
  chr2:160142703-160142748
  hypo

SEQ ID NO: 42794 - DNA, 31 bp, Homo sapiens; identical to SEQ ID NO: 1172
  chr2:160142757-160142788
  hypo

SEQ ID NO: 42795 - DNA, 31 bp, Homo sapiens; identical to SEQ ID NO: 1173
  chr2:160142924-160142955
  hypo

SEQ ID NO: 42796 - DNA, 43 bp, Homo sapiens; identical to SEQ ID NO: 10172
  chr2:160632630-160632673
  hypo

SEQ ID NO: 42797 - DNA, 31 bp, Homo sapiens; identical to SEQ ID NO: 1175
  chr2:160654434-160654465
  hypo

SEQ ID NO: 42798 - DNA, 64 bp, Homo sapiens; identical to SEQ ID NO: 1185
  chr2:165477629-165477693
  hypo

SEQ ID NO: 42799 - DNA, 53 bp, Homo sapiens; identical to SEQ ID NO: 1186
  chr2:165697708-165697761
  hypo

SEQ ID NO: 42800 - DNA, 36 bp, Homo sapiens; identical to SEQ ID NO: 1187
  chr2:165697973-165698009
  hypo

SEQ ID NO: 42801 - DNA, 37 bp, Homo sapiens; identical to SEQ ID NO: 1188
  chr2:165698273-165698310
  hypo

SEQ ID NO: 42802 - DNA, 129 bp, Homo sapiens; identical to SEQ ID NO: 1189
  chr2:165698490-165698619
  hypo

SEQ ID NO: 42803 - DNA, 46 bp, Homo sapiens; identical to SEQ ID NO: 1190
  chr2:165698623-165698669
  hypo

SEQ ID NO: 42804 - DNA, 31 bp, Homo sapiens; identical to SEQ ID NO: 10187
  chr2:168249795-168249826
  hypo

SEQ ID NO: 42805 - DNA, 31 bp, Homo sapiens; identical to SEQ ID NO: 10189
  chr2:168931676-168931707
  hypo

SEQ ID NO: 42806 - DNA, 26 bp, Homo sapiens
  chr2:169312793-169312819
  hypo
gagccttcgagagcagcggccgcgga

SEQ ID NO: 42807 - DNA, 66 bp, Homo sapiens; identical to SEQ ID NO: 35753
  chr2:169312881-169312947
  hypo

SEQ ID NO: 42808 - DNA, 42 bp, Homo sapiens; identical to SEQ ID NO: 10192
  chr2:169436466-169436508
  hypo

SEQ ID NO: 42809 - DNA, 31 bp, Homo sapiens; identical to SEQ ID NO: 10193
  chr2:169453320-169453351
  hypo

SEQ ID NO: 42810 - DNA, 31 bp, Homo sapiens; identical to SEQ ID NO: 10194
  chr2:169533300-169533331
  hypo

SEQ ID NO: 42811 - DNA, 31 bp, Homo sapiens; identical to SEQ ID NO: 10195
  chr2:169533380-169533411
  hypo

SEQ ID NO: 42812 - DNA, 42 bp, Homo sapiens; identical to SEQ ID NO: 10196
  chr2:169533456-169533498
  hypo

SEQ ID NO: 42813 - DNA, 31 bp, Homo sapiens; identical to SEQ ID NO: 10198
  chr2:169596485-169596516
  hypo

SEQ ID NO: 42814 - DNA, 31 bp, Homo sapiens; identical to SEQ ID NO: 10199
  chr2:169610604-169610635
  hypo

SEQ ID NO: 42815 - DNA, 2 bp, Homo sapiens
  chr2:170551728-170551730
  hypo
tc

SEQ ID NO: 42816 - DNA, 31 bp, Homo sapiens; identical to SEQ ID NO: 10203
  chr2:170552125-170552156
  hypo

SEQ ID NO: 42817 - DNA, 6 bp, Homo sapiens
  chr2:170682144-170682150
  hypo
tgggag

SEQ ID NO: 42818 - DNA, 46 bp, Homo sapiens; identical to SEQ ID NO: 10208
  chr2:171542903-171542949
  hypo

SEQ ID NO: 42819 - DNA, 31 bp, Homo sapiens; identical to SEQ ID NO: 10209
  chr2:171542955-171542986
  hypo

SEQ ID NO: 42820 - DNA, 49 bp, Homo sapiens; identical to SEQ ID NO: 1201
  chr2:171627263-171627312
  hypo

SEQ ID NO: 42821 - DNA, 34 bp, Homo sapiens; identical to SEQ ID NO: 1202
  chr2:171627346-171627380
  hypo

SEQ ID NO: 42822 - DNA, 208 bp, Homo sapiens; identical to SEQ ID NO: 1203
  chr2:171627473-171627681
  hypo

SEQ ID NO: 42823 - DNA, 73 bp, Homo sapiens; identical to SEQ ID NO: 1204
  chr2:171627823-171627896
  hypo

SEQ ID NO: 42824 - DNA, 48 bp, Homo sapiens; identical to SEQ ID NO: 1205
  chr2:171627930-171627978
  hypo

SEQ ID NO: 42825 - DNA, 2 bp, Homo sapiens
  chr2:171822508-171822510
  hypo
ct

SEQ ID NO: 42826 - DNA, 31 bp, Homo sapiens; identical to SEQ ID NO: 10220
  chr2:172873883-172873914
  hypo

SEQ ID NO: 42827 - DNA, 31 bp, Homo sapiens; identical to SEQ ID NO: 10222
  chr2:173424037-173424068
  hypo

SEQ ID NO: 42828 - DNA, 46 bp, Homo sapiens; identical to SEQ ID NO: 1214
  chr2:173940455-173940501
  hypo

SEQ ID NO: 42829 - DNA, 106 bp, Homo sapiens; identical to SEQ ID NO: 1215
  chr2:173940629-173940735
  hypo

SEQ ID NO: 42830 - DNA, 31 bp, Homo sapiens; identical to SEQ ID NO: 1216
  chr2:174349950-174349981
  hypo

SEQ ID NO: 42831 - DNA, 52 bp, Homo sapiens; identical to SEQ ID NO: 1217
  chr2:174349995-174350047
  hypo

SEQ ID NO: 42832 - DNA, 31 bp, Homo sapiens; identical to SEQ ID NO: 1218
  chr2:174350101-174350132
  hypo

SEQ ID NO: 42833 - DNA, 31 bp, Homo sapiens; identical to SEQ ID NO: 1219
  chr2:174350137-174350168
  hypo

SEQ ID NO: 42834 - DNA, 31 bp, Homo sapiens; identical to SEQ ID NO: 10230
  chr2:174522472-174522503
  hypo

SEQ ID NO: 42835 - DNA, 43 bp, Homo sapiens; identical to SEQ ID NO: 10231
  chr2:174522509-174522552
  hypo

SEQ ID NO: 42836 - DNA, 31 bp, Homo sapiens; identical to SEQ ID NO: 10232
  chr2:174522595-174522626
  hypo

SEQ ID NO: 42837 - DNA, 30 bp, Homo sapiens; identical to SEQ ID NO: 10233
  chr2:175110638-175110668
  hypo

SEQ ID NO: 42838 - DNA, 31 bp, Homo sapiens; identical to SEQ ID NO: 10237
  chr2:175855047-175855078
  hypo

SEQ ID NO: 42839 - DNA, 35 bp, Homo sapiens; identical to SEQ ID NO: 10238
  chr2:175927793-175927828
  hypo

SEQ ID NO: 42840 - DNA, 55 bp, Homo sapiens; identical to SEQ ID NO: 10239
  chr2:175927847-175927902
  hypo

SEQ ID NO: 42841 - DNA, 37 bp, Homo sapiens; identical to SEQ ID NO: 10240
  chr2:175927915-175927952
  hypo

SEQ ID NO: 42842 - DNA, 31 bp, Homo sapiens; identical to SEQ ID NO: 10241
  chr2:177013794-177013825
  hypo

SEQ ID NO: 42843 - DNA, 31 bp, Homo sapiens; identical to SEQ ID NO: 10242
  chr2:177013828-177013859
  hypo

SEQ ID NO: 42844 - DNA, 2 bp, Homo sapiens
  chr2:178131779-178131781
  hypo
gc

SEQ ID NO: 42845 - DNA, 31 bp, Homo sapiens; identical to SEQ ID NO: 10244
  chr2:178627423-178627454
  hypo

SEQ ID NO: 42846 - DNA, 2 bp, Homo sapiens
  chr2:178972991-178972993
  hypo
ac

SEQ ID NO: 42847 - DNA, 31 bp, Homo sapiens; identical to SEQ ID NO: 10246
  chr2:179012822-179012853
  hypo

SEQ ID NO: 42848 - DNA, 31 bp, Homo sapiens; identical to SEQ ID NO: 10247
  chr2:179058447-179058478
  hypo

SEQ ID NO: 42849 - DNA, 31 bp, Homo sapiens; identical to SEQ ID NO: 10249
  chr2:179999949-179999980
  hypo

SEQ ID NO: 42850 - DNA, 32 bp, Homo sapiens; identical to SEQ ID NO: 10250
  chr2:180019920-180019952
  hypo

SEQ ID NO: 42851 - DNA, 31 bp, Homo sapiens; identical to SEQ ID NO: 10251
  chr2:180027743-180027774
  hypo

SEQ ID NO: 42852 - DNA, 86 bp, Homo sapiens; identical to SEQ ID NO: 1231
  chr2:180129610-180129696
  hypo

SEQ ID NO: 42853 - DNA, 31 bp, Homo sapiens; identical to SEQ ID NO: 10253
  chr2:180886918-180886949
  hypo

SEQ ID NO: 42854 - DNA, 31 bp, Homo sapiens; identical to SEQ ID NO: 1245
  chr2:182756672-182756703
  hypo

SEQ ID NO: 42855 - DNA, 31 bp, Homo sapiens; identical to SEQ ID NO: 1255
  chr2:183902341-183902372
  hypo

SEQ ID NO: 42856 - DNA, 44 bp, Homo sapiens; identical to SEQ ID NO: 1257
  chr2:183902442-183902486
  hypo

SEQ ID NO: 42857 - DNA, 121 bp, Homo sapiens; identical to SEQ ID NO: 1258
  chr2:183902679-183902800
  hypo

SEQ ID NO: 42858 - DNA, 31 bp, Homo sapiens; identical to SEQ ID NO: 1259
  chr2:183902804-183902835
  hypo

SEQ ID NO: 42859 - DNA, 31 bp, Homo sapiens; identical to SEQ ID NO: 1260
  chr2:183902865-183902896
  hypo

SEQ ID NO: 42860 - DNA, 58 bp, Homo sapiens; identical to SEQ ID NO: 1261
  chr2:183902905-183902963
  hypo

SEQ ID NO: 42861 - DNA, 45 bp, Homo sapiens; identical to SEQ ID NO: 1262
  chr2:183902964-183903009
  hypo

SEQ ID NO: 42862 - DNA, 178 bp, Homo sapiens; identical to SEQ ID NO: 1263
  chr2:183903037-183903215
  hypo

SEQ ID NO: 42863 - DNA, 190 bp, Homo sapiens; identical to SEQ ID NO: 1264
  chr2:183903236-183903426
  hypo

SEQ ID NO: 42864 - DNA, 31 bp, Homo sapiens; identical to SEQ ID NO: 10273
  chr2:183964790-183964821
  hypo

SEQ ID NO: 42865 - DNA, 39 bp, Homo sapiens; identical to SEQ ID NO: 1265
  chr2:187454989-187455028
  hypo

SEQ ID NO: 42866 - DNA, 61 bp, Homo sapiens; identical to SEQ ID NO: 1266
  chr2:187455150-187455211
  hypo

SEQ ID NO: 42867 - DNA, 58 bp, Homo sapiens; identical to SEQ ID NO: 1267
  chr2:187455216-187455274
  hypo

SEQ ID NO: 42868 - DNA, 40 bp, Homo sapiens; identical to SEQ ID NO: 1270
  chr2:191513081-191513121
  hypo

SEQ ID NO: 42869 - DNA, 36 bp, Homo sapiens; identical to SEQ ID NO: 1271
  chr2:192109886-192109922
  hypo

SEQ ID NO: 42870 - DNA, 117 bp, Homo sapiens; identical to SEQ ID NO: 1272
  chr2:192110380-192110497
  hypo

SEQ ID NO: 42871 - DNA, 31 bp, Homo sapiens; identical to SEQ ID NO: 10280
  chr2:192342591-192342622
  hypo

SEQ ID NO: 42872 - DNA, 31 bp, Homo sapiens; identical to SEQ ID NO: 10281
  chr2:192342645-192342676
  hypo

SEQ ID NO: 42873 - DNA, 31 bp, Homo sapiens; identical to SEQ ID NO: 10282
  chr2:192746022-192746053
  hypo

SEQ ID NO: 42874 - DNA, 31 bp, Homo sapiens; identical to SEQ ID NO: 10283
  chr2:192746554-192746585
  hypo

SEQ ID NO: 42875 - DNA, 31 bp, Homo sapiens; identical to SEQ ID NO: 10284
  chr2:194333178-194333209
  hypo

SEQ ID NO: 42876 - DNA, 2 bp, Homo sapiens
  chr2:198317067-198317069
  hypo
tt

SEQ ID NO: 42877 - DNA, 31 bp, Homo sapiens; identical to SEQ ID NO: 10288
  chr2:200457172-200457203
  hypo

SEQ ID NO: 42878 - DNA, 58 bp, Homo sapiens; identical to SEQ ID NO: 10289
  chr2:200938956-200939014
  hypo

SEQ ID NO: 42879 - DNA, 134 bp, Homo sapiens; identical to SEQ ID NO: 1277
  chr2:201171184-201171318
  hypo

SEQ ID NO: 42880 - DNA, 103 bp, Homo sapiens; identical to SEQ ID NO: 1278
  chr2:201171396-201171499
  hypo

SEQ ID NO: 42881 - DNA, 405 bp, Homo sapiens; identical to SEQ ID NO: 1279
  chr2:201171603-201172008
  hypo

SEQ ID NO: 42882 - DNA, 226 bp, Homo sapiens; identical to SEQ ID NO: 1280
  chr2:201172122-201172348
  hypo

SEQ ID NO: 42883 - DNA, 31 bp, Homo sapiens; identical to SEQ ID NO: 1281
  chr2:201172568-201172599
  hypo

SEQ ID NO: 42884 - DNA, 31 bp, Homo sapiens; identical to SEQ ID NO: 10295
  chr2:202893411-202893442
  hypo

SEQ ID NO: 42885 - DNA, 31 bp, Homo sapiens; identical to SEQ ID NO: 10296
  chr2:203431924-203431955
  hypo

SEQ ID NO: 42886 - DNA, 117 bp, Homo sapiens; identical to SEQ ID NO: 10297
  chr2:203431970-203432087
  hypo

SEQ ID NO: 42887 - DNA, 31 bp, Homo sapiens; identical to SEQ ID NO: 10298
  chr2:203498547-203498578
  hypo

SEQ ID NO: 42888 - DNA, 82 bp, Homo sapiens; identical to SEQ ID NO: 1282
  chr2:204399881-204399963
  hypo

SEQ ID NO: 42889 - DNA, 31 bp, Homo sapiens; identical to SEQ ID NO: 1287
  chr2:206166172-206166203
  hypo

SEQ ID NO: 42890 - DNA, 45 bp, Homo sapiens; identical to SEQ ID NO: 10302
  chr2:206166493-206166538
  hypo

SEQ ID NO: 42891 - DNA, 38 bp, Homo sapiens; identical to SEQ ID NO: 10303
  chr2:206605354-206605392
  hypo

SEQ ID NO: 42892 - DNA, 31 bp, Homo sapiens; identical to SEQ ID NO: 10304
  chr2:206608211-206608242
  hypo

SEQ ID NO: 42893 - DNA, 31 bp, Homo sapiens; identical to SEQ ID NO: 10305
  chr2:206609769-206609800
  hypo

SEQ ID NO: 42894 - DNA, 31 bp, Homo sapiens; identical to SEQ ID NO: 10306
  chr2:206609827-206609858
  hypo

SEQ ID NO: 42895 - DNA, 60 bp, Homo sapiens; identical to SEQ ID NO: 10307
  chr2:206826959-206827019
  hypo

SEQ ID NO: 42896 - DNA, 31 bp, Homo sapiens; identical to SEQ ID NO: 10308
  chr2:206827020-206827051
  hypo

SEQ ID NO: 42897 - DNA, 23 bp, Homo sapiens
  chr2:206830608-206830631
  hypo
ggggccttgcaagtctcggcaga

SEQ ID NO: 42898 - DNA, 37 bp, Homo sapiens; identical to SEQ ID NO: 10310
  chr2:206971205-206971242
  hypo

SEQ ID NO: 42899 - DNA, 31 bp, Homo sapiens; identical to SEQ ID NO: 1289
  chr2:208395299-208395330
  hypo

SEQ ID NO: 42900 - DNA, 30 bp, Homo sapiens
  chr2:208575146-208575176
  hypo
ctaggtcgcccaggctggagtgcaatggcg

SEQ ID NO: 42901 - DNA, 42 bp, Homo sapiens; identical to SEQ ID NO: 10314
  chr2:208577541-208577583
  hypo

SEQ ID NO: 42902 - DNA, 52 bp, Homo sapiens; identical to SEQ ID NO: 10316
  chr2:208580768-208580820
  hypo

SEQ ID NO: 42903 - DNA, 31 bp, Homo sapiens; identical to SEQ ID NO: 10317
  chr2:208580834-208580865
  hypo

SEQ ID NO: 42904 - DNA, 31 bp, Homo sapiens; identical to SEQ ID NO: 10318
  chr2:208622119-208622150
  hypo

SEQ ID NO: 42905 - DNA, 31 bp, Homo sapiens; identical to SEQ ID NO: 10319
  chr2:208994120-208994151
  hypo

SEQ ID NO: 42906 - DNA, 86 bp, Homo sapiens; identical to SEQ ID NO: 1293
  chr2:209118760-209118846
  hypo

SEQ ID NO: 42907 - DNA, 37 bp, Homo sapiens; identical to SEQ ID NO: 1294
  chr2:209118862-209118899
  hypo

SEQ ID NO: 42908 - DNA, 31 bp, Homo sapiens; identical to SEQ ID NO: 10324
  chr2:216196383-216196414
  hypo

SEQ ID NO: 42909 - DNA, 38 bp, Homo sapiens; identical to SEQ ID NO: 10326
  chr2:216825035-216825073
  hypo

SEQ ID NO: 42910 - DNA, 31 bp, Homo sapiens; identical to SEQ ID NO: 1295
  chr2:216826037-216826068
  hypo

SEQ ID NO: 42911 - DNA, 46 bp, Homo sapiens; identical to SEQ ID NO: 10328
  chr2:216852231-216852277
  hypo

SEQ ID NO: 42912 - DNA, 31 bp, Homo sapiens; identical to SEQ ID NO: 10329
  chr2:216885425-216885456
  hypo

SEQ ID NO: 42913 - DNA, 31 bp, Homo sapiens; identical to SEQ ID NO: 10330
  chr2:216885467-216885498
  hypo

SEQ ID NO: 42914 - DNA, 31 bp, Homo sapiens; identical to SEQ ID NO: 10331
  chr2:216885526-216885557
  hypo

SEQ ID NO: 42915 - DNA, 47 bp, Homo sapiens; identical to SEQ ID NO: 10332
  chr2:216885562-216885609
  hypo

SEQ ID NO: 42916 - DNA, 31 bp, Homo sapiens; identical to SEQ ID NO: 10333
  chr2:216913503-216913534
  hypo

SEQ ID NO: 42917 - DNA, 31 bp, Homo sapiens; identical to SEQ ID NO: 10334
  chr2:217528923-217528954
  hypo

SEQ ID NO: 42918 - DNA, 47 bp, Homo sapiens; identical to SEQ ID NO: 10335
  chr2:218676419-218676466
  hypo

SEQ ID NO: 42919 - DNA, 59 bp, Homo sapiens; identical to SEQ ID NO: 10336
  chr2:218678425-218678484
  hypo

SEQ ID NO: 42920 - DNA, 31 bp, Homo sapiens; identical to SEQ ID NO: 10337
  chr2:218698051-218698082
  hypo

SEQ ID NO: 42921 - DNA, 69 bp, Homo sapiens; identical to SEQ ID NO: 10338
  chr2:218700731-218700800
  hypo

SEQ ID NO: 42922 - DNA, 36 bp, Homo sapiens; identical to SEQ ID NO: 10339
  chr2:218704381-218704417
  hypo

SEQ ID NO: 42923 - DNA, 31 bp, Homo sapiens; identical to SEQ ID NO: 10340
  chr2:218712678-218712709
  hypo

SEQ ID NO: 42924 - DNA, 31 bp, Homo sapiens; identical to SEQ ID NO: 10341
  chr2:218738051-218738082
  hypo

SEQ ID NO: 42925 - DNA, 43 bp, Homo sapiens; identical to SEQ ID NO: 10342
  chr2:218757380-218757423
  hypo

SEQ ID NO: 42926 - DNA, 31 bp, Homo sapiens; identical to SEQ ID NO: 10343
  chr2:218757475-218757506
  hypo

SEQ ID NO: 42927 - DNA, 60 bp, Homo sapiens; identical to SEQ ID NO: 10344
  chr2:218757523-218757583
  hypo

SEQ ID NO: 42928 - DNA, 31 bp, Homo sapiens; identical to SEQ ID NO: 10345
  chr2:218765457-218765488
  hypo

SEQ ID NO: 42929 - DNA, 31 bp, Homo sapiens; identical to SEQ ID NO: 10346
  chr2:218765558-218765589
  hypo

SEQ ID NO: 42930 - DNA, 67 bp, Homo sapiens; identical to SEQ ID NO: 10347
  chr2:218765591-218765658
  hypo

SEQ ID NO: 42931 - DNA, 31 bp, Homo sapiens; identical to SEQ ID NO: 10348
  chr2:219016358-219016389
  hypo

SEQ ID NO: 42932 - DNA, 31 bp, Homo sapiens; identical to SEQ ID NO: 10350
  chr2:219204300-219204331
  hypo

SEQ ID NO: 42933 - DNA, 31 bp, Homo sapiens; identical to SEQ ID NO: 10351
  chr2:219205429-219205460
  hypo

SEQ ID NO: 42934 - DNA, 31 bp, Homo sapiens; identical to SEQ ID NO: 10352
  chr2:219209329-219209360
  hypo

SEQ ID NO: 42935 - DNA, 31 bp, Homo sapiens; identical to SEQ ID NO: 10353
  chr2:219209442-219209473
  hypo

SEQ ID NO: 42936 - DNA, 87 bp, Homo sapiens; identical to SEQ ID NO: 10354
  chr2:219209575-219209662
  hypo

SEQ ID NO: 42937 - DNA, 31 bp, Homo sapiens; identical to SEQ ID NO: 10355
  chr2:219209697-219209728
  hypo

SEQ ID NO: 42938 - DNA, 31 bp, Homo sapiens; identical to SEQ ID NO: 10356
  chr2:219210000-219210031
  hypo

SEQ ID NO: 42939 - DNA, 140 bp, Homo sapiens; identical to SEQ ID NO: 1299
  chr2:219264032-219264172
  hypo

SEQ ID NO: 42940 - DNA, 237 bp, Homo sapiens; identical to SEQ ID NO: 1300
  chr2:219264205-219264442
  hypo

SEQ ID NO: 42941 - DNA, 89 bp, Homo sapiens; identical to SEQ ID NO: 10360
  chr2:219294082-219294171
  hypo

SEQ ID NO: 42942 - DNA, 2 bp, Homo sapiens
  chr2:219431995-219431997
  hypo
tt

SEQ ID NO: 42943 - DNA, 31 bp, Homo sapiens; identical to SEQ ID NO: 1308
  chr2:219757765-219757796
  hypo

SEQ ID NO: 42944 - DNA, 166 bp, Homo sapiens; identical to SEQ ID NO: 35841
  chr2:219757800-219757966
  hypo

SEQ ID NO: 42945 - DNA, 31 bp, Homo sapiens; identical to SEQ ID NO: 10371
  chr2:219879556-219879587
  hypo

SEQ ID NO: 42946 - DNA, 65 bp, Homo sapiens; identical to SEQ ID NO: 10372
  chr2:219892663-219892728
  hypo

SEQ ID NO: 42947 - DNA, 31 bp, Homo sapiens; identical to SEQ ID NO: 10373
  chr2:219892810-219892841
  hypo

SEQ ID NO: 42948 - DNA, 34 bp, Homo sapiens; identical to SEQ ID NO: 10374
  chr2:219919241-219919275
  hypo

SEQ ID NO: 42949 - DNA, 37 bp, Homo sapiens; identical to SEQ ID NO: 10377
  chr2:220092639-220092676
  hypo

SEQ ID NO: 42950 - DNA, 66 bp, Homo sapiens; identical to SEQ ID NO: 10378
  chr2:220092701-220092767
  hypo

SEQ ID NO: 42951 - DNA, 57 bp, Homo sapiens; identical to SEQ ID NO: 10379
  chr2:220150959-220151016
  hypo

SEQ ID NO: 42952 - DNA, 40 bp, Homo sapiens; identical to SEQ ID NO: 10380
  chr2:220337589-220337629
  hypo

SEQ ID NO: 42953 - DNA, 31 bp, Homo sapiens; identical to SEQ ID NO: 1313
  chr2:220408153-220408184
  hypo

SEQ ID NO: 42954 - DNA, 31 bp, Homo sapiens; identical to SEQ ID NO: 1314
  chr2:220408748-220408779
  hypo

SEQ ID NO: 42955 - DNA, 58 bp, Homo sapiens; identical to SEQ ID NO: 10383
  chr2:220431757-220431815
  hypo

SEQ ID NO: 42956 - DNA, 43 bp, Homo sapiens; identical to SEQ ID NO: 1315
  chr2:220492469-220492512
  hypo

SEQ ID NO: 42957 - DNA, 31 bp, Homo sapiens; identical to SEQ ID NO: 10385
  chr2:220497988-220498019
  hypo

SEQ ID NO: 42958 - DNA, 35 bp, Homo sapiens; identical to SEQ ID NO: 10386
  chr2:220499162-220499197
  hypo

SEQ ID NO: 42959 - DNA, 35 bp, Homo sapiens; identical to SEQ ID NO: 10387
  chr2:220508876-220508911
  hypo

SEQ ID NO: 42960 - DNA, 94 bp, Homo sapiens; identical to SEQ ID NO: 1316
  chr2:222437144-222437238
  hypo

SEQ ID NO: 42961 - DNA, 41 bp, Homo sapiens; identical to SEQ ID NO: 1317
  chr2:222437313-222437354
  hypo

SEQ ID NO: 42962 - DNA, 31 bp, Homo sapiens; identical to SEQ ID NO: 10391
  chr2:223562617-223562648
  hypo

SEQ ID NO: 42963 - DNA, 72 bp, Homo sapiens; identical to SEQ ID NO: 10392
  chr2:223562662-223562734
  hypo

SEQ ID NO: 42964 - DNA, 31 bp, Homo sapiens; identical to SEQ ID NO: 10393
  chr2:223628807-223628838
  hypo

SEQ ID NO: 42965 - DNA, 2 bp, Homo sapiens
  chr2:223753472-223753474
  hypo
ag

SEQ ID NO: 42966 - DNA, 31 bp, Homo sapiens; identical to SEQ ID NO: 10396
  chr2:223753605-223753636
  hypo

SEQ ID NO: 42967 - DNA, 95 bp, Homo sapiens; identical to SEQ ID NO: 1322
  chr2:224809097-224809192
  hypo

SEQ ID NO: 42968 - DNA, 31 bp, Homo sapiens; identical to SEQ ID NO: 10398
  chr2:224900728-224900759
  hypo

SEQ ID NO: 42969 - DNA, 31 bp, Homo sapiens; identical to SEQ ID NO: 10399
  chr2:225233497-225233528
  hypo

SEQ ID NO: 42970 - DNA, 31 bp, Homo sapiens; identical to SEQ ID NO: 1323
  chr2:225381703-225381734
  hypo

SEQ ID NO: 42971 - DNA, 31 bp, Homo sapiens; identical to SEQ ID NO: 10401
  chr2:225482440-225482471
  hypo

SEQ ID NO: 42972 - DNA, 2 bp, Homo sapiens
  chr2:225906403-225906405
  hypo
gt

SEQ ID NO: 42973 - DNA, 31 bp, Homo sapiens; identical to SEQ ID NO: 10410
  chr2:226907862-226907893
  hypo

SEQ ID NO: 42974 - DNA, 37 bp, Homo sapiens; identical to SEQ ID NO: 10412
  chr2:231492422-231492459
  hypo

SEQ ID NO: 42975 - DNA, 78 bp, Homo sapiens; identical to SEQ ID NO: 10413
  chr2:231676878-231676956
  hypo

SEQ ID NO: 42976 - DNA, 31 bp, Homo sapiens; identical to SEQ ID NO: 10414
  chr2:231676976-231677007
  hypo

SEQ ID NO: 42977 - DNA, 31 bp, Homo sapiens; identical to SEQ ID NO: 10415
  chr2:231677008-231677039
  hypo

SEQ ID NO: 42978 - DNA, 31 bp, Homo sapiens; identical to SEQ ID NO: 10416
  chr2:231690698-231690729
  hypo

SEQ ID NO: 42979 - DNA, 100 bp, Homo sapiens; identical to SEQ ID NO: 1336
  chr2:231902439-231902539
  hypo

SEQ ID NO: 42980 - DNA, 31 bp, Homo sapiens; identical to SEQ ID NO: 10420
  chr2:231965580-231965611
  hypo

SEQ ID NO: 42981 - DNA, 31 bp, Homo sapiens; identical to SEQ ID NO: 10421
  chr2:232054070-232054101
  hypo

SEQ ID NO: 42982 - DNA, 31 bp, Homo sapiens; identical to SEQ ID NO: 10422
  chr2:232131874-232131905
  hypo

SEQ ID NO: 42983 - DNA, 31 bp, Homo sapiens; identical to SEQ ID NO: 10424
  chr2:232223242-232223273
  hypo

SEQ ID NO: 42984 - DNA, 78 bp, Homo sapiens; identical to SEQ ID NO: 10425
  chr2:232247494-232247572
  hypo

SEQ ID NO: 42985 - DNA, 34 bp, Homo sapiens; identical to SEQ ID NO: 10426
  chr2:232247586-232247620
  hypo

SEQ ID NO: 42986 - DNA, 31 bp, Homo sapiens; identical to SEQ ID NO: 10427
  chr2:232390143-232390174
  hypo

SEQ ID NO: 42987 - DNA, 79 bp, Homo sapiens; identical to SEQ ID NO: 10428
  chr2:232458616-232458695
  hypo

SEQ ID NO: 42988 - DNA, 31 bp, Homo sapiens; identical to SEQ ID NO: 10429
  chr2:232472539-232472570
  hypo

SEQ ID NO: 42989 - DNA, 2 bp, Homo sapiens
  chr2:232485650-232485652
  hypo
tc

SEQ ID NO: 42990 - DNA, 31 bp, Homo sapiens; identical to SEQ ID NO: 10433
  chr2:232528195-232528226
  hypo

SEQ ID NO: 42991 - DNA, 42 bp, Homo sapiens; identical to SEQ ID NO: 10434
  chr2:232557730-232557772
  hypo

SEQ ID NO: 42992 - DNA, 31 bp, Homo sapiens
  chr2:233198523-233198554
  hypo
aggctctgacccatcccgtcccgcagatggc

SEQ ID NO: 42993 - DNA, 38 bp, Homo sapiens
  chr2:233198583-233198621
  hypo
acccagcgcagttccggcactacgcgctcaatgtgccc

SEQ ID NO: 42994 - DNA, 51 bp, Homo sapiens; identical to SEQ ID NO: 10436
  chr2:233198675-233198726
  hypo

SEQ ID NO: 42995 - DNA, 31 bp, Homo sapiens; identical to SEQ ID NO: 10437
  chr2:233217697-233217728
  hypo

SEQ ID NO: 42996 - DNA, 31 bp, Homo sapiens; identical to SEQ ID NO: 10438
  chr2:233321555-233321586
  hypo

SEQ ID NO: 42997 - DNA, 46 bp, Homo sapiens; identical to SEQ ID NO: 10439
  chr2:233355392-233355438
  hypo

SEQ ID NO: 42998 - DNA, 31 bp, Homo sapiens; identical to SEQ ID NO: 10440
  chr2:233357812-233357843
  hypo

SEQ ID NO: 42999 - DNA, 31 bp, Homo sapiens; identical to SEQ ID NO: 10441
  chr2:233389941-233389972
  hypo

SEQ ID NO: 43000 - DNA, 31 bp, Homo sapiens; identical to SEQ ID NO: 10442
  chr2:233394636-233394667
  hypo

SEQ ID NO: 43001 - DNA, 31 bp, Homo sapiens; identical to SEQ ID NO: 10444
  chr2:233466816-233466847
  hypo

SEQ ID NO: 43002 - DNA, 62 bp, Homo sapiens; identical to SEQ ID NO: 10445
  chr2:233540160-233540222
  hypo

SEQ ID NO: 43003 - DNA, 61 bp, Homo sapiens; identical to SEQ ID NO: 10446
  chr2:233540249-233540310
  hypo

SEQ ID NO: 43004 - DNA, 49 bp, Homo sapiens; identical to SEQ ID NO: 10447
  chr2:233714269-233714318
  hypo

SEQ ID NO: 43005 - DNA, 61 bp, Homo sapiens; identical to SEQ ID NO: 10448
  chr2:233753187-233753248
  hypo

SEQ ID NO: 43006 - DNA, 39 bp, Homo sapiens; identical to SEQ ID NO: 10449
  chr2:233753263-233753302
  hypo

SEQ ID NO: 43007 - DNA, 31 bp, Homo sapiens; identical to SEQ ID NO: 10450
  chr2:233753322-233753353
  hypo

SEQ ID NO: 43008 - DNA, 31 bp, Homo sapiens; identical to SEQ ID NO: 10451
  chr2:233753917-233753948
  hypo

SEQ ID NO: 43009 - DNA, 57 bp, Homo sapiens; identical to SEQ ID NO: 10452
  chr2:233754009-233754066
  hypo

SEQ ID NO: 43010 - DNA, 31 bp, Homo sapiens; identical to SEQ ID NO: 10453
  chr2:233754074-233754105
  hypo

SEQ ID NO: 43011 - DNA, 31 bp, Homo sapiens; identical to SEQ ID NO: 10454
  chr2:233764978-233765009
  hypo

SEQ ID NO: 43012 - DNA, 40 bp, Homo sapiens; identical to SEQ ID NO: 10456
  chr2:233845596-233845636
  hypo

SEQ ID NO: 43013 - DNA, 31 bp, Homo sapiens; identical to SEQ ID NO: 10457
  chr2:233845647-233845678
  hypo

SEQ ID NO: 43014 - DNA, 37 bp, Homo sapiens; identical to SEQ ID NO: 10458
  chr2:233845731-233845768
  hypo

SEQ ID NO: 43015 - DNA, 31 bp, Homo sapiens; identical to SEQ ID NO: 10459
  chr2:233888472-233888503
  hypo

SEQ ID NO: 43016 - DNA, 31 bp, Homo sapiens; identical to SEQ ID NO: 10460
  chr2:233945669-233945700
  hypo

SEQ ID NO: 43017 - DNA, 31 bp, Homo sapiens; identical to SEQ ID NO: 10462
  chr2:234093874-234093905
  hypo

SEQ ID NO: 43018 - DNA, 31 bp, Homo sapiens; identical to SEQ ID NO: 10463
  chr2:234093949-234093980
  hypo

SEQ ID NO: 43019 - DNA, 60 bp, Homo sapiens; identical to SEQ ID NO: 10464
  chr2:234094000-234094060
  hypo

SEQ ID NO: 43020 - DNA, 31 bp, Homo sapiens; identical to SEQ ID NO: 10468
  chr2:234724687-234724718
  hypo

SEQ ID NO: 43021 - DNA, 2 bp, Homo sapiens
  chr2:234737330-234737332
  hypo
tg

SEQ ID NO: 43022 - DNA, 59 bp, Homo sapiens; identical to SEQ ID NO: 10470
  chr2:235005078-235005137
  hypo

SEQ ID NO: 43023 - DNA, 46 bp, Homo sapiens; identical to SEQ ID NO: 10471
  chr2:235460457-235460503
  hypo

SEQ ID NO: 43024 - DNA, 31 bp, Homo sapiens; identical to SEQ ID NO: 10472
  chr2:235517160-235517191
  hypo

SEQ ID NO: 43025 - DNA, 31 bp, Homo sapiens; identical to SEQ ID NO: 10473
  chr2:235637559-235637590
  hypo

SEQ ID NO: 43026 - DNA, 31 bp, Homo sapiens; identical to SEQ ID NO: 10474
  chr2:235809203-235809234
  hypo

SEQ ID NO: 43027 - DNA, 31 bp, Homo sapiens; identical to SEQ ID NO: 10475
  chr2:235809246-235809277
  hypo

SEQ ID NO: 43028 - DNA, 31 bp, Homo sapiens; identical to SEQ ID NO: 10476
  chr2:235815938-235815969
  hypo

SEQ ID NO: 43029 - DNA, 31 bp, Homo sapiens; identical to SEQ ID NO: 10477
  chr2:235823641-235823672
  hypo

SEQ ID NO: 43030 - DNA, 134 bp, Homo sapiens; identical to SEQ ID NO: 1343
  chr2:235860416-235860550
  hypo

SEQ ID NO: 43031 - DNA, 130 bp, Homo sapiens; identical to SEQ ID NO: 1344
  chr2:235860594-235860724
  hypo

SEQ ID NO: 43032 - DNA, 31 bp, Homo sapiens; identical to SEQ ID NO: 10480
  chr2:235868187-235868218
  hypo

SEQ ID NO: 43033 - DNA, 31 bp, Homo sapiens; identical to SEQ ID NO: 10482
  chr2:235893743-235893774
  hypo

SEQ ID NO: 43034 - DNA, 56 bp, Homo sapiens; identical to SEQ ID NO: 10483
  chr2:235894217-235894273
  hypo

SEQ ID NO: 43035 - DNA, 31 bp, Homo sapiens; identical to SEQ ID NO: 10484
  chr2:235901828-235901859
  hypo

SEQ ID NO: 43036 - DNA, 31 bp, Homo sapiens; identical to SEQ ID NO: 10485
  chr2:235903729-235903760
  hypo

SEQ ID NO: 43037 - DNA, 31 bp, Homo sapiens; identical to SEQ ID NO: 10486
  chr2:235904049-235904080
  hypo

SEQ ID NO: 43038 - DNA, 41 bp, Homo sapiens; identical to SEQ ID NO: 10487
  chr2:235922809-235922850
  hypo

SEQ ID NO: 43039 - DNA, 51 bp, Homo sapiens; identical to SEQ ID NO: 10488
  chr2:235922851-235922902
  hypo

SEQ ID NO: 43040 - DNA, 69 bp, Homo sapiens; identical to SEQ ID NO: 10489
  chr2:235922905-235922974
  hypo

SEQ ID NO: 43041 - DNA, 64 bp, Homo sapiens; identical to SEQ ID NO: 10490
  chr2:235931226-235931290
  hypo

SEQ ID NO: 43042 - DNA, 54 bp, Homo sapiens; identical to SEQ ID NO: 10491
  chr2:235941052-235941106
  hypo

SEQ ID NO: 43043 - DNA, 61 bp, Homo sapiens; identical to SEQ ID NO: 10492
  chr2:235941181-235941242
  hypo

SEQ ID NO: 43044 - DNA, 64 bp, Homo sapiens; identical to SEQ ID NO: 10493
  chr2:235941253-235941317
  hypo

SEQ ID NO: 43045 - DNA, 31 bp, Homo sapiens; identical to SEQ ID NO: 10494
  chr2:235941334-235941365
  hypo

SEQ ID NO: 43046 - DNA, 31 bp, Homo sapiens; identical to SEQ ID NO: 10495
  chr2:235950746-235950777
  hypo

SEQ ID NO: 43047 - DNA, 31 bp, Homo sapiens; identical to SEQ ID NO: 10496
  chr2:235951107-235951138
  hypo

SEQ ID NO: 43048 - DNA, 31 bp, Homo sapiens; identical to SEQ ID NO: 10497
  chr2:235951347-235951378
  hypo

SEQ ID NO: 43049 - DNA, 31 bp, Homo sapiens; identical to SEQ ID NO: 10498
  chr2:235960995-235961026
  hypo

SEQ ID NO: 43050 - DNA, 31 bp, Homo sapiens; identical to SEQ ID NO: 10499
  chr2:235970776-235970807
  hypo

SEQ ID NO: 43051 - DNA, 31 bp, Homo sapiens; identical to SEQ ID NO: 10500
  chr2:236008617-236008648
  hypo

SEQ ID NO: 43052 - DNA, 58 bp, Homo sapiens; identical to SEQ ID NO: 10501
  chr2:236015359-236015417
  hypo

SEQ ID NO: 43053 - DNA, 31 bp, Homo sapiens; identical to SEQ ID NO: 10502
  chr2:236015447-236015478
  hypo

SEQ ID NO: 43054 - DNA, 31 bp, Homo sapiens; identical to SEQ ID NO: 10503
  chr2:236015515-236015546
  hypo

SEQ ID NO: 43055 - DNA, 60 bp, Homo sapiens; identical to SEQ ID NO: 10504
  chr2:236024874-236024934
  hypo

SEQ ID NO: 43056 - DNA, 31 bp, Homo sapiens; identical to SEQ ID NO: 10505
  chr2:236024962-236024993
  hypo

SEQ ID NO: 43057 - DNA, 43 bp, Homo sapiens; identical to SEQ ID NO: 10506
  chr2:236025031-236025074
  hypo

SEQ ID NO: 43058 - DNA, 107 bp, Homo sapiens; identical to SEQ ID NO: 1347
  chr2:236402571-236402678
  hypo

SEQ ID NO: 43059 - DNA, 31 bp, Homo sapiens; identical to SEQ ID NO: 10509
  chr2:236426084-236426115
  hypo

SEQ ID NO: 43060 - DNA, 31 bp, Homo sapiens; identical to SEQ ID NO: 10510
  chr2:236456628-236456659
  hypo

SEQ ID NO: 43061 - DNA, 31 bp, Homo sapiens; identical to SEQ ID NO: 10511
  chr2:236456704-236456735
  hypo

SEQ ID NO: 43062 - DNA, 31 bp, Homo sapiens; identical to SEQ ID NO: 10512
  chr2:236459168-236459199
  hypo

SEQ ID NO: 43063 - DNA, 76 bp, Homo sapiens; identical to SEQ ID NO: 10513
  chr2:236459203-236459279
  hypo

SEQ ID NO: 43064 - DNA, 71 bp, Homo sapiens; identical to SEQ ID NO: 10514
  chr2:236459299-236459370
  hypo

SEQ ID NO: 43065 - DNA, 31 bp, Homo sapiens; identical to SEQ ID NO: 10515
  chr2:236466162-236466193
  hypo

SEQ ID NO: 43066 - DNA, 31 bp, Homo sapiens; identical to SEQ ID NO: 10516
  chr2:236467580-236467611
  hypo

SEQ ID NO: 43067 - DNA, 31 bp, Homo sapiens; identical to SEQ ID NO: 10517
  chr2:236511015-236511046
  hypo

SEQ ID NO: 43068 - DNA, 53 bp, Homo sapiens; identical to SEQ ID NO: 10518
  chr2:236541633-236541686
  hypo

SEQ ID NO: 43069 - DNA, 31 bp, Homo sapiens; identical to SEQ ID NO: 10519
  chr2:236541701-236541732
  hypo

SEQ ID NO: 43070 - DNA, 31 bp, Homo sapiens; identical to SEQ ID NO: 10520
  chr2:236541778-236541809
  hypo

SEQ ID NO: 43071 - DNA, 79 bp, Homo sapiens; identical to SEQ ID NO: 10521
  chr2:236541818-236541897
  hypo

SEQ ID NO: 43072 - DNA, 31 bp, Homo sapiens; identical to SEQ ID NO: 10523
  chr2:236544007-236544038
  hypo

SEQ ID NO: 43073 - DNA, 54 bp, Homo sapiens; identical to SEQ ID NO: 10524
  chr2:236553451-236553505
  hypo

SEQ ID NO: 43074 - DNA, 31 bp, Homo sapiens; identical to SEQ ID NO: 10527
  chr2:236571424-236571455
  hypo

SEQ ID NO: 43075 - DNA, 31 bp, Homo sapiens; identical to SEQ ID NO: 10528
  chr2:236571482-236571513
  hypo

SEQ ID NO: 43076 - DNA, 37 bp, Homo sapiens; identical to SEQ ID NO: 10529
  chr2:236571525-236571562
  hypo

SEQ ID NO: 43077 - DNA, 31 bp, Homo sapiens; identical to SEQ ID NO: 10530
  chr2:236571588-236571619
  hypo

SEQ ID NO: 43078 - DNA, 31 bp, Homo sapiens; identical to SEQ ID NO: 10531
  chr2:236602264-236602295
  hypo

SEQ ID NO: 43079 - DNA, 31 bp, Homo sapiens; identical to SEQ ID NO: 10532
  chr2:236602309-236602340
  hypo

SEQ ID NO: 43080 - DNA, 31 bp, Homo sapiens; identical to SEQ ID NO: 10533
  chr2:236603368-236603399
  hypo

SEQ ID NO: 43081 - DNA, 31 bp, Homo sapiens; identical to SEQ ID NO: 10534
  chr2:236603462-236603493
  hypo

SEQ ID NO: 43082 - DNA, 40 bp, Homo sapiens; identical to SEQ ID NO: 10535
  chr2:236603526-236603566
  hypo

SEQ ID NO: 43083 - DNA, 31 bp, Homo sapiens; identical to SEQ ID NO: 10536
  chr2:236605764-236605795
  hypo

SEQ ID NO: 43084 - DNA, 57 bp, Homo sapiens; identical to SEQ ID NO: 10538
  chr2:236613259-236613316
  hypo

SEQ ID NO: 43085 - DNA, 31 bp, Homo sapiens; identical to SEQ ID NO: 10539
  chr2:236615816-236615847
  hypo

SEQ ID NO: 43086 - DNA, 110 bp, Homo sapiens; identical to SEQ ID NO: 10540
  chr2:236616174-236616284
  hypo

SEQ ID NO: 43087 - DNA, 70 bp, Homo sapiens; identical to SEQ ID NO: 10541
  chr2:236619769-236619839
  hypo

SEQ ID NO: 43088 - DNA, 31 bp, Homo sapiens; identical to SEQ ID NO: 10542
  chr2:236619890-236619921
  hypo

SEQ ID NO: 43089 - DNA, 31 bp, Homo sapiens; identical to SEQ ID NO: 10543
  chr2:236619926-236619957
  hypo

SEQ ID NO: 43090 - DNA, 31 bp, Homo sapiens; identical to SEQ ID NO: 10544
  chr2:236621491-236621522
  hypo

SEQ ID NO: 43091 - DNA, 31 bp, Homo sapiens; identical to SEQ ID NO: 10545
  chr2:236622524-236622555
  hypo

SEQ ID NO: 43092 - DNA, 61 bp, Homo sapiens; identical to SEQ ID NO: 10546
  chr2:236624441-236624502
  hypo

SEQ ID NO: 43093 - DNA, 60 bp, Homo sapiens; identical to SEQ ID NO: 10547
  chr2:236624570-236624630
  hypo

SEQ ID NO: 43094 - DNA, 56 bp, Homo sapiens; identical to SEQ ID NO: 10548
  chr2:236637397-236637453
  hypo

SEQ ID NO: 43095 - DNA, 31 bp, Homo sapiens; identical to SEQ ID NO: 10549
  chr2:236637521-236637552
  hypo

SEQ ID NO: 43096 - DNA, 31 bp, Homo sapiens; identical to SEQ ID NO: 10550
  chr2:236637559-236637590
  hypo

SEQ ID NO: 43097 - DNA, 31 bp, Homo sapiens; identical to SEQ ID NO: 10551
  chr2:236644830-236644861
  hypo

SEQ ID NO: 43098 - DNA, 31 bp, Homo sapiens; identical to SEQ ID NO: 10552
  chr2:236646339-236646370
  hypo

SEQ ID NO: 43099 - DNA, 31 bp, Homo sapiens; identical to SEQ ID NO: 10553
  chr2:236647744-236647775
  hypo

SEQ ID NO: 43100 - DNA, 31 bp, Homo sapiens; identical to SEQ ID NO: 10554
  chr2:236647793-236647824
  hypo

SEQ ID NO: 43101 - DNA, 31 bp, Homo sapiens; identical to SEQ ID NO: 10555
  chr2:236648899-236648930
  hypo

SEQ ID NO: 43102 - DNA, 104 bp, Homo sapiens; identical to SEQ ID NO: 10556
  chr2:236648940-236649044
  hypo

SEQ ID NO: 43103 - DNA, 31 bp, Homo sapiens; identical to SEQ ID NO: 10557
  chr2:236652842-236652873
  hypo

SEQ ID NO: 43104 - DNA, 31 bp, Homo sapiens; identical to SEQ ID NO: 10558
  chr2:236660556-236660587
  hypo

SEQ ID NO: 43105 - DNA, 31 bp, Homo sapiens; identical to SEQ ID NO: 10559
  chr2:236660595-236660626
  hypo

SEQ ID NO: 43106 - DNA, 100 bp, Homo sapiens; identical to SEQ ID NO: 10560
  chr2:236660701-236660801
  hypo

SEQ ID NO: 43107 - DNA, 31 bp, Homo sapiens; identical to SEQ ID NO: 10561
  chr2:236664671-236664702
  hypo

SEQ ID NO: 43108 - DNA, 31 bp, Homo sapiens; identical to SEQ ID NO: 10563
  chr2:236669055-236669086
  hypo

SEQ ID NO: 43109 - DNA, 37 bp, Homo sapiens; identical to SEQ ID NO: 10564
  chr2:236675950-236675987
  hypo

SEQ ID NO: 43110 - DNA, 31 bp, Homo sapiens; identical to SEQ ID NO: 10565
  chr2:236680141-236680172
  hypo

SEQ ID NO: 43111 - DNA, 31 bp, Homo sapiens; identical to SEQ ID NO: 10566
  chr2:236697236-236697267
  hypo

SEQ ID NO: 43112 - DNA, 31 bp, Homo sapiens; identical to SEQ ID NO: 10567
  chr2:236717069-236717100
  hypo

SEQ ID NO: 43113 - DNA, 31 bp, Homo sapiens; identical to SEQ ID NO: 10568
  chr2:236719835-236719866
  hypo

SEQ ID NO: 43114 - DNA, 31 bp, Homo sapiens; identical to SEQ ID NO: 10569
  chr2:236721555-236721586
  hypo

SEQ ID NO: 43115 - DNA, 31 bp, Homo sapiens; identical to SEQ ID NO: 10570
  chr2:236722174-236722205
  hypo

SEQ ID NO: 43116 - DNA, 90 bp, Homo sapiens; identical to SEQ ID NO: 10571
  chr2:236722552-236722642
  hypo

SEQ ID NO: 43117 - DNA, 31 bp, Homo sapiens; identical to SEQ ID NO: 10572
  chr2:236722684-236722715
  hypo

SEQ ID NO: 43118 - DNA, 31 bp, Homo sapiens; identical to SEQ ID NO: 10573
  chr2:236723849-236723880
  hypo

SEQ ID NO: 43119 - DNA, 60 bp, Homo sapiens; identical to SEQ ID NO: 10574
  chr2:236727032-236727092
  hypo

SEQ ID NO: 43120 - DNA, 42 bp, Homo sapiens; identical to SEQ ID NO: 10576
  chr2:236733469-236733511
  hypo

SEQ ID NO: 43121 - DNA, 41 bp, Homo sapiens; identical to SEQ ID NO: 10577
  chr2:236733527-236733568
  hypo

SEQ ID NO: 43122 - DNA, 31 bp, Homo sapiens; identical to SEQ ID NO: 10578
  chr2:236738718-236738749
  hypo

SEQ ID NO: 43123 - DNA, 38 bp, Homo sapiens; identical to SEQ ID NO: 10579
  chr2:236738778-236738816
  hypo

SEQ ID NO: 43124 - DNA, 31 bp, Homo sapiens; identical to SEQ ID NO: 10580
  chr2:236738827-236738858
  hypo

SEQ ID NO: 43125 - DNA, 31 bp, Homo sapiens; identical to SEQ ID NO: 10581
  chr2:236738876-236738907
  hypo

SEQ ID NO: 43126 - DNA, 31 bp, Homo sapiens; identical to SEQ ID NO: 10582
  chr2:236739766-236739797
  hypo

SEQ ID NO: 43127 - DNA, 59 bp, Homo sapiens; identical to SEQ ID NO: 10583
  chr2:236739837-236739896
  hypo

SEQ ID NO: 43128 - DNA, 60 bp, Homo sapiens; identical to SEQ ID NO: 10584
  chr2:236739899-236739959
  hypo

SEQ ID NO: 43129 - DNA, 31 bp, Homo sapiens; identical to SEQ ID NO: 10585
  chr2:236741688-236741719
  hypo

SEQ ID NO: 43130 - DNA, 31 bp, Homo sapiens; identical to SEQ ID NO: 10586
  chr2:236741722-236741753
  hypo

SEQ ID NO: 43131 - DNA, 31 bp, Homo sapiens; identical to SEQ ID NO: 10587
  chr2:236741760-236741791
  hypo

SEQ ID NO: 43132 - DNA, 31 bp, Homo sapiens; identical to SEQ ID NO: 10588
  chr2:236741800-236741831
  hypo

SEQ ID NO: 43133 - DNA, 45 bp, Homo sapiens; identical to SEQ ID NO: 10589
  chr2:236741832-236741877
  hypo

SEQ ID NO: 43134 - DNA, 31 bp, Homo sapiens; identical to SEQ ID NO: 10590
  chr2:236743374-236743405
  hypo

SEQ ID NO: 43135 - DNA, 31 bp, Homo sapiens; identical to SEQ ID NO: 10591
  chr2:236749799-236749830
  hypo

SEQ ID NO: 43136 - DNA, 31 bp, Homo sapiens; identical to SEQ ID NO: 10592
  chr2:236750707-236750738
  hypo

SEQ ID NO: 43137 - DNA, 45 bp, Homo sapiens; identical to SEQ ID NO: 10593
  chr2:236750758-236750803
  hypo

SEQ ID NO: 43138 - DNA, 31 bp, Homo sapiens; identical to SEQ ID NO: 10594
  chr2:236750806-236750837
  hypo

SEQ ID NO: 43139 - DNA, 31 bp, Homo sapiens; identical to SEQ ID NO: 10595
  chr2:236750862-236750893
  hypo

SEQ ID NO: 43140 - DNA, 31 bp, Homo sapiens; identical to SEQ ID NO: 10596
  chr2:236750906-236750937
  hypo

SEQ ID NO: 43141 - DNA, 38 bp, Homo sapiens; identical to SEQ ID NO: 10597
  chr2:236751636-236751674
  hypo

SEQ ID NO: 43142 - DNA, 37 bp, Homo sapiens; identical to SEQ ID NO: 10598
  chr2:236751878-236751915
  hypo

SEQ ID NO: 43143 - DNA, 31 bp, Homo sapiens; identical to SEQ ID NO: 10599
  chr2:236751968-236751999
  hypo

SEQ ID NO: 43144 - DNA, 31 bp, Homo sapiens; identical to SEQ ID NO: 10600
  chr2:236752042-236752073
  hypo

SEQ ID NO: 43145 - DNA, 31 bp, Homo sapiens; identical to SEQ ID NO: 10601
  chr2:236759875-236759906
  hypo

SEQ ID NO: 43146 - DNA, 31 bp, Homo sapiens; identical to SEQ ID NO: 10602
  chr2:236760073-236760104
  hypo

SEQ ID NO: 43147 - DNA, 37 bp, Homo sapiens; identical to SEQ ID NO: 10603
  chr2:236760945-236760982
  hypo

SEQ ID NO: 43148 - DNA, 31 bp, Homo sapiens; identical to SEQ ID NO: 10604
  chr2:236765491-236765522
  hypo

SEQ ID NO: 43149 - DNA, 31 bp, Homo sapiens; identical to SEQ ID NO: 10605
  chr2:236765665-236765696
  hypo

SEQ ID NO: 43150 - DNA, 31 bp, Homo sapiens; identical to SEQ ID NO: 10608
  chr2:236786675-236786706
  hypo

SEQ ID NO: 43151 - DNA, 31 bp, Homo sapiens; identical to SEQ ID NO: 10609
  chr2:236791005-236791036
  hypo

SEQ ID NO: 43152 - DNA, 31 bp, Homo sapiens; identical to SEQ ID NO: 10610
  chr2:236796531-236796562
  hypo

SEQ ID NO: 43153 - DNA, 135 bp, Homo sapiens; identical to SEQ ID NO: 10611
  chr2:236796563-236796698
  hypo

SEQ ID NO: 43154 - DNA, 31 bp, Homo sapiens; identical to SEQ ID NO: 10612
  chr2:236801620-236801651
  hypo

SEQ ID NO: 43155 - DNA, 85 bp, Homo sapiens; identical to SEQ ID NO: 10613
  chr2:236801866-236801951
  hypo

SEQ ID NO: 43156 - DNA, 40 bp, Homo sapiens; identical to SEQ ID NO: 10614
  chr2:236802172-236802212
  hypo

SEQ ID NO: 43157 - DNA, 57 bp, Homo sapiens; identical to SEQ ID NO: 10615
  chr2:236839043-236839100
  hypo

SEQ ID NO: 43158 - DNA, 73 bp, Homo sapiens; identical to SEQ ID NO: 10616
  chr2:236839122-236839195
  hypo

SEQ ID NO: 43159 - DNA, 75 bp, Homo sapiens; identical to SEQ ID NO: 10617
  chr2:236839206-236839281
  hypo

SEQ ID NO: 43160 - DNA, 31 bp, Homo sapiens; identical to SEQ ID NO: 10618
  chr2:236839283-236839314
  hypo

SEQ ID NO: 43161 - DNA, 110 bp, Homo sapiens; identical to SEQ ID NO: 10619
  chr2:236839457-236839567
  hypo

SEQ ID NO: 43162 - DNA, 31 bp, Homo sapiens; identical to SEQ ID NO: 10620
  chr2:236839572-236839603
  hypo

SEQ ID NO: 43163 - DNA, 38 bp, Homo sapiens; identical to SEQ ID NO: 10621
  chr2:236840459-236840497
  hypo

SEQ ID NO: 43164 - DNA, 31 bp, Homo sapiens; identical to SEQ ID NO: 10622
  chr2:236841397-236841428
  hypo

SEQ ID NO: 43165 - DNA, 36 bp, Homo sapiens; identical to SEQ ID NO: 10623
  chr2:236842448-236842484
  hypo

SEQ ID NO: 43166 - DNA, 63 bp, Homo sapiens; identical to SEQ ID NO: 10624
  chr2:236847370-236847433
  hypo

SEQ ID NO: 43167 - DNA, 54 bp, Homo sapiens; identical to SEQ ID NO: 10625
  chr2:236847440-236847494
  hypo

SEQ ID NO: 43168 - DNA, 31 bp, Homo sapiens; identical to SEQ ID NO: 10626
  chr2:236848202-236848233
  hypo

SEQ ID NO: 43169 - DNA, 36 bp, Homo sapiens; identical to SEQ ID NO: 10627
  chr2:236853750-236853786
  hypo

SEQ ID NO: 43170 - DNA, 36 bp, Homo sapiens; identical to SEQ ID NO: 10628
  chr2:236854025-236854061
  hypo

SEQ ID NO: 43171 - DNA, 43 bp, Homo sapiens; identical to SEQ ID NO: 10629
  chr2:236857147-236857190
  hypo

SEQ ID NO: 43172 - DNA, 31 bp, Homo sapiens; identical to SEQ ID NO: 10630
  chr2:236857203-236857234
  hypo

SEQ ID NO: 43173 - DNA, 31 bp, Homo sapiens; identical to SEQ ID NO: 10631
  chr2:236857275-236857306
  hypo

SEQ ID NO: 43174 - DNA, 31 bp, Homo sapiens; identical to SEQ ID NO: 10632
  chr2:236857325-236857356
  hypo

SEQ ID NO: 43175 - DNA, 41 bp, Homo sapiens; identical to SEQ ID NO: 10633
  chr2:236863815-236863856
  hypo

SEQ ID NO: 43176 - DNA, 31 bp, Homo sapiens; identical to SEQ ID NO: 10634
  chr2:236868107-236868138
  hypo

SEQ ID NO: 43177 - DNA, 31 bp, Homo sapiens; identical to SEQ ID NO: 10635
  chr2:236868300-236868331
  hypo

SEQ ID NO: 43178 - DNA, 31 bp, Homo sapiens; identical to SEQ ID NO: 10636
  chr2:236868991-236869022
  hypo

SEQ ID NO: 43179 - DNA, 31 bp, Homo sapiens; identical to SEQ ID NO: 10637
  chr2:236870132-236870163
  hypo

SEQ ID NO: 43180 - DNA, 31 bp, Homo sapiens; identical to SEQ ID NO: 10638
  chr2:236870216-236870247
  hypo

SEQ ID NO: 43181 - DNA, 50 bp, Homo sapiens; identical to SEQ ID NO: 10640
  chr2:236872389-236872439
  hypo

SEQ ID NO: 43182 - DNA, 72 bp, Homo sapiens; identical to SEQ ID NO: 10641
  chr2:236872482-236872554
  hypo

SEQ ID NO: 43183 - DNA, 31 bp, Homo sapiens; identical to SEQ ID NO: 10642
  chr2:236872556-236872587
  hypo

SEQ ID NO: 43184 - DNA, 31 bp, Homo sapiens; identical to SEQ ID NO: 10643
  chr2:236881385-236881416
  hypo

SEQ ID NO: 43185 - DNA, 31 bp, Homo sapiens; identical to SEQ ID NO: 10644
  chr2:236881423-236881454
  hypo

SEQ ID NO: 43186 - DNA, 31 bp, Homo sapiens; identical to SEQ ID NO: 10645
  chr2:236881464-236881495
  hypo

SEQ ID NO: 43187 - DNA, 97 bp, Homo sapiens; identical to SEQ ID NO: 10646
  chr2:236900736-236900833
  hypo

SEQ ID NO: 43188 - DNA, 76 bp, Homo sapiens; identical to SEQ ID NO: 10647
  chr2:236901339-236901415
  hypo

SEQ ID NO: 43189 - DNA, 44 bp, Homo sapiens; identical to SEQ ID NO: 10648
  chr2:236901512-236901556
  hypo

SEQ ID NO: 43190 - DNA, 31 bp, Homo sapiens; identical to SEQ ID NO: 10649
  chr2:236908516-236908547
  hypo

SEQ ID NO: 43191 - DNA, 31 bp, Homo sapiens; identical to SEQ ID NO: 10650
  chr2:236909410-236909441
  hypo

SEQ ID NO: 43192 - DNA, 54 bp, Homo sapiens; identical to SEQ ID NO: 10651
  chr2:236909528-236909582
  hypo

SEQ ID NO: 43193 - DNA, 31 bp, Homo sapiens; identical to SEQ ID NO: 10652
  chr2:236912262-236912293
  hypo

SEQ ID NO: 43194 - DNA, 31 bp, Homo sapiens; identical to SEQ ID NO: 10653
  chr2:236919372-236919403
  hypo

SEQ ID NO: 43195 - DNA, 51 bp, Homo sapiens; identical to SEQ ID NO: 10654
  chr2:236945109-236945160
  hypo

SEQ ID NO: 43196 - DNA, 40 bp, Homo sapiens; identical to SEQ ID NO: 10656
  chr2:236950836-236950876
  hypo

SEQ ID NO: 43197 - DNA, 31 bp, Homo sapiens; identical to SEQ ID NO: 10657
  chr2:236950896-236950927
  hypo

SEQ ID NO: 43198 - DNA, 55 bp, Homo sapiens; identical to SEQ ID NO: 10658
  chr2:236950958-236951013
  hypo

SEQ ID NO: 43199 - DNA, 31 bp, Homo sapiens; identical to SEQ ID NO: 10659
  chr2:236951333-236951364
  hypo

SEQ ID NO: 43200 - DNA, 31 bp, Homo sapiens; identical to SEQ ID NO: 10660
  chr2:236970388-236970419
  hypo

SEQ ID NO: 43201 - DNA, 69 bp, Homo sapiens; identical to SEQ ID NO: 10661
  chr2:236970590-236970659
  hypo

SEQ ID NO: 43202 - DNA, 57 bp, Homo sapiens; identical to SEQ ID NO: 10662
  chr2:236976365-236976422
  hypo

SEQ ID NO: 43203 - DNA, 31 bp, Homo sapiens; identical to SEQ ID NO: 10664
  chr2:236989877-236989908
  hypo

SEQ ID NO: 43204 - DNA, 31 bp, Homo sapiens; identical to SEQ ID NO: 10665
  chr2:236991808-236991839
  hypo

SEQ ID NO: 43205 - DNA, 52 bp, Homo sapiens; identical to SEQ ID NO: 10666
  chr2:236994422-236994474
  hypo

SEQ ID NO: 43206 - DNA, 40 bp, Homo sapiens; identical to SEQ ID NO: 10667
  chr2:236994530-236994570
  hypo

SEQ ID NO: 43207 - DNA, 31 bp, Homo sapiens; identical to SEQ ID NO: 10668
  chr2:236994580-236994611
  hypo

SEQ ID NO: 43208 - DNA, 44 bp, Homo sapiens; identical to SEQ ID NO: 10669
  chr2:236996174-236996218
  hypo

SEQ ID NO: 43209 - DNA, 31 bp, Homo sapiens; identical to SEQ ID NO: 10670
  chr2:236996243-236996274
  hypo

SEQ ID NO: 43210 - DNA, 31 bp, Homo sapiens; identical to SEQ ID NO: 10671
  chr2:236996298-236996329
  hypo

SEQ ID NO: 43211 - DNA, 56 bp, Homo sapiens; identical to SEQ ID NO: 10672
  chr2:236999645-236999701
  hypo

SEQ ID NO: 43212 - DNA, 31 bp, Homo sapiens; identical to SEQ ID NO: 10673
  chr2:236999705-236999736
  hypo

SEQ ID NO: 43213 - DNA, 40 bp, Homo sapiens; identical to SEQ ID NO: 10674
  chr2:237007807-237007847
  hypo

SEQ ID NO: 43214 - DNA, 31 bp, Homo sapiens; identical to SEQ ID NO: 10675
  chr2:237010462-237010493
  hypo

SEQ ID NO: 43215 - DNA, 31 bp, Homo sapiens; identical to SEQ ID NO: 10678
  chr2:237015288-237015319
  hypo

SEQ ID NO: 43216 - DNA, 40 bp, Homo sapiens; identical to SEQ ID NO: 10679
  chr2:237015346-237015386
  hypo

SEQ ID NO: 43217 - DNA, 31 bp, Homo sapiens; identical to SEQ ID NO: 10680
  chr2:237015391-237015422
  hypo

SEQ ID NO: 43218 - DNA, 68 bp, Homo sapiens; identical to SEQ ID NO: 10681
  chr2:237018157-237018225
  hypo

SEQ ID NO: 43219 - DNA, 31 bp, Homo sapiens; identical to SEQ ID NO: 10682
  chr2:237020449-237020480
  hypo

SEQ ID NO: 43220 - DNA, 46 bp, Homo sapiens; identical to SEQ ID NO: 10683
  chr2:237020563-237020609
  hypo

SEQ ID NO: 43221 - DNA, 56 bp, Homo sapiens; identical to SEQ ID NO: 10684
  chr2:237022762-237022818
  hypo

SEQ ID NO: 43222 - DNA, 31 bp, Homo sapiens; identical to SEQ ID NO: 10685
  chr2:237022820-237022851
  hypo

SEQ ID NO: 43223 - DNA, 65 bp, Homo sapiens; identical to SEQ ID NO: 10686
  chr2:237022973-237023038
  hypo

SEQ ID NO: 43224 - DNA, 31 bp, Homo sapiens; identical to SEQ ID NO: 10687
  chr2:237032440-237032471
  hypo

SEQ ID NO: 43225 - DNA, 64 bp, Homo sapiens; identical to SEQ ID NO: 10688
  chr2:237032541-237032605
  hypo

SEQ ID NO: 43226 - DNA, 35 bp, Homo sapiens; identical to SEQ ID NO: 10689
  chr2:237032664-237032699
  hypo

SEQ ID NO: 43227 - DNA, 31 bp, Homo sapiens; identical to SEQ ID NO: 10690
  chr2:237032711-237032742
  hypo

SEQ ID NO: 43228 - DNA, 34 bp, Homo sapiens; identical to SEQ ID NO: 10691
  chr2:237032835-237032869
  hypo

SEQ ID NO: 43229 - DNA, 62 bp, Homo sapiens; identical to SEQ ID NO: 10692
  chr2:237033006-237033068
  hypo

SEQ ID NO: 43230 - DNA, 55 bp, Homo sapiens; identical to SEQ ID NO: 10693
  chr2:237034240-237034295
  hypo

SEQ ID NO: 43231 - DNA, 59 bp, Homo sapiens; identical to SEQ ID NO: 10694
  chr2:237037748-237037807
  hypo

SEQ ID NO: 43232 - DNA, 45 bp, Homo sapiens; identical to SEQ ID NO: 10695
  chr2:237037865-237037910
  hypo

SEQ ID NO: 43233 - DNA, 31 bp, Homo sapiens; identical to SEQ ID NO: 10696
  chr2:237225643-237225674
  hypo

SEQ ID NO: 43234 - DNA, 31 bp, Homo sapiens; identical to SEQ ID NO: 10697
  chr2:237482705-237482736
  hypo

SEQ ID NO: 43235 - DNA, 31 bp, Homo sapiens; identical to SEQ ID NO: 10698
  chr2:237686475-237686506
  hypo

SEQ ID NO: 43236 - DNA, 31 bp, Homo sapiens; identical to SEQ ID NO: 10700
  chr2:238268758-238268789
  hypo

SEQ ID NO: 43237 - DNA, 43 bp, Homo sapiens; identical to SEQ ID NO: 10701
  chr2:238359553-238359596
  hypo

SEQ ID NO: 43238 - DNA, 50 bp, Homo sapiens; identical to SEQ ID NO: 1358
  chr2:238384222-238384272
  hypo

SEQ ID NO: 43239 - DNA, 43 bp, Homo sapiens; identical to SEQ ID NO: 10703
  chr2:238492722-238492765
  hypo

SEQ ID NO: 43240 - DNA, 31 bp, Homo sapiens; identical to SEQ ID NO: 10704
  chr2:238492774-238492805
  hypo

SEQ ID NO: 43241 - DNA, 51 bp, Homo sapiens; identical to SEQ ID NO: 10705
  chr2:238540446-238540497
  hypo

SEQ ID NO: 43242 - DNA, 31 bp, Homo sapiens; identical to SEQ ID NO: 10706
  chr2:238540523-238540554
  hypo

SEQ ID NO: 43243 - DNA, 31 bp, Homo sapiens; identical to SEQ ID NO: 10707
  chr2:238540587-238540618
  hypo

SEQ ID NO: 43244 - DNA, 31 bp, Homo sapiens; identical to SEQ ID NO: 10708
  chr2:238550619-238550650
  hypo

SEQ ID NO: 43245 - DNA, 31 bp, Homo sapiens; identical to SEQ ID NO: 10709
  chr2:238552317-238552348
  hypo

SEQ ID NO: 43246 - DNA, 31 bp, Homo sapiens; identical to SEQ ID NO: 10710
  chr2:238553952-238553983
  hypo

SEQ ID NO: 43247 - DNA, 31 bp, Homo sapiens; identical to SEQ ID NO: 10711
  chr2:238590665-238590696
  hypo

SEQ ID NO: 43248 - DNA, 41 bp, Homo sapiens; identical to SEQ ID NO: 10712
  chr2:238785778-238785819
  hypo

SEQ ID NO: 43249 - DNA, 49 bp, Homo sapiens; identical to SEQ ID NO: 10713
  chr2:238786044-238786093
  hypo

SEQ ID NO: 43250 - DNA, 61 bp, Homo sapiens; identical to SEQ ID NO: 10714
  chr2:238786094-238786155
  hypo

SEQ ID NO: 43251 - DNA, 59 bp, Homo sapiens; identical to SEQ ID NO: 10715
  chr2:238786162-238786221
  hypo

SEQ ID NO: 43252 - DNA, 31 bp, Homo sapiens; identical to SEQ ID NO: 10716
  chr2:238786475-238786506
  hypo

SEQ ID NO: 43253 - DNA, 31 bp, Homo sapiens; identical to SEQ ID NO: 1359
  chr2:238791402-238791433
  hypo

SEQ ID NO: 43254 - DNA, 34 bp, Homo sapiens; identical to SEQ ID NO: 10718
  chr2:238793663-238793697
  hypo

SEQ ID NO: 43255 - DNA, 31 bp, Homo sapiens; identical to SEQ ID NO: 10719
  chr2:238819638-238819669
  hypo

SEQ ID NO: 43256 - DNA, 31 bp, Homo sapiens; identical to SEQ ID NO: 10720
  chr2:238820427-238820458
  hypo

SEQ ID NO: 43257 - DNA, 52 bp, Homo sapiens; identical to SEQ ID NO: 10721
  chr2:238822392-238822444
  hypo

SEQ ID NO: 43258 - DNA, 52 bp, Homo sapiens; identical to SEQ ID NO: 1360
  chr2:238876149-238876201
  hypo

SEQ ID NO: 43259 - DNA, 46 bp, Homo sapiens; identical to SEQ ID NO: 10724
  chr2:239006884-239006930
  hypo

SEQ ID NO: 43260 - DNA, 31 bp, Homo sapiens; identical to SEQ ID NO: 10725
  chr2:239010178-239010209
  hypo

SEQ ID NO: 43261 - DNA, 75 bp, Homo sapiens; identical to SEQ ID NO: 10726
  chr2:239010263-239010338
  hypo

SEQ ID NO: 43262 - DNA, 31 bp, Homo sapiens; identical to SEQ ID NO: 10727
  chr2:239010426-239010457
  hypo

SEQ ID NO: 43263 - DNA, 31 bp, Homo sapiens; identical to SEQ ID NO: 10728
  chr2:239011436-239011467
  hypo

SEQ ID NO: 43264 - DNA, 31 bp, Homo sapiens; identical to SEQ ID NO: 10729
  chr2:239011477-239011508
  hypo

SEQ ID NO: 43265 - DNA, 31 bp, Homo sapiens; identical to SEQ ID NO: 10730
  chr2:239012748-239012779
  hypo

SEQ ID NO: 43266 - DNA, 31 bp, Homo sapiens; identical to SEQ ID NO: 10731
  chr2:239030394-239030425
  hypo

SEQ ID NO: 43267 - DNA, 31 bp, Homo sapiens; identical to SEQ ID NO: 10732
  chr2:239033394-239033425
  hypo

SEQ ID NO: 43268 - DNA, 74 bp, Homo sapiens; identical to SEQ ID NO: 10733
  chr2:239039047-239039121
  hypo

SEQ ID NO: 43269 - DNA, 31 bp, Homo sapiens; identical to SEQ ID NO: 10734
  chr2:239041689-239041720
  hypo

SEQ ID NO: 43270 - DNA, 53 bp, Homo sapiens; identical to SEQ ID NO: 10735
  chr2:239041750-239041803
  hypo

SEQ ID NO: 43271 - DNA, 41 bp, Homo sapiens; identical to SEQ ID NO: 10736
  chr2:239041818-239041859
  hypo

SEQ ID NO: 43272 - DNA, 31 bp, Homo sapiens; identical to SEQ ID NO: 10737
  chr2:239057679-239057710
  hypo

SEQ ID NO: 43273 - DNA, 31 bp, Homo sapiens; identical to SEQ ID NO: 10738
  chr2:239065003-239065034
  hypo

SEQ ID NO: 43274 - DNA, 31 bp, Homo sapiens; identical to SEQ ID NO: 10739
  chr2:239065063-239065094
  hypo

SEQ ID NO: 43275 - DNA, 67 bp, Homo sapiens; identical to SEQ ID NO: 10740
  chr2:239065111-239065178
  hypo

SEQ ID NO: 43276 - DNA, 91 bp, Homo sapiens; identical to SEQ ID NO: 10741
  chr2:239091202-239091293
  hypo

SEQ ID NO: 43277 - DNA, 31 bp, Homo sapiens; identical to SEQ ID NO: 10742
  chr2:239091311-239091342
  hypo

SEQ ID NO: 43278 - DNA, 79 bp, Homo sapiens; identical to SEQ ID NO: 1361
  chr2:239148239-239148318
  hypo

SEQ ID NO: 43279 - DNA, 31 bp, Homo sapiens; identical to SEQ ID NO: 1362
  chr2:239148419-239148450
  hypo

SEQ ID NO: 43280 - DNA, 40 bp, Homo sapiens; identical to SEQ ID NO: 1363
  chr2:239148489-239148529
  hypo

SEQ ID NO: 43281 - DNA, 193 bp, Homo sapiens; identical to SEQ ID NO: 1364
  chr2:239148533-239148726
  hypo

SEQ ID NO: 43282 - DNA, 252 bp, Homo sapiens; identical to SEQ ID NO: 1365
  chr2:239148736-239148988
  hypo

SEQ ID NO: 43283 - DNA, 56 bp, Homo sapiens; identical to SEQ ID NO: 10748
  chr2:239211885-239211941
  hypo

SEQ ID NO: 43284 - DNA, 31 bp, Homo sapiens; identical to SEQ ID NO: 10749
  chr2:239212967-239212998
  hypo

SEQ ID NO: 43285 - DNA, 31 bp, Homo sapiens; identical to SEQ ID NO: 10750
  chr2:239213023-239213054
  hypo

SEQ ID NO: 43286 - DNA, 52 bp, Homo sapiens; identical to SEQ ID NO: 10751
  chr2:239213082-239213134
  hypo

SEQ ID NO: 43287 - DNA, 31 bp, Homo sapiens; identical to SEQ ID NO: 10752
  chr2:239213143-239213174
  hypo

SEQ ID NO: 43288 - DNA, 31 bp, Homo sapiens; identical to SEQ ID NO: 10753
  chr2:239224074-239224105
  hypo

SEQ ID NO: 43289 - DNA, 31 bp, Homo sapiens; identical to SEQ ID NO: 10754
  chr2:239224149-239224180
  hypo

SEQ ID NO: 43290 - DNA, 31 bp, Homo sapiens; identical to SEQ ID NO: 10755
  chr2:239224208-239224239
  hypo

SEQ ID NO: 43291 - DNA, 31 bp, Homo sapiens; identical to SEQ ID NO: 10758
  chr2:239265850-239265881
  hypo

SEQ ID NO: 43292 - DNA, 57 bp, Homo sapiens; identical to SEQ ID NO: 10759
  chr2:239467686-239467743
  hypo

SEQ ID NO: 43293 - DNA, 31 bp, Homo sapiens; identical to SEQ ID NO: 10760
  chr2:239475086-239475117
  hypo

SEQ ID NO: 43294 - DNA, 31 bp, Homo sapiens; identical to SEQ ID NO: 10761
  chr2:239709447-239709478
  hypo

SEQ ID NO: 43295 - DNA, 31 bp, Homo sapiens; identical to SEQ ID NO: 10762
  chr2:239780653-239780684
  hypo

SEQ ID NO: 43296 - DNA, 31 bp, Homo sapiens; identical to SEQ ID NO: 10763
  chr2:239834260-239834291
  hypo

SEQ ID NO: 43297 - DNA, 57 bp, Homo sapiens; identical to SEQ ID NO: 10765
  chr2:239958979-239959036
  hypo

SEQ ID NO: 43298 - DNA, 31 bp, Homo sapiens; identical to SEQ ID NO: 10766
  chr2:239970200-239970231
  hypo

SEQ ID NO: 43299 - DNA, 65 bp, Homo sapiens; identical to SEQ ID NO: 10767
  chr2:239971538-239971603
  hypo

SEQ ID NO: 43300 - DNA, 84 bp, Homo sapiens; identical to SEQ ID NO: 10769
  chr2:240032301-240032385
  hypo

SEQ ID NO: 43301 - DNA, 31 bp, Homo sapiens; identical to SEQ ID NO: 10770
  chr2:240032386-240032417
  hypo

SEQ ID NO: 43302 - DNA, 31 bp, Homo sapiens; identical to SEQ ID NO: 10771
  chr2:240032427-240032458
  hypo

SEQ ID NO: 43303 - DNA, 36 bp, Homo sapiens; identical to SEQ ID NO: 10774
  chr2:240080573-240080609
  hypo

SEQ ID NO: 43304 - DNA, 2 bp, Homo sapiens
  chr2:240103577-240103579
  hypo
ca

SEQ ID NO: 43305 - DNA, 38 bp, Homo sapiens; identical to SEQ ID NO: 10777
  chr2:240107030-240107068
  hypo

SEQ ID NO: 43306 - DNA, 31 bp, Homo sapiens; identical to SEQ ID NO: 10778
  chr2:240107072-240107103
  hypo

SEQ ID NO: 43307 - DNA, 31 bp, Homo sapiens; identical to SEQ ID NO: 10779
  chr2:240107133-240107164
  hypo

SEQ ID NO: 43308 - DNA, 31 bp, Homo sapiens; identical to SEQ ID NO: 10780
  chr2:240107173-240107204
  hypo

SEQ ID NO: 43309 - DNA, 37 bp, Homo sapiens; identical to SEQ ID NO: 10781
  chr2:240165273-240165310
  hypo

SEQ ID NO: 43310 - DNA, 31 bp, Homo sapiens; identical to SEQ ID NO: 10782
  chr2:240167439-240167470
  hypo

SEQ ID NO: 43311 - DNA, 41 bp, Homo sapiens; identical to SEQ ID NO: 10783
  chr2:240167686-240167727
  hypo

SEQ ID NO: 43312 - DNA, 31 bp, Homo sapiens; identical to SEQ ID NO: 10784
  chr2:240167776-240167807
  hypo

SEQ ID NO: 43313 - DNA, 64 bp, Homo sapiens; identical to SEQ ID NO: 10785
  chr2:240167813-240167877
  hypo

SEQ ID NO: 43314 - DNA, 51 bp, Homo sapiens; identical to SEQ ID NO: 10787
  chr2:240212377-240212428
  hypo

SEQ ID NO: 43315 - DNA, 31 bp, Homo sapiens; identical to SEQ ID NO: 10788
  chr2:240247259-240247290
  hypo

SEQ ID NO: 43316 - DNA, 22 bp, Homo sapiens
  chr2:240270344-240270366
  hypo
tctgtgtcctgacaaacgcatc

SEQ ID NO: 43317 - DNA, 19 bp, Homo sapiens
  chr2:240270511-240270530
  hypo
aaatcgttctttagagcaa

SEQ ID NO: 43318 - DNA, 72 bp, Homo sapiens; identical to SEQ ID NO: 10792
  chr2:240270735-240270807
  hypo

SEQ ID NO: 43319 - DNA, 31 bp, Homo sapiens; identical to SEQ ID NO: 10793
  chr2:240271611-240271642
  hypo

SEQ ID NO: 43320 - DNA, 31 bp, Homo sapiens; identical to SEQ ID NO: 1368
  chr2:240294440-240294471
  hypo

SEQ ID NO: 43321 - DNA, 52 bp, Homo sapiens; identical to SEQ ID NO: 10795
  chr2:240361082-240361134
  hypo

SEQ ID NO: 43322 - DNA, 55 bp, Homo sapiens; identical to SEQ ID NO: 10796
  chr2:240361148-240361203
  hypo

SEQ ID NO: 43323 - DNA, 31 bp, Homo sapiens; identical to SEQ ID NO: 10797
  chr2:240484932-240484963
  hypo

SEQ ID NO: 43324 - DNA, 31 bp, Homo sapiens; identical to SEQ ID NO: 10798
  chr2:240506414-240506445
  hypo

SEQ ID NO: 43325 - DNA, 31 bp, Homo sapiens; identical to SEQ ID NO: 10799
  chr2:240618672-240618703
  hypo

SEQ ID NO: 43326 - DNA, 31 bp, Homo sapiens; identical to SEQ ID NO: 10800
  chr2:240618752-240618783
  hypo

SEQ ID NO: 43327 - DNA, 58 bp, Homo sapiens; identical to SEQ ID NO: 10801
  chr2:240666722-240666780
  hypo

SEQ ID NO: 43328 - DNA, 31 bp, Homo sapiens; identical to SEQ ID NO: 10802
  chr2:240668882-240668913
  hypo

SEQ ID NO: 43329 - DNA, 31 bp, Homo sapiens; identical to SEQ ID NO: 10803
  chr2:240670557-240670588
  hypo

SEQ ID NO: 43330 - DNA, 31 bp, Homo sapiens; identical to SEQ ID NO: 10804
  chr2:240747275-240747306
  hypo

SEQ ID NO: 43331 - DNA, 45 bp, Homo sapiens; identical to SEQ ID NO: 10805
  chr2:240747334-240747379
  hypo

SEQ ID NO: 43332 - DNA, 31 bp, Homo sapiens; identical to SEQ ID NO: 10806
  chr2:240747395-240747426
  hypo

SEQ ID NO: 43333 - DNA, 31 bp, Homo sapiens; identical to SEQ ID NO: 10807
  chr2:240747432-240747463
  hypo

SEQ ID NO: 43334 - DNA, 59 bp, Homo sapiens; identical to SEQ ID NO: 10808
  chr2:240927100-240927159
  hypo

SEQ ID NO: 43335 - DNA, 31 bp, Homo sapiens; identical to SEQ ID NO: 10809
  chr2:240928849-240928880
  hypo

SEQ ID NO: 43336 - DNA, 31 bp, Homo sapiens; identical to SEQ ID NO: 10810
  chr2:240930792-240930823
  hypo

SEQ ID NO: 43337 - DNA, 31 bp, Homo sapiens; identical to SEQ ID NO: 10811
  chr2:240943998-240944029
  hypo

SEQ ID NO: 43338 - DNA, 31 bp, Homo sapiens; identical to SEQ ID NO: 10812
  chr2:240965862-240965893
  hypo

SEQ ID NO: 43339 - DNA, 35 bp, Homo sapiens; identical to SEQ ID NO: 10813
  chr2:240965899-240965934
  hypo

SEQ ID NO: 43340 - DNA, 10 bp, Homo sapiens
  chr2:240965953-240965963
  hypo
ctttttgtca

SEQ ID NO: 43341 - DNA, 10 bp, Homo sapiens
  chr2:240965992-240966002
  hypo
gagggtctgg

SEQ ID NO: 43342 - DNA, 31 bp, Homo sapiens; identical to SEQ ID NO: 10815
  chr2:241100736-241100767
  hypo

SEQ ID NO: 43343 - DNA, 31 bp, Homo sapiens; identical to SEQ ID NO: 10816
  chr2:241154321-241154352
  hypo

SEQ ID NO: 43344 - DNA, 2 bp, Homo sapiens
  chr2:241157269-241157271
  hypo
aa

SEQ ID NO: 43345 - DNA, 8 bp, Homo sapiens
  chr2:241157300-241157308
  hypo
gctgtagt

SEQ ID NO: 43346 - DNA, 35 bp, Homo sapiens; identical to SEQ ID NO: 10818
  chr2:241197208-241197243
  hypo

SEQ ID NO: 43347 - DNA, 31 bp, Homo sapiens; identical to SEQ ID NO: 10819
  chr2:241328245-241328276
  hypo

SEQ ID NO: 43348 - DNA, 31 bp, Homo sapiens; identical to SEQ ID NO: 10820
  chr2:241328280-241328311
  hypo

SEQ ID NO: 43349 - DNA, 51 bp, Homo sapiens; identical to SEQ ID NO: 10821
  chr2:241328351-241328402
  hypo

SEQ ID NO: 43350 - DNA, 31 bp, Homo sapiens; identical to SEQ ID NO: 10822
  chr2:241328409-241328440
  hypo

SEQ ID NO: 43351 - DNA, 37 bp, Homo sapiens; identical to SEQ ID NO: 1370
  chr2:241374578-241374615
  hypo

SEQ ID NO: 43352 - DNA, 68 bp, Homo sapiens; identical to SEQ ID NO: 1371
  chr2:241375297-241375365
  hypo

SEQ ID NO: 43353 - DNA, 223 bp, Homo sapiens; identical to SEQ ID NO: 1372
  chr2:241375406-241375629
  hypo

SEQ ID NO: 43354 - DNA, 44 bp, Homo sapiens; identical to SEQ ID NO: 10826
  chr2:241378933-241378977
  hypo

SEQ ID NO: 43355 - DNA, 31 bp, Homo sapiens; identical to SEQ ID NO: 10827
  chr2:241384030-241384061
  hypo

SEQ ID NO: 43356 - DNA, 31 bp, Homo sapiens; identical to SEQ ID NO: 10828
  chr2:241385468-241385499
  hypo

SEQ ID NO: 43357 - DNA, 31 bp, Homo sapiens; identical to SEQ ID NO: 10829
  chr2:241388730-241388761
  hypo

SEQ ID NO: 43358 - DNA, 31 bp, Homo sapiens; identical to SEQ ID NO: 10833
  chr2:241542463-241542494
  hypo

SEQ ID NO: 43359 - DNA, 68 bp, Homo sapiens; identical to SEQ ID NO: 10834
  chr2:241542501-241542569
  hypo

SEQ ID NO: 43360 - DNA, 31 bp, Homo sapiens; identical to SEQ ID NO: 10835
  chr2:241542578-241542609
  hypo

SEQ ID NO: 43361 - DNA, 31 bp, Homo sapiens; identical to SEQ ID NO: 10837
  chr2:241628004-241628035
  hypo

SEQ ID NO: 43362 - DNA, 116 bp, Homo sapiens; identical to SEQ ID NO: 10838
  chr2:241631409-241631525
  hypo

SEQ ID NO: 43363 - DNA, 41 bp, Homo sapiens; identical to SEQ ID NO: 10839
  chr2:241655277-241655318
  hypo

SEQ ID NO: 43364 - DNA, 31 bp, Homo sapiens; identical to SEQ ID NO: 10840
  chr2:241656740-241656771
  hypo

SEQ ID NO: 43365 - DNA, 31 bp, Homo sapiens; identical to SEQ ID NO: 10841
  chr2:241717833-241717864
  hypo

SEQ ID NO: 43366 - DNA, 31 bp, Homo sapiens; identical to SEQ ID NO: 10842
  chr2:241718184-241718215
  hypo

SEQ ID NO: 43367 - DNA, 31 bp, Homo sapiens; identical to SEQ ID NO: 10843
  chr2:241724228-241724259
  hypo

SEQ ID NO: 43368 - DNA, 41 bp, Homo sapiens; identical to SEQ ID NO: 10844
  chr2:241750152-241750193
  hypo

SEQ ID NO: 43369 - DNA, 31 bp, Homo sapiens; identical to SEQ ID NO: 10845
  chr2:241817567-241817598
  hypo

SEQ ID NO: 43370 - DNA, 31 bp, Homo sapiens; identical to SEQ ID NO: 10846
  chr2:241830264-241830295
  hypo

SEQ ID NO: 43371 - DNA, 31 bp, Homo sapiens; identical to SEQ ID NO: 10847
  chr2:241838794-241838825
  hypo

SEQ ID NO: 43372 - DNA, 31 bp, Homo sapiens; identical to SEQ ID NO: 10848
  chr2:241858347-241858378
  hypo

SEQ ID NO: 43373 - DNA, 80 bp, Homo sapiens; identical to SEQ ID NO: 10850
  chr2:241872168-241872248
  hypo

SEQ ID NO: 43374 - DNA, 31 bp, Homo sapiens; identical to SEQ ID NO: 10851
  chr2:241896340-241896371
  hypo

SEQ ID NO: 43375 - DNA, 62 bp, Homo sapiens; identical to SEQ ID NO: 10852
  chr2:241896389-241896451
  hypo

SEQ ID NO: 43376 - DNA, 31 bp, Homo sapiens; identical to SEQ ID NO: 10853
  chr2:241896470-241896501
  hypo

SEQ ID NO: 43377 - DNA, 31 bp, Homo sapiens; identical to SEQ ID NO: 10854
  chr2:241903090-241903121
  hypo

SEQ ID NO: 43378 - DNA, 31 bp, Homo sapiens; identical to SEQ ID NO: 10855
  chr2:241908035-241908066
  hypo

SEQ ID NO: 43379 - DNA, 31 bp, Homo sapiens; identical to SEQ ID NO: 10856
  chr2:241937929-241937960
  hypo

SEQ ID NO: 43380 - DNA, 43 bp, Homo sapiens; identical to SEQ ID NO: 10857
  chr2:241989266-241989309
  hypo

SEQ ID NO: 43381 - DNA, 75 bp, Homo sapiens; identical to SEQ ID NO: 10858
  chr2:241989350-241989425
  hypo

SEQ ID NO: 43382 - DNA, 46 bp, Homo sapiens; identical to SEQ ID NO: 10859
  chr2:241989428-241989474
  hypo

SEQ ID NO: 43383 - DNA, 56 bp, Homo sapiens; identical to SEQ ID NO: 10861
  chr2:242011136-242011192
  hypo

SEQ ID NO: 43384 - DNA, 31 bp, Homo sapiens; identical to SEQ ID NO: 10862
  chr2:242072560-242072591
  hypo

SEQ ID NO: 43385 - DNA, 31 bp, Homo sapiens; identical to SEQ ID NO: 10863
  chr2:242074733-242074764
  hypo

SEQ ID NO: 43386 - DNA, 46 bp, Homo sapiens; identical to SEQ ID NO: 10864
  chr2:242130372-242130418
  hypo

SEQ ID NO: 43387 - DNA, 53 bp, Homo sapiens; identical to SEQ ID NO: 10865
  chr2:242142972-242143025
  hypo

SEQ ID NO: 43388 - DNA, 51 bp, Homo sapiens; identical to SEQ ID NO: 10866
  chr2:242277266-242277317
  hypo

SEQ ID NO: 43389 - DNA, 2 bp, Homo sapiens
  chr2:242436355-242436357
  hypo
ct

SEQ ID NO: 43390 - DNA, 31 bp, Homo sapiens; identical to SEQ ID NO: 10868
  chr2:242436602-242436633
  hypo

SEQ ID NO: 43391 - DNA, 2 bp, Homo sapiens
  chr2:242554548-242554550
  hypo
cc

SEQ ID NO: 43392 - DNA, 47 bp, Homo sapiens; identical to SEQ ID NO: 10871
  chr2:242602196-242602243
  hypo

SEQ ID NO: 43393 - DNA, 2 bp, Homo sapiens
  chr2:242602249-242602251
  hypo
aa

SEQ ID NO: 43394 - DNA, 31 bp, Homo sapiens; identical to SEQ ID NO: 10874
  chr2:242617340-242617371
  hypo

SEQ ID NO: 43395 - DNA, 31 bp, Homo sapiens; identical to SEQ ID NO: 10876
  chr2:242710640-242710671
  hypo

SEQ ID NO: 43396 - DNA, 110 bp, Homo sapiens
  chr2:242713946-242714056
  hypo
acccctgcccctgccccgaggtggccctgggcttgcccgcccgcctgcagtgtcggctgaagagggtaacgtgcgtgcgccccggctgctcccggctgctcccggctgct

SEQ ID NO: 43397 - DNA, 71 bp, Homo sapiens
  chr2:242714085-242714156
  hypo
ctccccggctgctccccggctgctccccgctgctcccggctgctctcggctgctcccggctgctccccagc

SEQ ID NO: 43398 - DNA, 31 bp, Homo sapiens; identical to SEQ ID NO: 10878
  chr2:242735880-242735911
  hypo

SEQ ID NO: 43399 - DNA, 31 bp, Homo sapiens; identical to SEQ ID NO: 10879
  chr2:242738173-242738204
  hypo

SEQ ID NO: 43400 - DNA, 31 bp, Homo sapiens; identical to SEQ ID NO: 10880
  chr2:242753192-242753223
  hypo

SEQ ID NO: 43401 - DNA, 31 bp, Homo sapiens; identical to SEQ ID NO: 10887
  chr2:242835073-242835104
  hypo

SEQ ID NO: 43402 - DNA, 31 bp, Homo sapiens; identical to SEQ ID NO: 10890
  chr2:242925458-242925489
  hypo

SEQ ID NO: 43403 - DNA, 2 bp, Homo sapiens
  chr2:242925495-242925497
  hypo
at

SEQ ID NO: 43404 - DNA, 2 bp, Homo sapiens
  chr3:3167654-3167656
  hypo
cc

SEQ ID NO: 43405 - DNA, 2 bp, Homo sapiens
  chr3:3167987-3167989
  hypo
tc

SEQ ID NO: 43406 - DNA, 31 bp, Homo sapiens; identical to SEQ ID NO: 10895
  chr3:4748815-4748846
  hypo

SEQ ID NO: 43407 - DNA, 31 bp, Homo sapiens; identical to SEQ ID NO: 10896
  chr3:4756207-4756238
  hypo

SEQ ID NO: 43408 - DNA, 63 bp, Homo sapiens; identical to SEQ ID NO: 10897
  chr3:4840916-4840979
  hypo

SEQ ID NO: 43409 - DNA, 31 bp, Homo sapiens; identical to SEQ ID NO: 1381
  chr3:5020396-5020427
  hypo

SEQ ID NO: 43410 - DNA, 31 bp, Homo sapiens; identical to SEQ ID NO: 10899
  chr3:5030719-5030750
  hypo

SEQ ID NO: 43411 - DNA, 37 bp, Homo sapiens; identical to SEQ ID NO: 10900
  chr3:5030810-5030847
  hypo

SEQ ID NO: 43412 - DNA, 36 bp, Homo sapiens; identical to SEQ ID NO: 10901
  chr3:5030860-5030896
  hypo

SEQ ID NO: 43413 - DNA, 31 bp, Homo sapiens; identical to SEQ ID NO: 10902
  chr3:5066590-5066621
  hypo

SEQ ID NO: 43414 - DNA, 31 bp, Homo sapiens; identical to SEQ ID NO: 10903
  chr3:5126484-5126515
  hypo

SEQ ID NO: 43415 - DNA, 71 bp, Homo sapiens; identical to SEQ ID NO: 10904
  chr3:5252797-5252868
  hypo

SEQ ID NO: 43416 - DNA, 31 bp, Homo sapiens; identical to SEQ ID NO: 10905
  chr3:5252941-5252972
  hypo

SEQ ID NO: 43417 - DNA, 31 bp, Homo sapiens; identical to SEQ ID NO: 10906
  chr3:8505218-8505249
  hypo

SEQ ID NO: 43418 - DNA, 31 bp, Homo sapiens; identical to SEQ ID NO: 1382
  chr3:8543387-8543418
  hypo

SEQ ID NO: 43419 - DNA, 31 bp, Homo sapiens; identical to SEQ ID NO: 10908
  chr3:8595737-8595768
  hypo

SEQ ID NO: 43420 - DNA, 31 bp, Homo sapiens; identical to SEQ ID NO: 10911
  chr3:8595905-8595936
  hypo

SEQ ID NO: 43421 - DNA, 46 bp, Homo sapiens; identical to SEQ ID NO: 10913
  chr3:8669370-8669416
  hypo

SEQ ID NO: 43422 - DNA, 31 bp, Homo sapiens; identical to SEQ ID NO: 10914
  chr3:8787621-8787652
  hypo

SEQ ID NO: 43423 - DNA, 31 bp, Homo sapiens; identical to SEQ ID NO: 10915
  chr3:9006146-9006177
  hypo

SEQ ID NO: 43424 - DNA, 31 bp, Homo sapiens; identical to SEQ ID NO: 10916
  chr3:9173887-9173918
  hypo

SEQ ID NO: 43425 - DNA, 31 bp, Homo sapiens; identical to SEQ ID NO: 10917
  chr3:9173947-9173978
  hypo

SEQ ID NO: 43426 - DNA, 31 bp, Homo sapiens; identical to SEQ ID NO: 10918
  chr3:9173989-9174020
  hypo

SEQ ID NO: 43427 - DNA, 47 bp, Homo sapiens; identical to SEQ ID NO: 10919
  chr3:9174054-9174101
  hypo

SEQ ID NO: 43428 - DNA, 31 bp, Homo sapiens; identical to SEQ ID NO: 10920
  chr3:9204928-9204959
  hypo

SEQ ID NO: 43429 - DNA, 31 bp, Homo sapiens; identical to SEQ ID NO: 10921
  chr3:9553507-9553538
  hypo

SEQ ID NO: 43430 - DNA, 60 bp, Homo sapiens; identical to SEQ ID NO: 10922
  chr3:9553596-9553656
  hypo

SEQ ID NO: 43431 - DNA, 40 bp, Homo sapiens; identical to SEQ ID NO: 10923
  chr3:9793442-9793482
  hypo

SEQ ID NO: 43432 - DNA, 31 bp, Homo sapiens; identical to SEQ ID NO: 1388
  chr3:9851988-9852019
  hypo

SEQ ID NO: 43433 - DNA, 31 bp, Homo sapiens; identical to SEQ ID NO: 10925
  chr3:9905282-9905313
  hypo

SEQ ID NO: 43434 - DNA, 66 bp, Homo sapiens; identical to SEQ ID NO: 10926
  chr3:9905322-9905388
  hypo

SEQ ID NO: 43435 - DNA, 31 bp, Homo sapiens; identical to SEQ ID NO: 10927
  chr3:9905392-9905423
  hypo

SEQ ID NO: 43436 - DNA, 31 bp, Homo sapiens; identical to SEQ ID NO: 10928
  chr3:9905442-9905473
  hypo

SEQ ID NO: 43437 - DNA, 31 bp, Homo sapiens; identical to SEQ ID NO: 10929
  chr3:9926968-9926999
  hypo

SEQ ID NO: 43438 - DNA, 2 bp, Homo sapiens
  chr3:9941468-9941470
  hypo
aa

SEQ ID NO: 43439 - DNA, 31 bp, Homo sapiens; identical to SEQ ID NO: 10931
  chr3:9947647-9947678
  hypo

SEQ ID NO: 43440 - DNA, 31 bp, Homo sapiens; identical to SEQ ID NO: 10932
  chr3:9948632-9948663
  hypo

SEQ ID NO: 43441 - DNA, 31 bp, Homo sapiens; identical to SEQ ID NO: 10933
  chr3:9963223-9963254
  hypo

SEQ ID NO: 43442 - DNA, 31 bp, Homo sapiens; identical to SEQ ID NO: 10934
  chr3:9965746-9965777
  hypo

SEQ ID NO: 43443 - DNA, 31 bp, Homo sapiens; identical to SEQ ID NO: 10935
  chr3:9989483-9989514
  hypo

SEQ ID NO: 43444 - DNA, 31 bp, Homo sapiens; identical to SEQ ID NO: 10936
  chr3:9991407-9991438
  hypo

SEQ ID NO: 43445 - DNA, 3 bp, Homo sapiens
  chr3:10182837-10182840
  hypo
ttt

SEQ ID NO: 43446 - DNA, 31 bp, Homo sapiens; identical to SEQ ID NO: 10942
  chr3:11050501-11050532
  hypo

SEQ ID NO: 43447 - DNA, 53 bp, Homo sapiens; identical to SEQ ID NO: 10943
  chr3:11210230-11210283
  hypo

SEQ ID NO: 43448 - DNA, 31 bp, Homo sapiens; identical to SEQ ID NO: 1395
  chr3:11258023-11258054
  hypo

SEQ ID NO: 43449 - DNA, 43 bp, Homo sapiens; identical to SEQ ID NO: 10945
  chr3:11300931-11300974
  hypo

SEQ ID NO: 43450 - DNA, 2 bp, Homo sapiens
  chr3:11581321-11581323
  hypo
tc

SEQ ID NO: 43451 - DNA, 5 bp, Homo sapiens
  chr3:11581416-11581421
  hypo
gtgta

SEQ ID NO: 43452 - DNA, 31 bp, Homo sapiens; identical to SEQ ID NO: 10947
  chr3:11688146-11688177
  hypo

SEQ ID NO: 43453 - DNA, 31 bp, Homo sapiens; identical to SEQ ID NO: 10948
  chr3:11712550-11712581
  hypo

SEQ ID NO: 43454 - DNA, 31 bp, Homo sapiens; identical to SEQ ID NO: 10949
  chr3:12186613-12186644
  hypo

SEQ ID NO: 43455 - DNA, 31 bp, Homo sapiens; identical to SEQ ID NO: 10950
  chr3:12204373-12204404
  hypo

SEQ ID NO: 43456 - DNA, 31 bp, Homo sapiens; identical to SEQ ID NO: 10952
  chr3:12223765-12223796
  hypo

SEQ ID NO: 43457 - DNA, 30 bp, Homo sapiens; identical to SEQ ID NO: 10953
  chr3:12503124-12503154
  hypo

SEQ ID NO: 43458 - DNA, 2 bp, Homo sapiens
  chr3:12586226-12586228
  hypo
tt

SEQ ID NO: 43459 - DNA, 31 bp, Homo sapiens; identical to SEQ ID NO: 10955
  chr3:12734231-12734262
  hypo

SEQ ID NO: 43460 - DNA, 31 bp, Homo sapiens; identical to SEQ ID NO: 10956
  chr3:12788072-12788103
  hypo

SEQ ID NO: 43461 - DNA, 31 bp, Homo sapiens; identical to SEQ ID NO: 10957
  chr3:12820765-12820796
  hypo

SEQ ID NO: 43462 - DNA, 31 bp, Homo sapiens; identical to SEQ ID NO: 10958
  chr3:12821388-12821419
  hypo

SEQ ID NO: 43463 - DNA, 17 bp, Homo sapiens
  chr3:12867101-12867118
  hypo
ccaggagacaaagatcc

SEQ ID NO: 43464 - DNA, 2 bp, Homo sapiens
  chr3:12977044-12977046
  hypo
ag

SEQ ID NO: 43465 - DNA, 26 bp, Homo sapiens
  chr3:12977144-12977170
  hypo
gtcattgtcaccgtctgagtagtccg

SEQ ID NO: 43466 - DNA, 31 bp, Homo sapiens; identical to SEQ ID NO: 10964
  chr3:12984704-12984735
  hypo

SEQ ID NO: 43467 - DNA, 31 bp, Homo sapiens; identical to SEQ ID NO: 10965
  chr3:12984823-12984854
  hypo

SEQ ID NO: 43468 - DNA, 31 bp, Homo sapiens; identical to SEQ ID NO: 1398
  chr3:13008871-13008902
  hypo

SEQ ID NO: 43469 - DNA, 31 bp, Homo sapiens; identical to SEQ ID NO: 10967
  chr3:13028805-13028836
  hypo

SEQ ID NO: 43470 - DNA, 22 bp, Homo sapiens
  chr3:13028839-13028861
  hypo
ggtagggaaaagaacacggttc

SEQ ID NO: 43471 - DNA, 31 bp, Homo sapiens; identical to SEQ ID NO: 10969
  chr3:13028898-13028929
  hypo

SEQ ID NO: 43472 - DNA, 31 bp, Homo sapiens; identical to SEQ ID NO: 10970
  chr3:13028944-13028975
  hypo

SEQ ID NO: 43473 - DNA, 47 bp, Homo sapiens
  chr3:13083940-13083987
  hypo
accggctgcttcggcccgccctggtccctgccacggcggcccccact

SEQ ID NO: 43474 - DNA, 95 bp, Homo sapiens; identical to SEQ ID NO: 10973
  chr3:13205533-13205628
  hypo

SEQ ID NO: 43475 - DNA, 31 bp, Homo sapiens; identical to SEQ ID NO: 10974
  chr3:13363860-13363891
  hypo

SEQ ID NO: 43476 - DNA, 53 bp, Homo sapiens; identical to SEQ ID NO: 10975
  chr3:13501984-13502037
  hypo

SEQ ID NO: 43477 - DNA, 31 bp, Homo sapiens; identical to SEQ ID NO: 10977
  chr3:13669959-13669990
  hypo

SEQ ID NO: 43478 - DNA, 38 bp, Homo sapiens; identical to SEQ ID NO: 10978
  chr3:13669993-13670031
  hypo

SEQ ID NO: 43479 - DNA, 31 bp, Homo sapiens; identical to SEQ ID NO: 10979
  chr3:13670102-13670133
  hypo

SEQ ID NO: 43480 - DNA, 31 bp, Homo sapiens; identical to SEQ ID NO: 10980
  chr3:13670135-13670166
  hypo

SEQ ID NO: 43481 - DNA, 59 bp, Homo sapiens; identical to SEQ ID NO: 10981
  chr3:14174652-14174711
  hypo

SEQ ID NO: 43482 - DNA, 31 bp, Homo sapiens; identical to SEQ ID NO: 10982
  chr3:14174748-14174779
  hypo

SEQ ID NO: 43483 - DNA, 31 bp, Homo sapiens; identical to SEQ ID NO: 10983
  chr3:14174798-14174829
  hypo

SEQ ID NO: 43484 - DNA, 31 bp, Homo sapiens; identical to SEQ ID NO: 10985
  chr3:14291205-14291236
  hypo

SEQ ID NO: 43485 - DNA, 31 bp, Homo sapiens; identical to SEQ ID NO: 10986
  chr3:14383871-14383902
  hypo

SEQ ID NO: 43486 - DNA, 55 bp, Homo sapiens; identical to SEQ ID NO: 10987
  chr3:14383961-14384016
  hypo

SEQ ID NO: 43487 - DNA, 31 bp, Homo sapiens; identical to SEQ ID NO: 10988
  chr3:14384851-14384882
  hypo

SEQ ID NO: 43488 - DNA, 42 bp, Homo sapiens; identical to SEQ ID NO: 10989
  chr3:14385075-14385117
  hypo

SEQ ID NO: 43489 - DNA, 37 bp, Homo sapiens; identical to SEQ ID NO: 10990
  chr3:14508071-14508108
  hypo

SEQ ID NO: 43490 - DNA, 62 bp, Homo sapiens; identical to SEQ ID NO: 10991
  chr3:14564197-14564259
  hypo

SEQ ID NO: 43491 - DNA, 31 bp, Homo sapiens; identical to SEQ ID NO: 10992
  chr3:14564298-14564329
  hypo

SEQ ID NO: 43492 - DNA, 31 bp, Homo sapiens; identical to SEQ ID NO: 10993
  chr3:14575093-14575124
  hypo

SEQ ID NO: 43493 - DNA, 31 bp, Homo sapiens; identical to SEQ ID NO: 10995
  chr3:15317991-15318022
  hypo

SEQ ID NO: 43494 - DNA, 31 bp, Homo sapiens; identical to SEQ ID NO: 1409
  chr3:16555435-16555466
  hypo

SEQ ID NO: 43495 - DNA, 31 bp, Homo sapiens; identical to SEQ ID NO: 1410
  chr3:16555487-16555518
  hypo

SEQ ID NO: 43496 - DNA, 2 bp, Homo sapiens
  chr3:16925655-16925657
  hypo
at

SEQ ID NO: 43497 - DNA, 231 bp, Homo sapiens; identical to SEQ ID NO: 35918
  chr3:16925705-16925936
  hypo

SEQ ID NO: 43498 - DNA, 144 bp, Homo sapiens; identical to SEQ ID NO: 1412
  chr3:16925998-16926142
  hypo

SEQ ID NO: 43499 - DNA, 61 bp, Homo sapiens; identical to SEQ ID NO: 1413
  chr3:16926801-16926862
  hypo

SEQ ID NO: 43500 - DNA, 31 bp, Homo sapiens; identical to SEQ ID NO: 1414
  chr3:17571374-17571405
  hypo

SEQ ID NO: 43501 - DNA, 53 bp, Homo sapiens; identical to SEQ ID NO: 11009
  chr3:18452750-18452803
  hypo

SEQ ID NO: 43502 - DNA, 31 bp, Homo sapiens; identical to SEQ ID NO: 11010
  chr3:18452809-18452840
  hypo

SEQ ID NO: 43503 - DNA, 31 bp, Homo sapiens; identical to SEQ ID NO: 11011
  chr3:18452872-18452903
  hypo

SEQ ID NO: 43504 - DNA, 37 bp, Homo sapiens; identical to SEQ ID NO: 11013
  chr3:20120130-20120167
  hypo

SEQ ID NO: 43505 - DNA, 31 bp, Homo sapiens; identical to SEQ ID NO: 11014
  chr3:20171684-20171715
  hypo

SEQ ID NO: 43506 - DNA, 65 bp, Homo sapiens; identical to SEQ ID NO: 1416
  chr3:23986745-23986810
  hypo

SEQ ID NO: 43507 - DNA, 31 bp, Homo sapiens; identical to SEQ ID NO: 11017
  chr3:24436869-24436900
  hypo

SEQ ID NO: 43508 - DNA, 31 bp, Homo sapiens; identical to SEQ ID NO: 11018
  chr3:24436903-24436934
  hypo

SEQ ID NO: 43509 - DNA, 72 bp, Homo sapiens; identical to SEQ ID NO: 11019
  chr3:24436993-24437065
  hypo

SEQ ID NO: 43510 - DNA, 59 bp, Homo sapiens; identical to SEQ ID NO: 1417
  chr3:24536767-24536826
  hypo

SEQ ID NO: 43511 - DNA, 31 bp, Homo sapiens; identical to SEQ ID NO: 1418
  chr3:24536986-24537017
  hypo

SEQ ID NO: 43512 - DNA, 54 bp, Homo sapiens; identical to SEQ ID NO: 1419
  chr3:24563200-24563254
  hypo

SEQ ID NO: 43513 - DNA, 31 bp, Homo sapiens; identical to SEQ ID NO: 11024
  chr3:27514260-27514291
  hypo

SEQ ID NO: 43514 - DNA, 31 bp, Homo sapiens; identical to SEQ ID NO: 11025
  chr3:27519020-27519051
  hypo

SEQ ID NO: 43515 - DNA, 38 bp, Homo sapiens; identical to SEQ ID NO: 11026
  chr3:27587340-27587378
  hypo

SEQ ID NO: 43516 - DNA, 37 bp, Homo sapiens; identical to SEQ ID NO: 11027
  chr3:30574869-30574906
  hypo

SEQ ID NO: 43517 - DNA, 31 bp, Homo sapiens; identical to SEQ ID NO: 11028
  chr3:31398337-31398368
  hypo

SEQ ID NO: 43518 - DNA, 2 bp, Homo sapiens
  chr3:32151265-32151267
  hypo
ca

SEQ ID NO: 43519 - DNA, 31 bp, Homo sapiens; identical to SEQ ID NO: 11032
  chr3:32300385-32300416
  hypo

SEQ ID NO: 43520 - DNA, 31 bp, Homo sapiens; identical to SEQ ID NO: 11033
  chr3:32412106-32412137
  hypo

SEQ ID NO: 43521 - DNA, 2 bp, Homo sapiens
  chr3:32433864-32433866
  hypo
gg

SEQ ID NO: 43522 - DNA, 35 bp, Homo sapiens; identical to SEQ ID NO: 1421
  chr3:32612741-32612776
  hypo

SEQ ID NO: 43523 - DNA, 31 bp, Homo sapiens; identical to SEQ ID NO: 11036
  chr3:32886061-32886092
  hypo

SEQ ID NO: 43524 - DNA, 31 bp, Homo sapiens; identical to SEQ ID NO: 11037
  chr3:32891114-32891145
  hypo

SEQ ID NO: 43525 - DNA, 31 bp, Homo sapiens; identical to SEQ ID NO: 11042
  chr3:36778834-36778865
  hypo

SEQ ID NO: 43526 - DNA, 31 bp, Homo sapiens; identical to SEQ ID NO: 1426
  chr3:37034213-37034244
  hypo

SEQ ID NO: 43527 - DNA, 232 bp, Homo sapiens; identical to SEQ ID NO: 1427
  chr3:37034290-37034522
  hypo

SEQ ID NO: 43528 - DNA, 35 bp, Homo sapiens; identical to SEQ ID NO: 11045
  chr3:37214388-37214423
  hypo

SEQ ID NO: 43529 - DNA, 62 bp, Homo sapiens; identical to SEQ ID NO: 11046
  chr3:37774453-37774515
  hypo

SEQ ID NO: 43530 - DNA, 67 bp, Homo sapiens; identical to SEQ ID NO: 11048
  chr3:38017264-38017331
  hypo

SEQ ID NO: 43531 - DNA, 31 bp, Homo sapiens; identical to SEQ ID NO: 11049
  chr3:38017396-38017427
  hypo

SEQ ID NO: 43532 - DNA, 30 bp, Homo sapiens; identical to SEQ ID NO: 1436
  chr3:38495144-38495174
  hypo

SEQ ID NO: 43533 - DNA, 52 bp, Homo sapiens; identical to SEQ ID NO: 1437
  chr3:38495213-38495265
  hypo

SEQ ID NO: 43534 - DNA, 102 bp, Homo sapiens; identical to SEQ ID NO: 1438
  chr3:38495678-38495780
  hypo

SEQ ID NO: 43535 - DNA, 150 bp, Homo sapiens; identical to SEQ ID NO: 1439
  chr3:38496020-38496170
  hypo

SEQ ID NO: 43536 - DNA, 71 bp, Homo sapiens; identical to SEQ ID NO: 1442
  chr3:38496417-38496488
  hypo

SEQ ID NO: 43537 - DNA, 356 bp, Homo sapiens; identical to SEQ ID NO: 1443
  chr3:38496526-38496882
  hypo

SEQ ID NO: 43538 - DNA, 82 bp, Homo sapiens; identical to SEQ ID NO: 1444
  chr3:38496886-38496968
  hypo

SEQ ID NO: 43539 - DNA, 31 bp, Homo sapiens; identical to SEQ ID NO: 1445
  chr3:38497012-38497043
  hypo

SEQ ID NO: 43540 - DNA, 116 bp, Homo sapiens; identical to SEQ ID NO: 1446
  chr3:38497048-38497164
  hypo

SEQ ID NO: 43541 - DNA, 31 bp, Homo sapiens; identical to SEQ ID NO: 11060
  chr3:38645195-38645226
  hypo

SEQ ID NO: 43542 - DNA, 43 bp, Homo sapiens; identical to SEQ ID NO: 1448
  chr3:39148466-39148509
  hypo

SEQ ID NO: 43543 - DNA, 31 bp, Homo sapiens; identical to SEQ ID NO: 11062
  chr3:39229445-39229476
  hypo

SEQ ID NO: 43544 - DNA, 46 bp, Homo sapiens; identical to SEQ ID NO: 11063
  chr3:40172134-40172180
  hypo

SEQ ID NO: 43545 - DNA, 31 bp, Homo sapiens; identical to SEQ ID NO: 11064
  chr3:40231757-40231788
  hypo

SEQ ID NO: 43546 - DNA, 31 bp, Homo sapiens; identical to SEQ ID NO: 11065
  chr3:40231795-40231826
  hypo

SEQ ID NO: 43547 - DNA, 31 bp, Homo sapiens; identical to SEQ ID NO: 11066
  chr3:40374173-40374204
  hypo

SEQ ID NO: 43548 - DNA, 31 bp, Homo sapiens; identical to SEQ ID NO: 11067
  chr3:40374247-40374278
  hypo

SEQ ID NO: 43549 - DNA, 72 bp, Homo sapiens; identical to SEQ ID NO: 11068
  chr3:41119484-41119556
  hypo

SEQ ID NO: 43550 - DNA, 59 bp, Homo sapiens; identical to SEQ ID NO: 11069
  chr3:41119570-41119629
  hypo

SEQ ID NO: 43551 - DNA, 31 bp, Homo sapiens; identical to SEQ ID NO: 11070
  chr3:41119644-41119675
  hypo

SEQ ID NO: 43552 - DNA, 2 bp, Homo sapiens
  chr3:41289146-41289148
  hypo
gc

SEQ ID NO: 43553 - DNA, 31 bp, Homo sapiens; identical to SEQ ID NO: 11072
  chr3:41289200-41289231
  hypo

SEQ ID NO: 43554 - DNA, 37 bp, Homo sapiens; identical to SEQ ID NO: 11073
  chr3:41289257-41289294
  hypo

SEQ ID NO: 43555 - DNA, 31 bp, Homo sapiens; identical to SEQ ID NO: 11074
  chr3:41289318-41289349
  hypo

SEQ ID NO: 43556 - DNA, 31 bp, Homo sapiens; identical to SEQ ID NO: 11075
  chr3:42159858-42159889
  hypo

SEQ ID NO: 43557 - DNA, 53 bp, Homo sapiens; identical to SEQ ID NO: 11077
  chr3:42222605-42222658
  hypo

SEQ ID NO: 43558 - DNA, 2 bp, Homo sapiens
  chr3:42222718-42222720
  hypo
tt

SEQ ID NO: 43559 - DNA, 1 bp, Homo sapiens
  chr3:42222759-42222760
  hypo
g

SEQ ID NO: 43560 - DNA, 63 bp, Homo sapiens; identical to SEQ ID NO: 11079
  chr3:42249919-42249982
  hypo

SEQ ID NO: 43561 - DNA, 38 bp, Homo sapiens; identical to SEQ ID NO: 11080
  chr3:42569052-42569090
  hypo

SEQ ID NO: 43562 - DNA, 31 bp, Homo sapiens; identical to SEQ ID NO: 1452
  chr3:42696340-42696371
  hypo

SEQ ID NO: 43563 - DNA, 41 bp, Homo sapiens; identical to SEQ ID NO: 1453
  chr3:42696420-42696461
  hypo

SEQ ID NO: 43564 - DNA, 43 bp, Homo sapiens; identical to SEQ ID NO: 11089
  chr3:42906565-42906608
  hypo

SEQ ID NO: 43565 - DNA, 45 bp, Homo sapiens; identical to SEQ ID NO: 11090
  chr3:43074999-43075044
  hypo

SEQ ID NO: 43566 - DNA, 40 bp, Homo sapiens; identical to SEQ ID NO: 1460
  chr3:43147124-43147164
  hypo

SEQ ID NO: 43567 - DNA, 104 bp, Homo sapiens; identical to SEQ ID NO: 1461
  chr3:43147168-43147272
  hypo

SEQ ID NO: 43568 - DNA, 119 bp, Homo sapiens; identical to SEQ ID NO: 35964
  chr3:43147607-43147726
  hypo

SEQ ID NO: 43569 - DNA, 43 bp, Homo sapiens; identical to SEQ ID NO: 1466
  chr3:43663333-43663376
  hypo

SEQ ID NO: 43570 - DNA, 57 bp, Homo sapiens; identical to SEQ ID NO: 1467
  chr3:43663491-43663548
  hypo

SEQ ID NO: 43571 - DNA, 31 bp, Homo sapiens; identical to SEQ ID NO: 11098
  chr3:44295784-44295815
  hypo

SEQ ID NO: 43572 - DNA, 31 bp, Homo sapiens; identical to SEQ ID NO: 1469
  chr3:44379883-44379914
  hypo

SEQ ID NO: 43573 - DNA, 42 bp, Homo sapiens; identical to SEQ ID NO: 1470
  chr3:44518641-44518683
  hypo

SEQ ID NO: 43574 - DNA, 33 bp, Homo sapiens; identical to SEQ ID NO: 11101
  chr3:44902782-44902815
  hypo

SEQ ID NO: 43575 - DNA, 2 bp, Homo sapiens
  chr3:44999994-44999996
  hypo
aa

SEQ ID NO: 43576 - DNA, 31 bp, Homo sapiens; identical to SEQ ID NO: 11103
  chr3:45000079-45000110
  hypo

SEQ ID NO: 43577 - DNA, 57 bp, Homo sapiens; identical to SEQ ID NO: 11104
  chr3:45000124-45000181
  hypo

SEQ ID NO: 43578 - DNA, 30 bp, Homo sapiens; identical to SEQ ID NO: 11105
  chr3:45365530-45365560
  hypo

SEQ ID NO: 43579 - DNA, 31 bp, Homo sapiens; identical to SEQ ID NO: 11106
  chr3:46586213-46586244
  hypo

SEQ ID NO: 43580 - DNA, 49 bp, Homo sapiens; identical to SEQ ID NO: 11107
  chr3:46586267-46586316
  hypo

SEQ ID NO: 43581 - DNA, 31 bp, Homo sapiens; identical to SEQ ID NO: 11108
  chr3:46713299-46713330
  hypo

SEQ ID NO: 43582 - DNA, 44 bp, Homo sapiens; identical to SEQ ID NO: 11109
  chr3:46943638-46943682
  hypo

SEQ ID NO: 43583 - DNA, 31 bp, Homo sapiens; identical to SEQ ID NO: 11110
  chr3:46944571-46944602
  hypo

SEQ ID NO: 43584 - DNA, 93 bp, Homo sapiens; identical to SEQ ID NO: 11111
  chr3:46944661-46944754
  hypo

SEQ ID NO: 43585 - DNA, 31 bp, Homo sapiens; identical to SEQ ID NO: 11112
  chr3:46947810-46947841
  hypo

SEQ ID NO: 43586 - DNA, 31 bp, Homo sapiens; identical to SEQ ID NO: 11114
  chr3:47087395-47087426
  hypo

SEQ ID NO: 43587 - DNA, 41 bp, Homo sapiens; identical to SEQ ID NO: 11116
  chr3:47373435-47373476
  hypo

SEQ ID NO: 43588 - DNA, 55 bp, Homo sapiens; identical to SEQ ID NO: 11117
  chr3:47373519-47373574
  hypo

SEQ ID NO: 43589 - DNA, 31 bp, Homo sapiens; identical to SEQ ID NO: 11121
  chr3:48179596-48179627
  hypo

SEQ ID NO: 43590 - DNA, 51 bp, Homo sapiens; identical to SEQ ID NO: 11123
  chr3:48263633-48263684
  hypo

SEQ ID NO: 43591 - DNA, 47 bp, Homo sapiens; identical to SEQ ID NO: 11124
  chr3:48263714-48263761
  hypo

SEQ ID NO: 43592 - DNA, 31 bp, Homo sapiens; identical to SEQ ID NO: 11125
  chr3:48263771-48263802
  hypo

SEQ ID NO: 43593 - DNA, 31 bp, Homo sapiens; identical to SEQ ID NO: 11128
  chr3:48451212-48451243
  hypo

SEQ ID NO: 43594 - DNA, 31 bp, Homo sapiens; identical to SEQ ID NO: 11129
  chr3:48456271-48456302
  hypo

SEQ ID NO: 43595 - DNA, 31 bp, Homo sapiens; identical to SEQ ID NO: 11130
  chr3:48459417-48459448
  hypo

SEQ ID NO: 43596 - DNA, 31 bp, Homo sapiens; identical to SEQ ID NO: 11131
  chr3:48459583-48459614
  hypo

SEQ ID NO: 43597 - DNA, 31 bp, Homo sapiens; identical to SEQ ID NO: 11132
  chr3:48459644-48459675
  hypo

SEQ ID NO: 43598 - DNA, 31 bp, Homo sapiens; identical to SEQ ID NO: 11133
  chr3:48461256-48461287
  hypo

SEQ ID NO: 43599 - DNA, 31 bp, Homo sapiens; identical to SEQ ID NO: 11134
  chr3:48461296-48461327
  hypo

SEQ ID NO: 43600 - DNA, 31 bp, Homo sapiens; identical to SEQ ID NO: 11135
  chr3:48563028-48563059
  hypo

SEQ ID NO: 43601 - DNA, 52 bp, Homo sapiens; identical to SEQ ID NO: 11136
  chr3:48563061-48563113
  hypo

SEQ ID NO: 43602 - DNA, 31 bp, Homo sapiens; identical to SEQ ID NO: 11137
  chr3:48584749-48584780
  hypo

SEQ ID NO: 43603 - DNA, 31 bp, Homo sapiens; identical to SEQ ID NO: 11138
  chr3:48604090-48604121
  hypo

SEQ ID NO: 43604 - DNA, 31 bp, Homo sapiens; identical to SEQ ID NO: 11139
  chr3:48605091-48605122
  hypo

SEQ ID NO: 43605 - DNA, 40 bp, Homo sapiens; identical to SEQ ID NO: 11140
  chr3:48607710-48607750
  hypo

SEQ ID NO: 43606 - DNA, 31 bp, Homo sapiens; identical to SEQ ID NO: 11141
  chr3:48622954-48622985
  hypo

SEQ ID NO: 43607 - DNA, 31 bp, Homo sapiens; identical to SEQ ID NO: 11142
  chr3:48684050-48684081
  hypo

SEQ ID NO: 43608 - DNA, 31 bp, Homo sapiens; identical to SEQ ID NO: 11143
  chr3:48685739-48685770
  hypo

SEQ ID NO: 43609 - DNA, 35 bp, Homo sapiens; identical to SEQ ID NO: 11144
  chr3:48733584-48733619
  hypo

SEQ ID NO: 43610 - DNA, 31 bp, Homo sapiens; identical to SEQ ID NO: 11145
  chr3:48948534-48948565
  hypo

SEQ ID NO: 43611 - DNA, 42 bp, Homo sapiens; identical to SEQ ID NO: 11146
  chr3:48954851-48954893
  hypo

SEQ ID NO: 43612 - DNA, 2 bp, Homo sapiens
  chr3:49034203-49034205
  hypo
ta

SEQ ID NO: 43613 - DNA, 31 bp, Homo sapiens; identical to SEQ ID NO: 11149
  chr3:49142733-49142764
  hypo

SEQ ID NO: 43614 - DNA, 31 bp, Homo sapiens; identical to SEQ ID NO: 11150
  chr3:49167302-49167333
  hypo

SEQ ID NO: 43615 - DNA, 31 bp, Homo sapiens; identical to SEQ ID NO: 11151
  chr3:49168953-49168984
  hypo

SEQ ID NO: 43616 - DNA, 32 bp, Homo sapiens; identical to SEQ ID NO: 11153
  chr3:49433705-49433737
  hypo

SEQ ID NO: 43617 - DNA, 34 bp, Homo sapiens; identical to SEQ ID NO: 11154
  chr3:49532338-49532372
  hypo

SEQ ID NO: 43618 - DNA, 41 bp, Homo sapiens; identical to SEQ ID NO: 11155
  chr3:49636112-49636153
  hypo

SEQ ID NO: 43619 - DNA, 31 bp, Homo sapiens; identical to SEQ ID NO: 11156
  chr3:49636178-49636209
  hypo

SEQ ID NO: 43620 - DNA, 31 bp, Homo sapiens; identical to SEQ ID NO: 11157
  chr3:49662398-49662429
  hypo

SEQ ID NO: 43621 - DNA, 31 bp, Homo sapiens; identical to SEQ ID NO: 11158
  chr3:49662453-49662484
  hypo

SEQ ID NO: 43622 - DNA, 31 bp, Homo sapiens; identical to SEQ ID NO: 11159
  chr3:49662494-49662525
  hypo

SEQ ID NO: 43623 - DNA, 59 bp, Homo sapiens; identical to SEQ ID NO: 11160
  chr3:49688340-49688399
  hypo

SEQ ID NO: 43624 - DNA, 31 bp, Homo sapiens; identical to SEQ ID NO: 11161
  chr3:49688401-49688432
  hypo

SEQ ID NO: 43625 - DNA, 31 bp, Homo sapiens; identical to SEQ ID NO: 11162
  chr3:49688453-49688484
  hypo

SEQ ID NO: 43626 - DNA, 31 bp, Homo sapiens; identical to SEQ ID NO: 11163
  chr3:49688491-49688522
  hypo

SEQ ID NO: 43627 - DNA, 31 bp, Homo sapiens; identical to SEQ ID NO: 11164
  chr3:49698034-49698065
  hypo

SEQ ID NO: 43628 - DNA, 31 bp, Homo sapiens; identical to SEQ ID NO: 11165
  chr3:49700336-49700367
  hypo

SEQ ID NO: 43629 - DNA, 31 bp, Homo sapiens; identical to SEQ ID NO: 11166
  chr3:49700894-49700925
  hypo

SEQ ID NO: 43630 - DNA, 31 bp, Homo sapiens; identical to SEQ ID NO: 11167
  chr3:49701764-49701795
  hypo

SEQ ID NO: 43631 - DNA, 2 bp, Homo sapiens
  chr3:49755534-49755536
  hypo
ac

SEQ ID NO: 43632 - DNA, 54 bp, Homo sapiens; identical to SEQ ID NO: 11169
  chr3:49755786-49755840
  hypo

SEQ ID NO: 43633 - DNA, 31 bp, Homo sapiens; identical to SEQ ID NO: 11171
  chr3:49928713-49928744
  hypo

SEQ ID NO: 43634 - DNA, 31 bp, Homo sapiens; identical to SEQ ID NO: 11173
  chr3:49977173-49977204
  hypo

SEQ ID NO: 43635 - DNA, 39 bp, Homo sapiens; identical to SEQ ID NO: 1478
  chr3:50192965-50193004
  hypo

SEQ ID NO: 43636 - DNA, 48 bp, Homo sapiens; identical to SEQ ID NO: 1479
  chr3:50193032-50193080
  hypo

SEQ ID NO: 43637 - DNA, 31 bp, Homo sapiens; identical to SEQ ID NO: 11176
  chr3:50218760-50218791
  hypo

SEQ ID NO: 43638 - DNA, 31 bp, Homo sapiens; identical to SEQ ID NO: 11177
  chr3:50220857-50220888
  hypo

SEQ ID NO: 43639 - DNA, 58 bp, Homo sapiens; identical to SEQ ID NO: 11178
  chr3:50224042-50224100
  hypo

SEQ ID NO: 43640 - DNA, 49 bp, Homo sapiens; identical to SEQ ID NO: 11179
  chr3:50225312-50225361
  hypo

SEQ ID NO: 43641 - DNA, 31 bp, Homo sapiens; identical to SEQ ID NO: 11180
  chr3:50255894-50255925
  hypo

SEQ ID NO: 43642 - DNA, 31 bp, Homo sapiens; identical to SEQ ID NO: 1480
  chr3:50374390-50374421
  hypo

SEQ ID NO: 43643 - DNA, 31 bp, Homo sapiens; identical to SEQ ID NO: 1481
  chr3:50374463-50374494
  hypo

SEQ ID NO: 43644 - DNA, 58 bp, Homo sapiens; identical to SEQ ID NO: 11185
  chr3:50395834-50395892
  hypo

SEQ ID NO: 43645 - DNA, 31 bp, Homo sapiens; identical to SEQ ID NO: 11186
  chr3:50417389-50417420
  hypo

SEQ ID NO: 43646 - DNA, 41 bp, Homo sapiens; identical to SEQ ID NO: 11187
  chr3:50420381-50420422
  hypo

SEQ ID NO: 43647 - DNA, 31 bp, Homo sapiens; identical to SEQ ID NO: 11188
  chr3:50438043-50438074
  hypo

SEQ ID NO: 43648 - DNA, 54 bp, Homo sapiens; identical to SEQ ID NO: 11189
  chr3:50523257-50523311
  hypo

SEQ ID NO: 43649 - DNA, 31 bp, Homo sapiens; identical to SEQ ID NO: 11192
  chr3:51660734-51660765
  hypo

SEQ ID NO: 43650 - DNA, 41 bp, Homo sapiens; identical to SEQ ID NO: 1488
  chr3:52001296-52001337
  hypo

SEQ ID NO: 43651 - DNA, 31 bp, Homo sapiens; identical to SEQ ID NO: 11194
  chr3:52257401-52257432
  hypo

SEQ ID NO: 43652 - DNA, 31 bp, Homo sapiens; identical to SEQ ID NO: 1489
  chr3:52477535-52477566
  hypo

SEQ ID NO: 43653 - DNA, 31 bp, Homo sapiens; identical to SEQ ID NO: 11197
  chr3:52485958-52485989
  hypo

SEQ ID NO: 43654 - DNA, 31 bp, Homo sapiens; identical to SEQ ID NO: 11198
  chr3:52487923-52487954
  hypo

SEQ ID NO: 43655 - DNA, 31 bp, Homo sapiens; identical to SEQ ID NO: 11199
  chr3:52538705-52538736
  hypo

SEQ ID NO: 43656 - DNA, 56 bp, Homo sapiens; identical to SEQ ID NO: 11200
  chr3:52540174-52540230
  hypo

SEQ ID NO: 43657 - DNA, 31 bp, Homo sapiens; identical to SEQ ID NO: 11201
  chr3:52540367-52540398
  hypo

SEQ ID NO: 43658 - DNA, 31 bp, Homo sapiens; identical to SEQ ID NO: 11202
  chr3:52540566-52540597
  hypo

SEQ ID NO: 43659 - DNA, 39 bp, Homo sapiens; identical to SEQ ID NO: 11203
  chr3:52552851-52552890
  hypo

SEQ ID NO: 43660 - DNA, 37 bp, Homo sapiens; identical to SEQ ID NO: 11205
  chr3:52553515-52553552
  hypo

SEQ ID NO: 43661 - DNA, 31 bp, Homo sapiens; identical to SEQ ID NO: 11207
  chr3:52558927-52558958
  hypo

SEQ ID NO: 43662 - DNA, 2 bp, Homo sapiens
  chr3:52599736-52599738
  hypo
tc

SEQ ID NO: 43663 - DNA, 31 bp, Homo sapiens; identical to SEQ ID NO: 11209
  chr3:52900370-52900401
  hypo

SEQ ID NO: 43664 - DNA, 31 bp, Homo sapiens; identical to SEQ ID NO: 11210
  chr3:52900429-52900460
  hypo

SEQ ID NO: 43665 - DNA, 31 bp, Homo sapiens; identical to SEQ ID NO: 11211
  chr3:53014728-53014759
  hypo

SEQ ID NO: 43666 - DNA, 31 bp, Homo sapiens; identical to SEQ ID NO: 11213
  chr3:53032443-53032474
  hypo

SEQ ID NO: 43667 - DNA, 37 bp, Homo sapiens; identical to SEQ ID NO: 11214
  chr3:53032549-53032586
  hypo

SEQ ID NO: 43668 - DNA, 37 bp, Homo sapiens; identical to SEQ ID NO: 11215
  chr3:53032621-53032658
  hypo

SEQ ID NO: 43669 - DNA, 40 bp, Homo sapiens; identical to SEQ ID NO: 11223
  chr3:53132044-53132084
  hypo

SEQ ID NO: 43670 - DNA, 56 bp, Homo sapiens; identical to SEQ ID NO: 11224
  chr3:53132113-53132169
  hypo

SEQ ID NO: 43671 - DNA, 105 bp, Homo sapiens; identical to SEQ ID NO: 1490
  chr3:53195773-53195878
  hypo

SEQ ID NO: 43672 - DNA, 38 bp, Homo sapiens; identical to SEQ ID NO: 1492
  chr3:53528138-53528176
  hypo

SEQ ID NO: 43673 - DNA, 68 bp, Homo sapiens; identical to SEQ ID NO: 1494
  chr3:53528642-53528710
  hypo

SEQ ID NO: 43674 - DNA, 31 bp, Homo sapiens; identical to SEQ ID NO: 11228
  chr3:53675066-53675097
  hypo

SEQ ID NO: 43675 - DNA, 31 bp, Homo sapiens; identical to SEQ ID NO: 11229
  chr3:53675127-53675158
  hypo

SEQ ID NO: 43676 - DNA, 49 bp, Homo sapiens; identical to SEQ ID NO: 11230
  chr3:53675171-53675220
  hypo

SEQ ID NO: 43677 - DNA, 31 bp, Homo sapiens; identical to SEQ ID NO: 11231
  chr3:53675238-53675269
  hypo

SEQ ID NO: 43678 - DNA, 31 bp, Homo sapiens; identical to SEQ ID NO: 11232
  chr3:53757556-53757587
  hypo

SEQ ID NO: 43679 - DNA, 31 bp, Homo sapiens; identical to SEQ ID NO: 11233
  chr3:53841385-53841416
  hypo

SEQ ID NO: 43680 - DNA, 35 bp, Homo sapiens; identical to SEQ ID NO: 11234
  chr3:53842745-53842780
  hypo

SEQ ID NO: 43681 - DNA, 44 bp, Homo sapiens; identical to SEQ ID NO: 11235
  chr3:53844087-53844131
  hypo

SEQ ID NO: 43682 - DNA, 37 bp, Homo sapiens; identical to SEQ ID NO: 11236
  chr3:53845188-53845225
  hypo

SEQ ID NO: 43683 - DNA, 31 bp, Homo sapiens; identical to SEQ ID NO: 11237
  chr3:53845385-53845416
  hypo

SEQ ID NO: 43684 - DNA, 60 bp, Homo sapiens; identical to SEQ ID NO: 11238
  chr3:53857418-53857478
  hypo

SEQ ID NO: 43685 - DNA, 31 bp, Homo sapiens; identical to SEQ ID NO: 11239
  chr3:54307079-54307110
  hypo

SEQ ID NO: 43686 - DNA, 62 bp, Homo sapiens; identical to SEQ ID NO: 11240
  chr3:56718132-56718194
  hypo

SEQ ID NO: 43687 - DNA, 2 bp, Homo sapiens
  chr3:56718242-56718244
  hypo
tc

SEQ ID NO: 43688 - DNA, 62 bp, Homo sapiens; identical to SEQ ID NO: 11242
  chr3:56718285-56718347
  hypo

SEQ ID NO: 43689 - DNA, 62 bp, Homo sapiens; identical to SEQ ID NO: 11243
  chr3:56718389-56718451
  hypo

SEQ ID NO: 43690 - DNA, 31 bp, Homo sapiens; identical to SEQ ID NO: 11245
  chr3:56883014-56883045
  hypo

SEQ ID NO: 43691 - DNA, 31 bp, Homo sapiens; identical to SEQ ID NO: 11246
  chr3:56883064-56883095
  hypo

SEQ ID NO: 43692 - DNA, 58 bp, Homo sapiens; identical to SEQ ID NO: 11247
  chr3:57040321-57040379
  hypo

SEQ ID NO: 43693 - DNA, 12 bp, Homo sapiens
  chr3:57040453-57040465
  hypo
caaggaactcat

SEQ ID NO: 43694 - DNA, 31 bp, Homo sapiens; identical to SEQ ID NO: 11249
  chr3:57044050-57044081
  hypo

SEQ ID NO: 43695 - DNA, 33 bp, Homo sapiens; identical to SEQ ID NO: 11250
  chr3:57101180-57101213
  hypo

SEQ ID NO: 43696 - DNA, 31 bp, Homo sapiens; identical to SEQ ID NO: 1498
  chr3:57113349-57113380
  hypo

SEQ ID NO: 43697 - DNA, 35 bp, Homo sapiens; identical to SEQ ID NO: 1499
  chr3:57113437-57113472
  hypo

SEQ ID NO: 43698 - DNA, 38 bp, Homo sapiens; identical to SEQ ID NO: 11253
  chr3:57131628-57131666
  hypo

SEQ ID NO: 43699 - DNA, 31 bp, Homo sapiens; identical to SEQ ID NO: 11254
  chr3:57131713-57131744
  hypo

SEQ ID NO: 43700 - DNA, 31 bp, Homo sapiens; identical to SEQ ID NO: 1503
  chr3:57261347-57261378
  hypo

SEQ ID NO: 43701 - DNA, 31 bp, Homo sapiens; identical to SEQ ID NO: 11256
  chr3:57539554-57539585
  hypo

SEQ ID NO: 43702 - DNA, 31 bp, Homo sapiens; identical to SEQ ID NO: 1506
  chr3:61656125-61656156
  hypo

SEQ ID NO: 43703 - DNA, 48 bp, Homo sapiens; identical to SEQ ID NO: 1507
  chr3:61656168-61656216
  hypo

SEQ ID NO: 43704 - DNA, 31 bp, Homo sapiens; identical to SEQ ID NO: 11260
  chr3:63867446-63867477
  hypo

SEQ ID NO: 43705 - DNA, 31 bp, Homo sapiens; identical to SEQ ID NO: 1509
  chr3:64673805-64673836
  hypo

SEQ ID NO: 43706 - DNA, 31 bp, Homo sapiens; identical to SEQ ID NO: 11262
  chr3:65364854-65364885
  hypo

SEQ ID NO: 43707 - DNA, 105 bp, Homo sapiens; identical to SEQ ID NO: 11263
  chr3:65364905-65365010
  hypo

SEQ ID NO: 43708 - DNA, 31 bp, Homo sapiens; identical to SEQ ID NO: 11264
  chr3:65368389-65368420
  hypo

SEQ ID NO: 43709 - DNA, 31 bp, Homo sapiens; identical to SEQ ID NO: 11265
  chr3:65368600-65368631
  hypo

SEQ ID NO: 43710 - DNA, 31 bp, Homo sapiens; identical to SEQ ID NO: 11266
  chr3:65435158-65435189
  hypo

SEQ ID NO: 43711 - DNA, 31 bp, Homo sapiens; identical to SEQ ID NO: 11269
  chr3:65999147-65999178
  hypo

SEQ ID NO: 43712 - DNA, 64 bp, Homo sapiens; identical to SEQ ID NO: 1512
  chr3:66024641-66024705
  hypo

SEQ ID NO: 43713 - DNA, 67 bp, Homo sapiens; identical to SEQ ID NO: 1513
  chr3:66024996-66025063
  hypo

SEQ ID NO: 43714 - DNA, 39 bp, Homo sapiens; identical to SEQ ID NO: 11272
  chr3:66455987-66456026
  hypo

SEQ ID NO: 43715 - DNA, 31 bp, Homo sapiens; identical to SEQ ID NO: 11273
  chr3:66456048-66456079
  hypo

SEQ ID NO: 43716 - DNA, 31 bp, Homo sapiens; identical to SEQ ID NO: 11274
  chr3:66456091-66456122
  hypo

SEQ ID NO: 43717 - DNA, 52 bp, Homo sapiens; identical to SEQ ID NO: 11275
  chr3:66460440-66460492
  hypo

SEQ ID NO: 43718 - DNA, 31 bp, Homo sapiens; identical to SEQ ID NO: 11276
  chr3:66461117-66461148
  hypo

SEQ ID NO: 43719 - DNA, 42 bp, Homo sapiens; identical to SEQ ID NO: 11277
  chr3:66461172-66461214
  hypo

SEQ ID NO: 43720 - DNA, 31 bp, Homo sapiens; identical to SEQ ID NO: 11278
  chr3:66463001-66463032
  hypo

SEQ ID NO: 43721 - DNA, 40 bp, Homo sapiens; identical to SEQ ID NO: 11279
  chr3:66482907-66482947
  hypo

SEQ ID NO: 43722 - DNA, 44 bp, Homo sapiens; identical to SEQ ID NO: 11280
  chr3:66482963-66483007
  hypo

SEQ ID NO: 43723 - DNA, 31 bp, Homo sapiens; identical to SEQ ID NO: 11281
  chr3:66483009-66483040
  hypo

SEQ ID NO: 43724 - DNA, 31 bp, Homo sapiens; identical to SEQ ID NO: 11282
  chr3:66483073-66483104
  hypo

SEQ ID NO: 43725 - DNA, 31 bp, Homo sapiens; identical to SEQ ID NO: 11283
  chr3:66521939-66521970
  hypo

SEQ ID NO: 43726 - DNA, 56 bp, Homo sapiens; identical to SEQ ID NO: 11284
  chr3:66521983-66522039
  hypo

SEQ ID NO: 43727 - DNA, 41 bp, Homo sapiens; identical to SEQ ID NO: 11285
  chr3:66522077-66522118
  hypo

SEQ ID NO: 43728 - DNA, 280 bp, Homo sapiens; identical to SEQ ID NO: 1514
  chr3:66550413-66550693
  hypo

SEQ ID NO: 43729 - DNA, 68 bp, Homo sapiens; identical to SEQ ID NO: 1515
  chr3:66550698-66550766
  hypo

SEQ ID NO: 43730 - DNA, 69 bp, Homo sapiens; identical to SEQ ID NO: 1516
  chr3:66550867-66550936
  hypo

SEQ ID NO: 43731 - DNA, 80 bp, Homo sapiens; identical to SEQ ID NO: 1517
  chr3:66551011-66551091
  hypo

SEQ ID NO: 43732 - DNA, 356 bp, Homo sapiens; identical to SEQ ID NO: 1518
  chr3:66551117-66551473
  hypo

SEQ ID NO: 43733 - DNA, 126 bp, Homo sapiens; identical to SEQ ID NO: 1519
  chr3:66551524-66551650
  hypo

SEQ ID NO: 43734 - DNA, 31 bp, Homo sapiens; identical to SEQ ID NO: 1520
  chr3:66551712-66551743
  hypo

SEQ ID NO: 43735 - DNA, 76 bp, Homo sapiens; identical to SEQ ID NO: 1521
  chr3:66551785-66551861
  hypo

SEQ ID NO: 43736 - DNA, 30 bp, Homo sapiens; identical to SEQ ID NO: 11294
  chr3:66744845-66744875
  hypo

SEQ ID NO: 43737 - DNA, 31 bp, Homo sapiens; identical to SEQ ID NO: 11295
  chr3:66852897-66852928
  hypo

SEQ ID NO: 43738 - DNA, 31 bp, Homo sapiens; identical to SEQ ID NO: 11296
  chr3:66852984-66853015
  hypo

SEQ ID NO: 43739 - DNA, 31 bp, Homo sapiens; identical to SEQ ID NO: 11297
  chr3:66853016-66853047
  hypo

SEQ ID NO: 43740 - DNA, 36 bp, Homo sapiens; identical to SEQ ID NO: 11299
  chr3:67079760-67079796
  hypo

SEQ ID NO: 43741 - DNA, 47 bp, Homo sapiens; identical to SEQ ID NO: 11301
  chr3:69309483-69309530
  hypo

SEQ ID NO: 43742 - DNA, 31 bp, Homo sapiens; identical to SEQ ID NO: 1523
  chr3:69788413-69788444
  hypo

SEQ ID NO: 43743 - DNA, 148 bp, Homo sapiens; identical to SEQ ID NO: 1524
  chr3:69788530-69788678
  hypo

SEQ ID NO: 43744 - DNA, 41 bp, Homo sapiens; identical to SEQ ID NO: 11304
  chr3:70901511-70901552
  hypo

SEQ ID NO: 43745 - DNA, 49 bp, Homo sapiens; identical to SEQ ID NO: 1525
  chr3:71114104-71114153
  hypo

SEQ ID NO: 43746 - DNA, 31 bp, Homo sapiens; identical to SEQ ID NO: 11307
  chr3:71163676-71163707
  hypo

SEQ ID NO: 43747 - DNA, 50 bp, Homo sapiens; identical to SEQ ID NO: 11309
  chr3:71533899-71533949
  hypo

SEQ ID NO: 43748 - DNA, 31 bp, Homo sapiens; identical to SEQ ID NO: 11310
  chr3:71533962-71533993
  hypo

SEQ ID NO: 43749 - DNA, 133 bp, Homo sapiens; identical to SEQ ID NO: 1526
  chr3:71631263-71631396
  hypo

SEQ ID NO: 43750 - DNA, 103 bp, Homo sapiens; identical to SEQ ID NO: 1527
  chr3:71631398-71631501
  hypo

SEQ ID NO: 43751 - DNA, 110 bp, Homo sapiens; identical to SEQ ID NO: 1528
  chr3:71631789-71631899
  hypo

SEQ ID NO: 43752 - DNA, 31 bp, Homo sapiens; identical to SEQ ID NO: 11315
  chr3:72506018-72506049
  hypo

SEQ ID NO: 43753 - DNA, 31 bp, Homo sapiens; identical to SEQ ID NO: 11316
  chr3:72739581-72739612
  hypo

SEQ ID NO: 43754 - DNA, 31 bp, Homo sapiens; identical to SEQ ID NO: 1533
  chr3:72896942-72896973
  hypo

SEQ ID NO: 43755 - DNA, 31 bp, Homo sapiens; identical to SEQ ID NO: 11318
  chr3:72913684-72913715
  hypo

SEQ ID NO: 43756 - DNA, 32 bp, Homo sapiens; identical to SEQ ID NO: 11319
  chr3:72964697-72964729
  hypo

SEQ ID NO: 43757 - DNA, 31 bp, Homo sapiens; identical to SEQ ID NO: 11320
  chr3:72998942-72998973
  hypo

SEQ ID NO: 43758 - DNA, 31 bp, Homo sapiens; identical to SEQ ID NO: 11323
  chr3:73045730-73045761
  hypo

SEQ ID NO: 43759 - DNA, 31 bp, Homo sapiens; identical to SEQ ID NO: 11324
  chr3:74039864-74039895
  hypo

SEQ ID NO: 43760 - DNA, 2 bp, Homo sapiens
  chr3:74663813-74663815
  hypo
cg

SEQ ID NO: 43761 - DNA, 31 bp, Homo sapiens; identical to SEQ ID NO: 11326
  chr3:82247998-82248029
  hypo

SEQ ID NO: 43762 - DNA, 31 bp, Homo sapiens; identical to SEQ ID NO: 11327
  chr3:82248105-82248136
  hypo

SEQ ID NO: 43763 - DNA, 45 bp, Homo sapiens; identical to SEQ ID NO: 11328
  chr3:82248152-82248197
  hypo

SEQ ID NO: 43764 - DNA, 41 bp, Homo sapiens; identical to SEQ ID NO: 11329
  chr3:84175658-84175699
  hypo

SEQ ID NO: 43765 - DNA, 31 bp, Homo sapiens; identical to SEQ ID NO: 11330
  chr3:85471958-85471989
  hypo

SEQ ID NO: 43766 - DNA, 31 bp, Homo sapiens; identical to SEQ ID NO: 11331
  chr3:93697928-93697959
  hypo

SEQ ID NO: 43767 - DNA, 102 bp, Homo sapiens; identical to SEQ ID NO: 1536
  chr3:97690940-97691042
  hypo

SEQ ID NO: 43768 - DNA, 31 bp, Homo sapiens; identical to SEQ ID NO: 11334
  chr3:99622031-99622062
  hypo

SEQ ID NO: 43769 - DNA, 31 bp, Homo sapiens; identical to SEQ ID NO: 11335
  chr3:99694509-99694540
  hypo

SEQ ID NO: 43770 - DNA, 58 bp, Homo sapiens; identical to SEQ ID NO: 11336
  chr3:99944287-99944345
  hypo

SEQ ID NO: 43771 - DNA, 31 bp, Homo sapiens; identical to SEQ ID NO: 11337
  chr3:99944373-99944404
  hypo

SEQ ID NO: 43772 - DNA, 62 bp, Homo sapiens
  chr3:113557397-113557459
  hypo
aggaatgagagcgaaactccgtctcaaaaaaaaaaaaaaaaagtttccgagcaattcacctt

SEQ ID NO: 43773 - DNA, 59 bp, Homo sapiens; identical to SEQ ID NO: 11344
  chr3:119342486-119342545
  hypo

SEQ ID NO: 43774 - DNA, 31 bp, Homo sapiens; identical to SEQ ID NO: 1545
  chr3:120068919-120068950
  hypo

SEQ ID NO: 43775 - DNA, 41 bp, Homo sapiens; identical to SEQ ID NO: 11346
  chr3:120150380-120150421
  hypo

SEQ ID NO: 43776 - DNA, 31 bp, Homo sapiens; identical to SEQ ID NO: 11347
  chr3:120150552-120150583
  hypo

SEQ ID NO: 43777 - DNA, 16 bp, Homo sapiens
  chr3:121280209-121280225
  hypo
tcacgcctgtaatccc

SEQ ID NO: 43778 - DNA, 2 bp, Homo sapiens
  chr3:121563923-121563925
  hypo
tg

SEQ ID NO: 43779 - DNA, 43 bp, Homo sapiens; identical to SEQ ID NO: 11356
  chr3:122231269-122231312
  hypo

SEQ ID NO: 43780 - DNA, 4 bp, Homo sapiens
  chr3:122234270-122234274
  hypo
tcac

SEQ ID NO: 43781 - DNA, 99 bp, Homo sapiens; identical to SEQ ID NO: 1549
  chr3:122514391-122514490
  hypo

SEQ ID NO: 43782 - DNA, 31 bp, Homo sapiens; identical to SEQ ID NO: 1550
  chr3:122514524-122514555
  hypo

SEQ ID NO: 43783 - DNA, 31 bp, Homo sapiens; identical to SEQ ID NO: 11362
  chr3:122762423-122762454
  hypo

SEQ ID NO: 43784 - DNA, 70 bp, Homo sapiens; identical to SEQ ID NO: 1551
  chr3:122785819-122785889
  hypo

SEQ ID NO: 43785 - DNA, 31 bp, Homo sapiens; identical to SEQ ID NO: 11364
  chr3:122844185-122844216
  hypo

SEQ ID NO: 43786 - DNA, 31 bp, Homo sapiens; identical to SEQ ID NO: 11365
  chr3:123061284-123061315
  hypo

SEQ ID NO: 43787 - DNA, 31 bp, Homo sapiens; identical to SEQ ID NO: 11366
  chr3:123064299-123064330
  hypo

SEQ ID NO: 43788 - DNA, 31 bp, Homo sapiens; identical to SEQ ID NO: 11367
  chr3:123161050-123161081
  hypo

SEQ ID NO: 43789 - DNA, 31 bp, Homo sapiens; identical to SEQ ID NO: 11368
  chr3:123356920-123356951
  hypo

SEQ ID NO: 43790 - DNA, 31 bp, Homo sapiens; identical to SEQ ID NO: 11369
  chr3:123528975-123529006
  hypo

SEQ ID NO: 43791 - DNA, 89 bp, Homo sapiens; identical to SEQ ID NO: 1552
  chr3:123752027-123752116
  hypo

SEQ ID NO: 43792 - DNA, 31 bp, Homo sapiens; identical to SEQ ID NO: 11371
  chr3:124281775-124281806
  hypo

SEQ ID NO: 43793 - DNA, 31 bp, Homo sapiens; identical to SEQ ID NO: 11372
  chr3:124331583-124331614
  hypo

SEQ ID NO: 43794 - DNA, 31 bp, Homo sapiens; identical to SEQ ID NO: 11373
  chr3:124377424-124377455
  hypo

SEQ ID NO: 43795 - DNA, 31 bp, Homo sapiens; identical to SEQ ID NO: 11374
  chr3:124436153-124436184
  hypo

SEQ ID NO: 43796 - DNA, 52 bp, Homo sapiens; identical to SEQ ID NO: 11377
  chr3:124515491-124515543
  hypo

SEQ ID NO: 43797 - DNA, 31 bp, Homo sapiens; identical to SEQ ID NO: 11378
  chr3:124516871-124516902
  hypo

SEQ ID NO: 43798 - DNA, 38 bp, Homo sapiens; identical to SEQ ID NO: 11379
  chr3:124518662-124518700
  hypo

SEQ ID NO: 43799 - DNA, 44 bp, Homo sapiens; identical to SEQ ID NO: 11380
  chr3:124518757-124518801
  hypo

SEQ ID NO: 43800 - DNA, 41 bp, Homo sapiens; identical to SEQ ID NO: 11381
  chr3:124518815-124518856
  hypo

SEQ ID NO: 43801 - DNA, 61 bp, Homo sapiens; identical to SEQ ID NO: 1554
  chr3:124605739-124605800
  hypo

SEQ ID NO: 43802 - DNA, 50 bp, Homo sapiens; identical to SEQ ID NO: 1555
  chr3:124605853-124605903
  hypo

SEQ ID NO: 43803 - DNA, 31 bp, Homo sapiens; identical to SEQ ID NO: 11384
  chr3:124884655-124884686
  hypo

SEQ ID NO: 43804 - DNA, 33 bp, Homo sapiens; identical to SEQ ID NO: 11385
  chr3:125412959-125412992
  hypo

SEQ ID NO: 43805 - DNA, 31 bp, Homo sapiens; identical to SEQ ID NO: 1556
  chr3:125635404-125635435
  hypo

SEQ ID NO: 43806 - DNA, 31 bp, Homo sapiens; identical to SEQ ID NO: 11387
  chr3:125652362-125652393
  hypo

SEQ ID NO: 43807 - DNA, 43 bp, Homo sapiens; identical to SEQ ID NO: 11388
  chr3:125678378-125678421
  hypo

SEQ ID NO: 43808 - DNA, 31 bp, Homo sapiens; identical to SEQ ID NO: 11389
  chr3:125679194-125679225
  hypo

SEQ ID NO: 43809 - DNA, 65 bp, Homo sapiens; identical to SEQ ID NO: 11390
  chr3:125679707-125679772
  hypo

SEQ ID NO: 43810 - DNA, 31 bp, Homo sapiens; identical to SEQ ID NO: 11391
  chr3:125679847-125679878
  hypo

SEQ ID NO: 43811 - DNA, 31 bp, Homo sapiens; identical to SEQ ID NO: 11392
  chr3:125774552-125774583
  hypo

SEQ ID NO: 43812 - DNA, 51 bp, Homo sapiens; identical to SEQ ID NO: 11393
  chr3:125774612-125774663
  hypo

SEQ ID NO: 43813 - DNA, 44 bp, Homo sapiens; identical to SEQ ID NO: 11394
  chr3:125774695-125774739
  hypo

SEQ ID NO: 43814 - DNA, 31 bp, Homo sapiens; identical to SEQ ID NO: 11395
  chr3:125793293-125793324
  hypo

SEQ ID NO: 43815 - DNA, 45 bp, Homo sapiens; identical to SEQ ID NO: 11396
  chr3:125793436-125793481
  hypo

SEQ ID NO: 43816 - DNA, 31 bp, Homo sapiens; identical to SEQ ID NO: 11397
  chr3:125828922-125828953
  hypo

SEQ ID NO: 43817 - DNA, 31 bp, Homo sapiens; identical to SEQ ID NO: 11398
  chr3:125846598-125846629
  hypo

SEQ ID NO: 43818 - DNA, 31 bp, Homo sapiens; identical to SEQ ID NO: 11399
  chr3:125977271-125977302
  hypo

SEQ ID NO: 43819 - DNA, 57 bp, Homo sapiens; identical to SEQ ID NO: 11400
  chr3:125977332-125977389
  hypo

SEQ ID NO: 43820 - DNA, 31 bp, Homo sapiens; identical to SEQ ID NO: 11401
  chr3:125977430-125977461
  hypo

SEQ ID NO: 43821 - DNA, 37 bp, Homo sapiens; identical to SEQ ID NO: 11402
  chr3:126137172-126137209
  hypo

SEQ ID NO: 43822 - DNA, 92 bp, Homo sapiens; identical to SEQ ID NO: 1558
  chr3:126195082-126195174
  hypo

SEQ ID NO: 43823 - DNA, 31 bp, Homo sapiens; identical to SEQ ID NO: 11404
  chr3:126202246-126202277
  hypo

SEQ ID NO: 43824 - DNA, 31 bp, Homo sapiens; identical to SEQ ID NO: 11405
  chr3:126218193-126218224
  hypo

SEQ ID NO: 43825 - DNA, 50 bp, Homo sapiens; identical to SEQ ID NO: 11406
  chr3:126218231-126218281
  hypo

SEQ ID NO: 43826 - DNA, 31 bp, Homo sapiens; identical to SEQ ID NO: 11407
  chr3:126258809-126258840
  hypo

SEQ ID NO: 43827 - DNA, 31 bp, Homo sapiens; identical to SEQ ID NO: 11408
  chr3:126755184-126755215
  hypo

SEQ ID NO: 43828 - DNA, 31 bp, Homo sapiens; identical to SEQ ID NO: 11409
  chr3:127394687-127394718
  hypo

SEQ ID NO: 43829 - DNA, 32 bp, Homo sapiens
  chr3:127394801-127394833
  hypo
gcctcccccaggagcccgctgcgaggccaaca

SEQ ID NO: 43830 - DNA, 2 bp, Homo sapiens
  chr3:127395890-127395892
  hypo
ac

SEQ ID NO: 43831 - DNA, 74 bp, Homo sapiens; identical to SEQ ID NO: 11415
  chr3:127865561-127865635
  hypo

SEQ ID NO: 43832 - DNA, 31 bp, Homo sapiens; identical to SEQ ID NO: 11416
  chr3:127871428-127871459
  hypo

SEQ ID NO: 43833 - DNA, 31 bp, Homo sapiens; identical to SEQ ID NO: 11417
  chr3:128056310-128056341
  hypo

SEQ ID NO: 43834 - DNA, 2 bp, Homo sapiens
  chr3:128056382-128056384
  hypo
gt

SEQ ID NO: 43835 - DNA, 31 bp, Homo sapiens; identical to SEQ ID NO: 11420
  chr3:128056526-128056557
  hypo

SEQ ID NO: 43836 - DNA, 31 bp, Homo sapiens; identical to SEQ ID NO: 11421
  chr3:128110727-128110758
  hypo

SEQ ID NO: 43837 - DNA, 68 bp, Homo sapiens; identical to SEQ ID NO: 11422
  chr3:128110777-128110845
  hypo

SEQ ID NO: 43838 - DNA, 31 bp, Homo sapiens; identical to SEQ ID NO: 11423
  chr3:128141569-128141600
  hypo

SEQ ID NO: 43839 - DNA, 31 bp, Homo sapiens; identical to SEQ ID NO: 11424
  chr3:128662254-128662285
  hypo

SEQ ID NO: 43840 - DNA, 31 bp, Homo sapiens; identical to SEQ ID NO: 11425
  chr3:128768446-128768477
  hypo

SEQ ID NO: 43841 - DNA, 31 bp, Homo sapiens; identical to SEQ ID NO: 11426
  chr3:128822756-128822787
  hypo

SEQ ID NO: 43842 - DNA, 31 bp, Homo sapiens; identical to SEQ ID NO: 11427
  chr3:128933594-128933625
  hypo

SEQ ID NO: 43843 - DNA, 31 bp, Homo sapiens; identical to SEQ ID NO: 11428
  chr3:129045610-129045641
  hypo

SEQ ID NO: 43844 - DNA, 31 bp, Homo sapiens; identical to SEQ ID NO: 11429
  chr3:129072726-129072757
  hypo

SEQ ID NO: 43845 - DNA, 31 bp, Homo sapiens; identical to SEQ ID NO: 11430
  chr3:129233461-129233492
  hypo

SEQ ID NO: 43846 - DNA, 31 bp, Homo sapiens; identical to SEQ ID NO: 11431
  chr3:129246204-129246235
  hypo

SEQ ID NO: 43847 - DNA, 34 bp, Homo sapiens; identical to SEQ ID NO: 11432
  chr3:129246255-129246289
  hypo

SEQ ID NO: 43848 - DNA, 31 bp, Homo sapiens; identical to SEQ ID NO: 11433
  chr3:129246340-129246371
  hypo

SEQ ID NO: 43849 - DNA, 31 bp, Homo sapiens; identical to SEQ ID NO: 11434
  chr3:129247589-129247620
  hypo

SEQ ID NO: 43850 - DNA, 31 bp, Homo sapiens; identical to SEQ ID NO: 11435
  chr3:129247919-129247950
  hypo

SEQ ID NO: 43851 - DNA, 49 bp, Homo sapiens; identical to SEQ ID NO: 11436
  chr3:129252487-129252536
  hypo

SEQ ID NO: 43852 - DNA, 31 bp, Homo sapiens; identical to SEQ ID NO: 11437
  chr3:129266573-129266604
  hypo

SEQ ID NO: 43853 - DNA, 31 bp, Homo sapiens; identical to SEQ ID NO: 11438
  chr3:129275268-129275299
  hypo

SEQ ID NO: 43854 - DNA, 31 bp, Homo sapiens; identical to SEQ ID NO: 11439
  chr3:129275852-129275883
  hypo

SEQ ID NO: 43855 - DNA, 65 bp, Homo sapiens; identical to SEQ ID NO: 11441
  chr3:131100367-131100432
  hypo

SEQ ID NO: 43856 - DNA, 4 bp, Homo sapiens
  chr3:133217917-133217921
  hypo
taca

SEQ ID NO: 43857 - DNA, 31 bp, Homo sapiens; identical to SEQ ID NO: 11445
  chr3:133364597-133364628
  hypo

SEQ ID NO: 43858 - DNA, 31 bp, Homo sapiens; identical to SEQ ID NO: 11446
  chr3:133364634-133364665
  hypo

SEQ ID NO: 43859 - DNA, 31 bp, Homo sapiens; identical to SEQ ID NO: 11447
  chr3:133560512-133560543
  hypo

SEQ ID NO: 43860 - DNA, 31 bp, Homo sapiens; identical to SEQ ID NO: 11448
  chr3:133560555-133560586
  hypo

SEQ ID NO: 43861 - DNA, 31 bp, Homo sapiens; identical to SEQ ID NO: 11449
  chr3:133560590-133560621
  hypo

SEQ ID NO: 43862 - DNA, 43 bp, Homo sapiens; identical to SEQ ID NO: 36050
  chr3:133646451-133646494
  hypo

SEQ ID NO: 43863 - DNA, 31 bp, Homo sapiens; identical to SEQ ID NO: 1565
  chr3:133969928-133969959
  hypo

SEQ ID NO: 43864 - DNA, 31 bp, Homo sapiens; identical to SEQ ID NO: 11453
  chr3:134021045-134021076
  hypo

SEQ ID NO: 43865 - DNA, 93 bp, Homo sapiens; identical to SEQ ID NO: 11455
  chr3:134080495-134080588
  hypo

SEQ ID NO: 43866 - DNA, 127 bp, Homo sapiens; identical to SEQ ID NO: 36057
  chr3:134092992-134093119
  hypo

SEQ ID NO: 43867 - DNA, 205 bp, Homo sapiens; identical to SEQ ID NO: 36058
  chr3:134093148-134093353
  hypo

SEQ ID NO: 43868 - DNA, 188 bp, Homo sapiens; identical to SEQ ID NO: 1571
  chr3:134093363-134093551
  hypo

SEQ ID NO: 43869 - DNA, 128 bp, Homo sapiens; identical to SEQ ID NO: 1572
  chr3:134093626-134093754
  hypo

SEQ ID NO: 43870 - DNA, 31 bp, Homo sapiens; identical to SEQ ID NO: 11459
  chr3:134103115-134103146
  hypo

SEQ ID NO: 43871 - DNA, 31 bp, Homo sapiens; identical to SEQ ID NO: 11460
  chr3:134166665-134166696
  hypo

SEQ ID NO: 43872 - DNA, 40 bp, Homo sapiens; identical to SEQ ID NO: 11461
  chr3:134195845-134195885
  hypo

SEQ ID NO: 43873 - DNA, 31 bp, Homo sapiens; identical to SEQ ID NO: 11462
  chr3:134195947-134195978
  hypo

SEQ ID NO: 43874 - DNA, 41 bp, Homo sapiens; identical to SEQ ID NO: 11463
  chr3:134195979-134196020
  hypo

SEQ ID NO: 43875 - DNA, 2 bp, Homo sapiens
  chr3:134202928-134202930
  hypo
aa

SEQ ID NO: 43876 - DNA, 36 bp, Homo sapiens; identical to SEQ ID NO: 1573
  chr3:135684722-135684758
  hypo

SEQ ID NO: 43877 - DNA, 31 bp, Homo sapiens; identical to SEQ ID NO: 11467
  chr3:135870246-135870277
  hypo

SEQ ID NO: 43878 - DNA, 31 bp, Homo sapiens; identical to SEQ ID NO: 11468
  chr3:137783020-137783051
  hypo

SEQ ID NO: 43879 - DNA, 31 bp, Homo sapiens; identical to SEQ ID NO: 11469
  chr3:137783053-137783084
  hypo

SEQ ID NO: 43880 - DNA, 31 bp, Homo sapiens; identical to SEQ ID NO: 11470
  chr3:137783127-137783158
  hypo

SEQ ID NO: 43881 - DNA, 41 bp, Homo sapiens; identical to SEQ ID NO: 11471
  chr3:137783175-137783216
  hypo

SEQ ID NO: 43882 - DNA, 61 bp, Homo sapiens; identical to SEQ ID NO: 11472
  chr3:137822426-137822487
  hypo

SEQ ID NO: 43883 - DNA, 95 bp, Homo sapiens; identical to SEQ ID NO: 11473
  chr3:137822527-137822622
  hypo

SEQ ID NO: 43884 - DNA, 46 bp, Homo sapiens; identical to SEQ ID NO: 1579
  chr3:138067287-138067333
  hypo

SEQ ID NO: 43885 - DNA, 59 bp, Homo sapiens; identical to SEQ ID NO: 11475
  chr3:138081463-138081522
  hypo

SEQ ID NO: 43886 - DNA, 39 bp, Homo sapiens; identical to SEQ ID NO: 11476
  chr3:138577522-138577561
  hypo

SEQ ID NO: 43887 - DNA, 31 bp, Homo sapiens; identical to SEQ ID NO: 11477
  chr3:138634049-138634080
  hypo

SEQ ID NO: 43888 - DNA, 31 bp, Homo sapiens; identical to SEQ ID NO: 11479
  chr3:138635532-138635563
  hypo

SEQ ID NO: 43889 - DNA, 31 bp, Homo sapiens; identical to SEQ ID NO: 11480
  chr3:138694446-138694477
  hypo

SEQ ID NO: 43890 - DNA, 37 bp, Homo sapiens; identical to SEQ ID NO: 11481
  chr3:138981443-138981480
  hypo

SEQ ID NO: 43891 - DNA, 31 bp, Homo sapiens; identical to SEQ ID NO: 11484
  chr3:140434260-140434291
  hypo

SEQ ID NO: 43892 - DNA, 22 bp, Homo sapiens
  chr3:141174671-141174693
  hypo
gtttcagcgtccacatgtgtgc

SEQ ID NO: 43893 - DNA, 39 bp, Homo sapiens; identical to SEQ ID NO: 11491
  chr3:141509676-141509715
  hypo

SEQ ID NO: 43894 - DNA, 35 bp, Homo sapiens; identical to SEQ ID NO: 11492
  chr3:141622406-141622441
  hypo

SEQ ID NO: 43895 - DNA, 78 bp, Homo sapiens; identical to SEQ ID NO: 11493
  chr3:141622505-141622583
  hypo

SEQ ID NO: 43896 - DNA, 31 bp, Homo sapiens; identical to SEQ ID NO: 11494
  chr3:141664327-141664358
  hypo

SEQ ID NO: 43897 - DNA, 31 bp, Homo sapiens; identical to SEQ ID NO: 11495
  chr3:141954428-141954459
  hypo

SEQ ID NO: 43898 - DNA, 31 bp, Homo sapiens; identical to SEQ ID NO: 11496
  chr3:141959959-141959990
  hypo

SEQ ID NO: 43899 - DNA, 2 bp, Homo sapiens
  chr3:142499819-142499821
  hypo
aa

SEQ ID NO: 43900 - DNA, 31 bp, Homo sapiens; identical to SEQ ID NO: 11514
  chr3:145833014-145833045
  hypo

SEQ ID NO: 43901 - DNA, 15 bp, Homo sapiens
  chr3:145878854-145878869
  hypo
cgggtccgccctgag

SEQ ID NO: 43902 - DNA, 44 bp, Homo sapiens; identical to SEQ ID NO: 1596
  chr3:145879058-145879102
  hypo

SEQ ID NO: 43903 - DNA, 31 bp, Homo sapiens; identical to SEQ ID NO: 11517
  chr3:145969119-145969150
  hypo

SEQ ID NO: 43904 - DNA, 36 bp, Homo sapiens; identical to SEQ ID NO: 1597
  chr3:148710030-148710066
  hypo

SEQ ID NO: 43905 - DNA, 31 bp, Homo sapiens; identical to SEQ ID NO: 1598
  chr3:148710176-148710207
  hypo

SEQ ID NO: 43906 - DNA, 34 bp, Homo sapiens; identical to SEQ ID NO: 11521
  chr3:148726131-148726165
  hypo

SEQ ID NO: 43907 - DNA, 33 bp, Homo sapiens; identical to SEQ ID NO: 11522
  chr3:149233986-149234019
  hypo

SEQ ID NO: 43908 - DNA, 31 bp, Homo sapiens; identical to SEQ ID NO: 11523
  chr3:149345428-149345459
  hypo

SEQ ID NO: 43909 - DNA, 31 bp, Homo sapiens; identical to SEQ ID NO: 11524
  chr3:149470936-149470967
  hypo

SEQ ID NO: 43910 - DNA, 31 bp, Homo sapiens; identical to SEQ ID NO: 11525
  chr3:149858728-149858759
  hypo

SEQ ID NO: 43911 - DNA, 31 bp, Homo sapiens; identical to SEQ ID NO: 11526
  chr3:150057189-150057220
  hypo

SEQ ID NO: 43912 - DNA, 57 bp, Homo sapiens; identical to SEQ ID NO: 11527
  chr3:150086092-150086149
  hypo

SEQ ID NO: 43913 - DNA, 9 bp, Homo sapiens
  chr3:150237900-150237909
  hypo
ctcctgacc

SEQ ID NO: 43914 - DNA, 53 bp, Homo sapiens; identical to SEQ ID NO: 1599
  chr3:150321029-150321082
  hypo

SEQ ID NO: 43915 - DNA, 54 bp, Homo sapiens; identical to SEQ ID NO: 11532
  chr3:150379954-150380008
  hypo

SEQ ID NO: 43916 - DNA, 31 bp, Homo sapiens; identical to SEQ ID NO: 11533
  chr3:150380012-150380043
  hypo

SEQ ID NO: 43917 - DNA, 31 bp, Homo sapiens; identical to SEQ ID NO: 11534
  chr3:150380083-150380114
  hypo

SEQ ID NO: 43918 - DNA, 31 bp, Homo sapiens; identical to SEQ ID NO: 11535
  chr3:150420394-150420425
  hypo

SEQ ID NO: 43919 - DNA, 56 bp, Homo sapiens; identical to SEQ ID NO: 11537
  chr3:154907167-154907223
  hypo

SEQ ID NO: 43920 - DNA, 31 bp, Homo sapiens; identical to SEQ ID NO: 11539
  chr3:155460890-155460921
  hypo

SEQ ID NO: 43921 - DNA, 31 bp, Homo sapiens; identical to SEQ ID NO: 11540
  chr3:155460954-155460985
  hypo

SEQ ID NO: 43922 - DNA, 13 bp, Homo sapiens
  chr3:156543195-156543208
  hypo
tcatttaatcact

SEQ ID NO: 43923 - DNA, 78 bp, Homo sapiens; identical to SEQ ID NO: 1602
  chr3:156799360-156799438
  hypo

SEQ ID NO: 43924 - DNA, 31 bp, Homo sapiens; identical to SEQ ID NO: 1603
  chr3:156799497-156799528
  hypo

SEQ ID NO: 43925 - DNA, 31 bp, Homo sapiens; identical to SEQ ID NO: 11545
  chr3:158448985-158449016
  hypo

SEQ ID NO: 43926 - DNA, 31 bp, Homo sapiens; identical to SEQ ID NO: 11546
  chr3:158449031-158449062
  hypo

SEQ ID NO: 43927 - DNA, 31 bp, Homo sapiens; identical to SEQ ID NO: 11547
  chr3:158690124-158690155
  hypo

SEQ ID NO: 43928 - DNA, 31 bp, Homo sapiens; identical to SEQ ID NO: 11548
  chr3:158690205-158690236
  hypo

SEQ ID NO: 43929 - DNA, 45 bp, Homo sapiens; identical to SEQ ID NO: 11549
  chr3:158690273-158690318
  hypo

SEQ ID NO: 43930 - DNA, 159 bp, Homo sapiens; identical to SEQ ID NO: 1606
  chr3:160472595-160472754
  hypo

SEQ ID NO: 43931 - DNA, 268 bp, Homo sapiens; identical to SEQ ID NO: 1607
  chr3:160472764-160473032
  hypo

SEQ ID NO: 43932 - DNA, 62 bp, Homo sapiens; identical to SEQ ID NO: 1608
  chr3:160473172-160473234
  hypo

SEQ ID NO: 43933 - DNA, 96 bp, Homo sapiens; identical to SEQ ID NO: 1609
  chr3:160473309-160473405
  hypo

SEQ ID NO: 43934 - DNA, 216 bp, Homo sapiens; identical to SEQ ID NO: 1610
  chr3:160473409-160473625
  hypo

SEQ ID NO: 43935 - DNA, 31 bp, Homo sapiens; identical to SEQ ID NO: 1611
  chr3:160473642-160473673
  hypo

SEQ ID NO: 43936 - DNA, 34 bp, Homo sapiens; identical to SEQ ID NO: 1612
  chr3:160473774-160473808
  hypo

SEQ ID NO: 43937 - DNA, 91 bp, Homo sapiens; identical to SEQ ID NO: 1613
  chr3:160473982-160474073
  hypo

SEQ ID NO: 43938 - DNA, 39 bp, Homo sapiens; identical to SEQ ID NO: 11558
  chr3:160879848-160879887
  hypo

SEQ ID NO: 43939 - DNA, 31 bp, Homo sapiens; identical to SEQ ID NO: 11559
  chr3:165174993-165175024
  hypo

SEQ ID NO: 43940 - DNA, 31 bp, Homo sapiens; identical to SEQ ID NO: 11560
  chr3:167566092-167566123
  hypo

SEQ ID NO: 43941 - DNA, 31 bp, Homo sapiens; identical to SEQ ID NO: 1617
  chr3:168754776-168754807
  hypo

SEQ ID NO: 43942 - DNA, 57 bp, Homo sapiens; identical to SEQ ID NO: 1627
  chr3:169482613-169482670
  hypo

SEQ ID NO: 43943 - DNA, 2 bp, Homo sapiens
  chr3:169482679-169482681
  hypo
tt

SEQ ID NO: 43944 - DNA, 2 bp, Homo sapiens
  chr3:169539897-169539899
  hypo
tc

SEQ ID NO: 43945 - DNA, 31 bp, Homo sapiens; identical to SEQ ID NO: 11571
  chr3:169540716-169540747
  hypo

SEQ ID NO: 43946 - DNA, 56 bp, Homo sapiens; identical to SEQ ID NO: 11573
  chr3:169896269-169896325
  hypo

SEQ ID NO: 43947 - DNA, 2 bp, Homo sapiens
  chr3:169980663-169980665
  hypo
aa

SEQ ID NO: 43948 - DNA, 13 bp, Homo sapiens
  chr3:169980686-169980699
  hypo
ggtgactcacgcc

SEQ ID NO: 43949 - DNA, 31 bp, Homo sapiens; identical to SEQ ID NO: 11575
  chr3:170179926-170179957
  hypo

SEQ ID NO: 43950 - DNA, 31 bp, Homo sapiens; identical to SEQ ID NO: 11576
  chr3:170179970-170180001
  hypo

SEQ ID NO: 43951 - DNA, 31 bp, Homo sapiens; identical to SEQ ID NO: 1640
  chr3:171758578-171758609
  hypo

SEQ ID NO: 43952 - DNA, 69 bp, Homo sapiens; identical to SEQ ID NO: 11578
  chr3:172341770-172341839
  hypo

SEQ ID NO: 43953 - DNA, 36 bp, Homo sapiens; identical to SEQ ID NO: 11579
  chr3:172351502-172351538
  hypo

SEQ ID NO: 43954 - DNA, 2 bp, Homo sapiens
  chr3:172355894-172355896
  hypo
aa

SEQ ID NO: 43955 - DNA, 2 bp, Homo sapiens
  chr3:172425346-172425348
  hypo
ca

SEQ ID NO: 43956 - DNA, 88 bp, Homo sapiens; identical to SEQ ID NO: 1642
  chr3:174158754-174158842
  hypo

SEQ ID NO: 43957 - DNA, 163 bp, Homo sapiens; identical to SEQ ID NO: 1643
  chr3:174158852-174159015
  hypo

SEQ ID NO: 43958 - DNA, 97 bp, Homo sapiens; identical to SEQ ID NO: 1644
  chr3:174159124-174159221
  hypo

SEQ ID NO: 43959 - DNA, 31 bp, Homo sapiens; identical to SEQ ID NO: 1645
  chr3:176915777-176915808
  hypo

SEQ ID NO: 43960 - DNA, 31 bp, Homo sapiens; identical to SEQ ID NO: 11590
  chr3:177299217-177299248
  hypo

SEQ ID NO: 43961 - DNA, 2 bp, Homo sapiens
  chr3:182812782-182812784
  hypo
ct

SEQ ID NO: 43962 - DNA, 11 bp, Homo sapiens
  chr3:182812802-182812813
  hypo
ggctcacacct

SEQ ID NO: 43963 - DNA, 42 bp, Homo sapiens; identical to SEQ ID NO: 11596
  chr3:182882984-182883026
  hypo

SEQ ID NO: 43964 - DNA, 101 bp, Homo sapiens; identical to SEQ ID NO: 1655
  chr3:183165243-183165344
  hypo

SEQ ID NO: 43965 - DNA, 31 bp, Homo sapiens; identical to SEQ ID NO: 1656
  chr3:183165349-183165380
  hypo

SEQ ID NO: 43966 - DNA, 31 bp, Homo sapiens; identical to SEQ ID NO: 11600
  chr3:183217391-183217422
  hypo

SEQ ID NO: 43967 - DNA, 31 bp, Homo sapiens; identical to SEQ ID NO: 11601
  chr3:183419804-183419835
  hypo

SEQ ID NO: 43968 - DNA, 31 bp, Homo sapiens; identical to SEQ ID NO: 1657
  chr3:183602889-183602920
  hypo

SEQ ID NO: 43969 - DNA, 2 bp, Homo sapiens
  chr3:183603066-183603068
  hypo
tc

SEQ ID NO: 43970 - DNA, 31 bp, Homo sapiens; identical to SEQ ID NO: 11604
  chr3:183627257-183627288
  hypo

SEQ ID NO: 43971 - DNA, 31 bp, Homo sapiens; identical to SEQ ID NO: 11605
  chr3:183637698-183637729
  hypo

SEQ ID NO: 43972 - DNA, 61 bp, Homo sapiens; identical to SEQ ID NO: 11607
  chr3:183652389-183652450
  hypo

SEQ ID NO: 43973 - DNA, 31 bp, Homo sapiens; identical to SEQ ID NO: 11608
  chr3:183657846-183657877
  hypo

SEQ ID NO: 43974 - DNA, 31 bp, Homo sapiens; identical to SEQ ID NO: 11609
  chr3:183659806-183659837
  hypo

SEQ ID NO: 43975 - DNA, 31 bp, Homo sapiens; identical to SEQ ID NO: 11611
  chr3:183670363-183670394
  hypo

SEQ ID NO: 43976 - DNA, 37 bp, Homo sapiens; identical to SEQ ID NO: 11612
  chr3:183670419-183670456
  hypo

SEQ ID NO: 43977 - DNA, 7 bp, Homo sapiens
  chr3:183676020-183676027
  hypo
tgtgtat

SEQ ID NO: 43978 - DNA, 31 bp, Homo sapiens; identical to SEQ ID NO: 11615
  chr3:183676453-183676484
  hypo

SEQ ID NO: 43979 - DNA, 31 bp, Homo sapiens; identical to SEQ ID NO: 11616
  chr3:183681332-183681363
  hypo

SEQ ID NO: 43980 - DNA, 31 bp, Homo sapiens; identical to SEQ ID NO: 11617
  chr3:183687201-183687232
  hypo

SEQ ID NO: 43981 - DNA, 31 bp, Homo sapiens; identical to SEQ ID NO: 11619
  chr3:183756606-183756637
  hypo

SEQ ID NO: 43982 - DNA, 23 bp, Homo sapiens
  chr3:183801964-183801987
  hypo
ggtgcagttcagccacgcgatgg

SEQ ID NO: 43983 - DNA, 31 bp, Homo sapiens; identical to SEQ ID NO: 11621
  chr3:183802176-183802207
  hypo

SEQ ID NO: 43984 - DNA, 31 bp, Homo sapiens; identical to SEQ ID NO: 11622
  chr3:183806894-183806925
  hypo

SEQ ID NO: 43985 - DNA, 31 bp, Homo sapiens; identical to SEQ ID NO: 11623
  chr3:183830375-183830406
  hypo

SEQ ID NO: 43986 - DNA, 31 bp, Homo sapiens; identical to SEQ ID NO: 1661
  chr3:183851914-183851945
  hypo

SEQ ID NO: 43987 - DNA, 44 bp, Homo sapiens; identical to SEQ ID NO: 11625
  chr3:184026276-184026320
  hypo

SEQ ID NO: 43988 - DNA, 15 bp, Homo sapiens
  chr3:184059893-184059908
  hypo
cgccatggcccaggg

SEQ ID NO: 43989 - DNA, 31 bp, Homo sapiens; identical to SEQ ID NO: 11629
  chr3:184070999-184071030
  hypo

SEQ ID NO: 43990 - DNA, 39 bp, Homo sapiens; identical to SEQ ID NO: 11630
  chr3:184071378-184071417
  hypo

SEQ ID NO: 43991 - DNA, 63 bp, Homo sapiens; identical to SEQ ID NO: 11631
  chr3:184071552-184071615
  hypo

SEQ ID NO: 43992 - DNA, 31 bp, Homo sapiens; identical to SEQ ID NO: 11632
  chr3:184071673-184071704
  hypo

SEQ ID NO: 43993 - DNA, 80 bp, Homo sapiens; identical to SEQ ID NO: 11633
  chr3:184072026-184072106
  hypo

SEQ ID NO: 43994 - DNA, 31 bp, Homo sapiens; identical to SEQ ID NO: 11634
  chr3:184073334-184073365
  hypo

SEQ ID NO: 43995 - DNA, 31 bp, Homo sapiens; identical to SEQ ID NO: 1662
  chr3:184097687-184097718
  hypo

SEQ ID NO: 43996 - DNA, 71 bp, Homo sapiens; identical to SEQ ID NO: 1664
  chr3:184098371-184098442
  hypo

SEQ ID NO: 43997 - DNA, 31 bp, Homo sapiens; identical to SEQ ID NO: 11637
  chr3:184127162-184127193
  hypo

SEQ ID NO: 43998 - DNA, 31 bp, Homo sapiens; identical to SEQ ID NO: 11638
  chr3:184133972-184134003
  hypo

SEQ ID NO: 43999 - DNA, 31 bp, Homo sapiens; identical to SEQ ID NO: 11639
  chr3:184273716-184273747
  hypo

SEQ ID NO: 44000 - DNA, 31 bp, Homo sapiens; identical to SEQ ID NO: 11640
  chr3:184273772-184273803
  hypo

SEQ ID NO: 44001 - DNA, 38 bp, Homo sapiens; identical to SEQ ID NO: 11641
  chr3:184273812-184273850
  hypo

SEQ ID NO: 44002 - DNA, 35 bp, Homo sapiens; identical to SEQ ID NO: 11642
  chr3:184273853-184273888
  hypo

SEQ ID NO: 44003 - DNA, 31 bp, Homo sapiens; identical to SEQ ID NO: 1665
  chr3:184279244-184279275
  hypo

SEQ ID NO: 44004 - DNA, 39 bp, Homo sapiens; identical to SEQ ID NO: 11644
  chr3:184295555-184295594
  hypo

SEQ ID NO: 44005 - DNA, 45 bp, Homo sapiens; identical to SEQ ID NO: 11645
  chr3:184295604-184295649
  hypo

SEQ ID NO: 44006 - DNA, 31 bp, Homo sapiens; identical to SEQ ID NO: 11646
  chr3:184298770-184298801
  hypo

SEQ ID NO: 44007 - DNA, 44 bp, Homo sapiens; identical to SEQ ID NO: 11647
  chr3:184331110-184331154
  hypo

SEQ ID NO: 44008 - DNA, 31 bp, Homo sapiens; identical to SEQ ID NO: 11648
  chr3:184331212-184331243
  hypo

SEQ ID NO: 44009 - DNA, 36 bp, Homo sapiens; identical to SEQ ID NO: 11649
  chr3:184331257-184331293
  hypo

SEQ ID NO: 44010 - DNA, 31 bp, Homo sapiens; identical to SEQ ID NO: 11650
  chr3:184353658-184353689
  hypo

SEQ ID NO: 44011 - DNA, 46 bp, Homo sapiens; identical to SEQ ID NO: 11651
  chr3:184378703-184378749
  hypo

SEQ ID NO: 44012 - DNA, 31 bp, Homo sapiens; identical to SEQ ID NO: 11652
  chr3:184491997-184492028
  hypo

SEQ ID NO: 44013 - DNA, 31 bp, Homo sapiens; identical to SEQ ID NO: 11653
  chr3:184661514-184661545
  hypo

SEQ ID NO: 44014 - DNA, 31 bp, Homo sapiens; identical to SEQ ID NO: 11655
  chr3:184689920-184689951
  hypo

SEQ ID NO: 44015 - DNA, 31 bp, Homo sapiens; identical to SEQ ID NO: 11656
  chr3:184935944-184935975
  hypo

SEQ ID NO: 44016 - DNA, 2 bp, Homo sapiens
  chr3:185001578-185001580
  hypo
ca

SEQ ID NO: 44017 - DNA, 31 bp, Homo sapiens; identical to SEQ ID NO: 11658
  chr3:185270831-185270862
  hypo

SEQ ID NO: 44018 - DNA, 2 bp, Homo sapiens
  chr3:185271295-185271297
  hypo
tt

SEQ ID NO: 44019 - DNA, 31 bp, Homo sapiens; identical to SEQ ID NO: 11662
  chr3:185375183-185375214
  hypo

SEQ ID NO: 44020 - DNA, 31 bp, Homo sapiens; identical to SEQ ID NO: 11663
  chr3:185375281-185375312
  hypo

SEQ ID NO: 44021 - DNA, 38 bp, Homo sapiens; identical to SEQ ID NO: 11664
  chr3:185375325-185375363
  hypo

SEQ ID NO: 44022 - DNA, 31 bp, Homo sapiens; identical to SEQ ID NO: 11665
  chr3:185375379-185375410
  hypo

SEQ ID NO: 44023 - DNA, 31 bp, Homo sapiens; identical to SEQ ID NO: 11666
  chr3:185375448-185375479
  hypo

SEQ ID NO: 44024 - DNA, 31 bp, Homo sapiens; identical to SEQ ID NO: 11667
  chr3:185498444-185498475
  hypo

SEQ ID NO: 44025 - DNA, 2 bp, Homo sapiens
  chr3:185643323-185643325
  hypo
ac

SEQ ID NO: 44026 - DNA, 31 bp, Homo sapiens; identical to SEQ ID NO: 1680
  chr3:186079334-186079365
  hypo

SEQ ID NO: 44027 - DNA, 85 bp, Homo sapiens; identical to SEQ ID NO: 1683
  chr3:186079481-186079566
  hypo

SEQ ID NO: 44028 - DNA, 44 bp, Homo sapiens; identical to SEQ ID NO: 36140
  chr3:186079578-186079622
  hypo

SEQ ID NO: 44029 - DNA, 2 bp, Homo sapiens
  chr3:186329021-186329023
  hypo
tt

SEQ ID NO: 44030 - DNA, 8 bp, Homo sapiens
  chr3:186329044-186329052
  hypo
ccactccg

SEQ ID NO: 44031 - DNA, 31 bp, Homo sapiens; identical to SEQ ID NO: 11682
  chr3:186783727-186783758
  hypo

SEQ ID NO: 44032 - DNA, 79 bp, Homo sapiens; identical to SEQ ID NO: 11683
  chr3:186783851-186783930
  hypo

SEQ ID NO: 44033 - DNA, 51 bp, Homo sapiens; identical to SEQ ID NO: 11684
  chr3:186938674-186938725
  hypo

SEQ ID NO: 44034 - DNA, 28 bp, Homo sapiens
  chr3:187455315-187455343
  hypo
caaacaccagccctgcgcgccggggcaa

SEQ ID NO: 44035 - DNA, 31 bp, Homo sapiens; identical to SEQ ID NO: 1705
  chr3:187456764-187456795
  hypo

SEQ ID NO: 44036 - DNA, 46 bp, Homo sapiens; identical to SEQ ID NO: 1706
  chr3:187456797-187456843
  hypo

SEQ ID NO: 44037 - DNA, 174 bp, Homo sapiens; identical to SEQ ID NO: 1713
  chr3:187462563-187462737
  hypo

SEQ ID NO: 44038 - DNA, 73 bp, Homo sapiens; identical to SEQ ID NO: 1714
  chr3:187462739-187462812
  hypo

SEQ ID NO: 44039 - DNA, 70 bp, Homo sapiens; identical to SEQ ID NO: 1715
  chr3:187463099-187463169
  hypo

SEQ ID NO: 44040 - DNA, 56 bp, Homo sapiens; identical to SEQ ID NO: 11693
  chr3:188070250-188070306
  hypo

SEQ ID NO: 44041 - DNA, 31 bp, Homo sapiens; identical to SEQ ID NO: 11694
  chr3:188070342-188070373
  hypo

SEQ ID NO: 44042 - DNA, 40 bp, Homo sapiens; identical to SEQ ID NO: 11695
  chr3:188070375-188070415
  hypo

SEQ ID NO: 44043 - DNA, 31 bp, Homo sapiens; identical to SEQ ID NO: 11696
  chr3:190421350-190421381
  hypo

SEQ ID NO: 44044 - DNA, 81 bp, Homo sapiens; identical to SEQ ID NO: 1716
  chr3:192635695-192635776
  hypo

SEQ ID NO: 44045 - DNA, 2 bp, Homo sapiens
  chr3:193312127-193312129
  hypo
gg

SEQ ID NO: 44046 - DNA, 6 bp, Homo sapiens
  chr3:193312208-193312214
  hypo
ctctgt

SEQ ID NO: 44047 - DNA, 2 bp, Homo sapiens
  chr3:193419608-193419610
  hypo
ag

SEQ ID NO: 44048 - DNA, 31 bp, Homo sapiens; identical to SEQ ID NO: 11700
  chr3:193438389-193438420
  hypo

SEQ ID NO: 44049 - DNA, 31 bp, Homo sapiens; identical to SEQ ID NO: 11701
  chr3:193481550-193481581
  hypo

SEQ ID NO: 44050 - DNA, 31 bp, Homo sapiens; identical to SEQ ID NO: 11702
  chr3:193481891-193481922
  hypo

SEQ ID NO: 44051 - DNA, 36 bp, Homo sapiens; identical to SEQ ID NO: 11703
  chr3:193503309-193503345
  hypo

SEQ ID NO: 44052 - DNA, 56 bp, Homo sapiens; identical to SEQ ID NO: 11704
  chr3:193505271-193505327
  hypo

SEQ ID NO: 44053 - DNA, 31 bp, Homo sapiens; identical to SEQ ID NO: 11705
  chr3:193505356-193505387
  hypo

SEQ ID NO: 44054 - DNA, 54 bp, Homo sapiens; identical to SEQ ID NO: 11706
  chr3:193505426-193505480
  hypo

SEQ ID NO: 44055 - DNA, 48 bp, Homo sapiens; identical to SEQ ID NO: 11707
  chr3:193509944-193509992
  hypo

SEQ ID NO: 44056 - DNA, 31 bp, Homo sapiens; identical to SEQ ID NO: 11709
  chr3:193577777-193577808
  hypo

SEQ ID NO: 44057 - DNA, 31 bp, Homo sapiens; identical to SEQ ID NO: 11710
  chr3:193659934-193659965
  hypo

SEQ ID NO: 44058 - DNA, 56 bp, Homo sapiens; identical to SEQ ID NO: 11711
  chr3:193659971-193660027
  hypo

SEQ ID NO: 44059 - DNA, 43 bp, Homo sapiens; identical to SEQ ID NO: 11712
  chr3:193660039-193660082
  hypo

SEQ ID NO: 44060 - DNA, 31 bp, Homo sapiens; identical to SEQ ID NO: 11713
  chr3:193663524-193663555
  hypo

SEQ ID NO: 44061 - DNA, 38 bp, Homo sapiens; identical to SEQ ID NO: 11714
  chr3:193711553-193711591
  hypo

SEQ ID NO: 44062 - DNA, 65 bp, Homo sapiens; identical to SEQ ID NO: 11715
  chr3:193711592-193711657
  hypo

SEQ ID NO: 44063 - DNA, 31 bp, Homo sapiens; identical to SEQ ID NO: 11716
  chr3:193711692-193711723
  hypo

SEQ ID NO: 44064 - DNA, 31 bp, Homo sapiens; identical to SEQ ID NO: 1720
  chr3:193721400-193721431
  hypo

SEQ ID NO: 44065 - DNA, 31 bp, Homo sapiens; identical to SEQ ID NO: 1721
  chr3:193721460-193721491
  hypo

SEQ ID NO: 44066 - DNA, 31 bp, Homo sapiens; identical to SEQ ID NO: 1723
  chr3:193721576-193721607
  hypo

SEQ ID NO: 44067 - DNA, 31 bp, Homo sapiens; identical to SEQ ID NO: 1724
  chr3:193852179-193852210
  hypo

SEQ ID NO: 44068 - DNA, 70 bp, Homo sapiens; identical to SEQ ID NO: 1725
  chr3:193852643-193852713
  hypo

SEQ ID NO: 44069 - DNA, 31 bp, Homo sapiens; identical to SEQ ID NO: 1726
  chr3:193853961-193853992
  hypo

SEQ ID NO: 44070 - DNA, 31 bp, Homo sapiens; identical to SEQ ID NO: 11723
  chr3:193940698-193940729
  hypo

SEQ ID NO: 44071 - DNA, 56 bp, Homo sapiens; identical to SEQ ID NO: 11724
  chr3:193940754-193940810
  hypo

SEQ ID NO: 44072 - DNA, 2 bp, Homo sapiens
  chr3:194048750-194048752
  hypo
ac

SEQ ID NO: 44073 - DNA, 31 bp, Homo sapiens; identical to SEQ ID NO: 11727
  chr3:194048984-194049015
  hypo

SEQ ID NO: 44074 - DNA, 63 bp, Homo sapiens; identical to SEQ ID NO: 11728
  chr3:194061693-194061756
  hypo

SEQ ID NO: 44075 - DNA, 96 bp, Homo sapiens; identical to SEQ ID NO: 11729
  chr3:194061769-194061865
  hypo

SEQ ID NO: 44076 - DNA, 54 bp, Homo sapiens; identical to SEQ ID NO: 11730
  chr3:194066804-194066858
  hypo

SEQ ID NO: 44077 - DNA, 31 bp, Homo sapiens; identical to SEQ ID NO: 11731
  chr3:194066868-194066899
  hypo

SEQ ID NO: 44078 - DNA, 98 bp, Homo sapiens; identical to SEQ ID NO: 11732
  chr3:194066909-194067007
  hypo

SEQ ID NO: 44079 - DNA, 22 bp, Homo sapiens
  chr3:194128448-194128470
  hypo
gattactcgcctagtagccttt

SEQ ID NO: 44080 - DNA, 36 bp, Homo sapiens; identical to SEQ ID NO: 11736
  chr3:194228175-194228211
  hypo

SEQ ID NO: 44081 - DNA, 31 bp, Homo sapiens; identical to SEQ ID NO: 11737
  chr3:194228227-194228258
  hypo

SEQ ID NO: 44082 - DNA, 49 bp, Homo sapiens; identical to SEQ ID NO: 11738
  chr3:194228274-194228323
  hypo

SEQ ID NO: 44083 - DNA, 31 bp, Homo sapiens; identical to SEQ ID NO: 11740
  chr3:194316727-194316758
  hypo

SEQ ID NO: 44084 - DNA, 31 bp, Homo sapiens; identical to SEQ ID NO: 11741
  chr3:194316760-194316791
  hypo

SEQ ID NO: 44085 - DNA, 37 bp, Homo sapiens; identical to SEQ ID NO: 11742
  chr3:194335589-194335626
  hypo

SEQ ID NO: 44086 - DNA, 31 bp, Homo sapiens; identical to SEQ ID NO: 11743
  chr3:194338061-194338092
  hypo

SEQ ID NO: 44087 - DNA, 35 bp, Homo sapiens; identical to SEQ ID NO: 11744
  chr3:194341459-194341494
  hypo

SEQ ID NO: 44088 - DNA, 31 bp, Homo sapiens; identical to SEQ ID NO: 11745
  chr3:194344004-194344035
  hypo

SEQ ID NO: 44089 - DNA, 110 bp, Homo sapiens; identical to SEQ ID NO: 1731
  chr3:194353931-194354041
  hypo

SEQ ID NO: 44090 - DNA, 42 bp, Homo sapiens; identical to SEQ ID NO: 1732
  chr3:194354210-194354252
  hypo

SEQ ID NO: 44091 - DNA, 42 bp, Homo sapiens; identical to SEQ ID NO: 1733
  chr3:194354405-194354447
  hypo

SEQ ID NO: 44092 - DNA, 42 bp, Homo sapiens; identical to SEQ ID NO: 1734
  chr3:194354461-194354503
  hypo

SEQ ID NO: 44093 - DNA, 31 bp, Homo sapiens; identical to SEQ ID NO: 11750
  chr3:194365665-194365696
  hypo

SEQ ID NO: 44094 - DNA, 31 bp, Homo sapiens; identical to SEQ ID NO: 11751
  chr3:194365702-194365733
  hypo

SEQ ID NO: 44095 - DNA, 31 bp, Homo sapiens; identical to SEQ ID NO: 11752
  chr3:194365736-194365767
  hypo

SEQ ID NO: 44096 - DNA, 40 bp, Homo sapiens; identical to SEQ ID NO: 11753
  chr3:194365801-194365841
  hypo

SEQ ID NO: 44097 - DNA, 31 bp, Homo sapiens; identical to SEQ ID NO: 11754
  chr3:194365842-194365873
  hypo

SEQ ID NO: 44098 - DNA, 31 bp, Homo sapiens; identical to SEQ ID NO: 11756
  chr3:194431442-194431473
  hypo

SEQ ID NO: 44099 - DNA, 77 bp, Homo sapiens; identical to SEQ ID NO: 11757
  chr3:194558267-194558344
  hypo

SEQ ID NO: 44100 - DNA, 50 bp, Homo sapiens; identical to SEQ ID NO: 11758
  chr3:194596887-194596937
  hypo

SEQ ID NO: 44101 - DNA, 60 bp, Homo sapiens; identical to SEQ ID NO: 11759
  chr3:194596981-194597041
  hypo

SEQ ID NO: 44102 - DNA, 31 bp, Homo sapiens; identical to SEQ ID NO: 11760
  chr3:194597043-194597074
  hypo

SEQ ID NO: 44103 - DNA, 31 bp, Homo sapiens; identical to SEQ ID NO: 1739
  chr3:194602924-194602955
  hypo

SEQ ID NO: 44104 - DNA, 41 bp, Homo sapiens; identical to SEQ ID NO: 11762
  chr3:194669149-194669190
  hypo

SEQ ID NO: 44105 - DNA, 31 bp, Homo sapiens; identical to SEQ ID NO: 11763
  chr3:194669205-194669236
  hypo

SEQ ID NO: 44106 - DNA, 38 bp, Homo sapiens; identical to SEQ ID NO: 11764
  chr3:194669296-194669334
  hypo

SEQ ID NO: 44107 - DNA, 31 bp, Homo sapiens; identical to SEQ ID NO: 11765
  chr3:194670887-194670918
  hypo

SEQ ID NO: 44108 - DNA, 31 bp, Homo sapiens; identical to SEQ ID NO: 11767
  chr3:194755642-194755673
  hypo

SEQ ID NO: 44109 - DNA, 64 bp, Homo sapiens; identical to SEQ ID NO: 11768
  chr3:194766333-194766397
  hypo

SEQ ID NO: 44110 - DNA, 49 bp, Homo sapiens; identical to SEQ ID NO: 11769
  chr3:194783224-194783273
  hypo

SEQ ID NO: 44111 - DNA, 31 bp, Homo sapiens; identical to SEQ ID NO: 11770
  chr3:194790031-194790062
  hypo

SEQ ID NO: 44112 - DNA, 31 bp, Homo sapiens; identical to SEQ ID NO: 11771
  chr3:194790285-194790316
  hypo

SEQ ID NO: 44113 - DNA, 45 bp, Homo sapiens; identical to SEQ ID NO: 11772
  chr3:194790325-194790370
  hypo

SEQ ID NO: 44114 - DNA, 104 bp, Homo sapiens; identical to SEQ ID NO: 11773
  chr3:194790634-194790738
  hypo

SEQ ID NO: 44115 - DNA, 42 bp, Homo sapiens; identical to SEQ ID NO: 11774
  chr3:194790751-194790793
  hypo

SEQ ID NO: 44116 - DNA, 53 bp, Homo sapiens; identical to SEQ ID NO: 11775
  chr3:194793569-194793622
  hypo

SEQ ID NO: 44117 - DNA, 31 bp, Homo sapiens; identical to SEQ ID NO: 11776
  chr3:194798290-194798321
  hypo

SEQ ID NO: 44118 - DNA, 39 bp, Homo sapiens; identical to SEQ ID NO: 11777
  chr3:194799661-194799700
  hypo

SEQ ID NO: 44119 - DNA, 31 bp, Homo sapiens; identical to SEQ ID NO: 11778
  chr3:194817220-194817251
  hypo

SEQ ID NO: 44120 - DNA, 62 bp, Homo sapiens; identical to SEQ ID NO: 11779
  chr3:194825298-194825360
  hypo

SEQ ID NO: 44121 - DNA, 31 bp, Homo sapiens; identical to SEQ ID NO: 11780
  chr3:194825431-194825462
  hypo

SEQ ID NO: 44122 - DNA, 47 bp, Homo sapiens; identical to SEQ ID NO: 11781
  chr3:194832847-194832894
  hypo

SEQ ID NO: 44123 - DNA, 60 bp, Homo sapiens; identical to SEQ ID NO: 11782
  chr3:194832912-194832972
  hypo

SEQ ID NO: 44124 - DNA, 31 bp, Homo sapiens; identical to SEQ ID NO: 11783
  chr3:194841585-194841616
  hypo

SEQ ID NO: 44125 - DNA, 31 bp, Homo sapiens; identical to SEQ ID NO: 11784
  chr3:194841831-194841862
  hypo

SEQ ID NO: 44126 - DNA, 31 bp, Homo sapiens; identical to SEQ ID NO: 11785
  chr3:194863436-194863467
  hypo

SEQ ID NO: 44127 - DNA, 167 bp, Homo sapiens; identical to SEQ ID NO: 11786
  chr3:194866033-194866200
  hypo

SEQ ID NO: 44128 - DNA, 31 bp, Homo sapiens; identical to SEQ ID NO: 11787
  chr3:194866459-194866490
  hypo

SEQ ID NO: 44129 - DNA, 31 bp, Homo sapiens; identical to SEQ ID NO: 11789
  chr3:194896168-194896199
  hypo

SEQ ID NO: 44130 - DNA, 31 bp, Homo sapiens; identical to SEQ ID NO: 11791
  chr3:194933211-194933242
  hypo

SEQ ID NO: 44131 - DNA, 31 bp, Homo sapiens; identical to SEQ ID NO: 11792
  chr3:194935162-194935193
  hypo

SEQ ID NO: 44132 - DNA, 31 bp, Homo sapiens; identical to SEQ ID NO: 11793
  chr3:194935234-194935265
  hypo

SEQ ID NO: 44133 - DNA, 31 bp, Homo sapiens; identical to SEQ ID NO: 11794
  chr3:194935284-194935315
  hypo

SEQ ID NO: 44134 - DNA, 80 bp, Homo sapiens; identical to SEQ ID NO: 1740
  chr3:194980431-194980511
  hypo

SEQ ID NO: 44135 - DNA, 70 bp, Homo sapiens; identical to SEQ ID NO: 11796
  chr3:195058609-195058679
  hypo

SEQ ID NO: 44136 - DNA, 31 bp, Homo sapiens; identical to SEQ ID NO: 11797
  chr3:195176385-195176416
  hypo

SEQ ID NO: 44137 - DNA, 68 bp, Homo sapiens; identical to SEQ ID NO: 11798
  chr3:195448189-195448257
  hypo

SEQ ID NO: 44138 - DNA, 57 bp, Homo sapiens; identical to SEQ ID NO: 11799
  chr3:195448259-195448316
  hypo

SEQ ID NO: 44139 - DNA, 31 bp, Homo sapiens; identical to SEQ ID NO: 11800
  chr3:195540175-195540206
  hypo

SEQ ID NO: 44140 - DNA, 31 bp, Homo sapiens; identical to SEQ ID NO: 11801
  chr3:195544692-195544723
  hypo

SEQ ID NO: 44141 - DNA, 52 bp, Homo sapiens; identical to SEQ ID NO: 11802
  chr3:195573452-195573504
  hypo

SEQ ID NO: 44142 - DNA, 64 bp, Homo sapiens; identical to SEQ ID NO: 11803
  chr3:195573517-195573581
  hypo

SEQ ID NO: 44143 - DNA, 31 bp, Homo sapiens; identical to SEQ ID NO: 11804
  chr3:195573603-195573634
  hypo

SEQ ID NO: 44144 - DNA, 48 bp, Homo sapiens; identical to SEQ ID NO: 11806
  chr3:195591688-195591736
  hypo

SEQ ID NO: 44145 - DNA, 36 bp, Homo sapiens; identical to SEQ ID NO: 11807
  chr3:195591740-195591776
  hypo

SEQ ID NO: 44146 - DNA, 31 bp, Homo sapiens; identical to SEQ ID NO: 11808
  chr3:195592095-195592126
  hypo

SEQ ID NO: 44147 - DNA, 31 bp, Homo sapiens; identical to SEQ ID NO: 11809
  chr3:195592130-195592161
  hypo

SEQ ID NO: 44148 - DNA, 31 bp, Homo sapiens; identical to SEQ ID NO: 11810
  chr3:195597365-195597396
  hypo

SEQ ID NO: 44149 - DNA, 2 bp, Homo sapiens
  chr3:195600085-195600087
  hypo
cc

SEQ ID NO: 44150 - DNA, 30 bp, Homo sapiens
  chr3:195602576-195602606
  hypo
gccagggctgctacccggccgtgactgaag

SEQ ID NO: 44151 - DNA, 2 bp, Homo sapiens
  chr3:195603846-195603848
  hypo
ag

SEQ ID NO: 44152 - DNA, 31 bp, Homo sapiens; identical to SEQ ID NO: 11820
  chr3:195603965-195603996
  hypo

SEQ ID NO: 44153 - DNA, 17 bp, Homo sapiens
  chr3:195637215-195637232
  hypo
gaaggagaaaacccagc

SEQ ID NO: 44154 - DNA, 2 bp, Homo sapiens
  chr3:195648721-195648723
  hypo
aa

SEQ ID NO: 44155 - DNA, 31 bp, Homo sapiens; identical to SEQ ID NO: 1741
  chr3:195809081-195809112
  hypo

SEQ ID NO: 44156 - DNA, 36 bp, Homo sapiens; identical to SEQ ID NO: 11826
  chr3:195901886-195901922
  hypo

SEQ ID NO: 44157 - DNA, 31 bp, Homo sapiens; identical to SEQ ID NO: 11834
  chr3:196199258-196199289
  hypo

SEQ ID NO: 44158 - DNA, 31 bp, Homo sapiens; identical to SEQ ID NO: 11835
  chr3:196199470-196199501
  hypo

SEQ ID NO: 44159 - DNA, 1 bp, Homo sapiens
  chr3:196386790-196386791
  hypo
c

SEQ ID NO: 44160 - DNA, 36 bp, Homo sapiens; identical to SEQ ID NO: 11842
  chr3:196387837-196387873
  hypo

SEQ ID NO: 44161 - DNA, 31 bp, Homo sapiens; identical to SEQ ID NO: 11847
  chr3:196719326-196719357
  hypo

SEQ ID NO: 44162 - DNA, 31 bp, Homo sapiens; identical to SEQ ID NO: 11850
  chr3:196766011-196766042
  hypo

SEQ ID NO: 44163 - DNA, 21 bp, Homo sapiens
  chr3:196766099-196766120
  hypo
taagccacaccccaaacgcta

SEQ ID NO: 44164 - DNA, 31 bp, Homo sapiens; identical to SEQ ID NO: 11852
  chr3:196766250-196766281
  hypo

SEQ ID NO: 44165 - DNA, 31 bp, Homo sapiens; identical to SEQ ID NO: 11853
  chr3:197127485-197127516
  hypo

SEQ ID NO: 44166 - DNA, 31 bp, Homo sapiens; identical to SEQ ID NO: 11854
  chr3:197133968-197133999
  hypo

SEQ ID NO: 44167 - DNA, 31 bp, Homo sapiens; identical to SEQ ID NO: 11855
  chr3:197152284-197152315
  hypo

SEQ ID NO: 44168 - DNA, 31 bp, Homo sapiens; identical to SEQ ID NO: 11856
  chr3:197152328-197152359
  hypo

SEQ ID NO: 44169 - DNA, 31 bp, Homo sapiens; identical to SEQ ID NO: 11857
  chr3:197161832-197161863
  hypo

SEQ ID NO: 44170 - DNA, 31 bp, Homo sapiens; identical to SEQ ID NO: 11858
  chr3:197216364-197216395
  hypo

SEQ ID NO: 44171 - DNA, 36 bp, Homo sapiens; identical to SEQ ID NO: 11859
  chr3:197216423-197216459
  hypo

SEQ ID NO: 44172 - DNA, 37 bp, Homo sapiens; identical to SEQ ID NO: 1742
  chr3:197222651-197222688
  hypo

SEQ ID NO: 44173 - DNA, 31 bp, Homo sapiens; identical to SEQ ID NO: 1743
  chr3:197222713-197222744
  hypo

SEQ ID NO: 44174 - DNA, 16 bp, Homo sapiens
  chr3:197313925-197313941
  hypo
ccgtctctactaaaaa

SEQ ID NO: 44175 - DNA, 31 bp, Homo sapiens; identical to SEQ ID NO: 11865
  chr3:197435285-197435316
  hypo

SEQ ID NO: 44176 - DNA, 31 bp, Homo sapiens; identical to SEQ ID NO: 11866
  chr3:197459517-197459548
  hypo

SEQ ID NO: 44177 - DNA, 31 bp, Homo sapiens; identical to SEQ ID NO: 11868
  chr3:197726425-197726456
  hypo

SEQ ID NO: 44178 - DNA, 31 bp, Homo sapiens; identical to SEQ ID NO: 11869
  chr3:197726474-197726505
  hypo

SEQ ID NO: 44179 - DNA, 45 bp, Homo sapiens; identical to SEQ ID NO: 11871
  chr3:197764837-197764882
  hypo

SEQ ID NO: 44180 - DNA, 31 bp, Homo sapiens; identical to SEQ ID NO: 11872
  chr3:197764902-197764933
  hypo

SEQ ID NO: 44181 - DNA, 31 bp, Homo sapiens; identical to SEQ ID NO: 11873
  chr3:197764939-197764970
  hypo

SEQ ID NO: 44182 - DNA, 31 bp, Homo sapiens; identical to SEQ ID NO: 11874
  chr3:197764990-197765021
  hypo

SEQ ID NO: 44183 - DNA, 2 bp, Homo sapiens
  chr4:513703-513705
  hypo
gg

SEQ ID NO: 44184 - DNA, 31 bp, Homo sapiens; identical to SEQ ID NO: 11876
  chr4:623248-623279
  hypo

SEQ ID NO: 44185 - DNA, 31 bp, Homo sapiens; identical to SEQ ID NO: 11878
  chr4:651353-651384
  hypo

SEQ ID NO: 44186 - DNA, 55 bp, Homo sapiens; identical to SEQ ID NO: 1745
  chr4:667711-667766
  hypo

SEQ ID NO: 44187 - DNA, 31 bp, Homo sapiens; identical to SEQ ID NO: 1746
  chr4:699369-699400
  hypo

SEQ ID NO: 44188 - DNA, 45 bp, Homo sapiens; identical to SEQ ID NO: 11881
  chr4:708089-708134
  hypo

SEQ ID NO: 44189 - DNA, 2 bp, Homo sapiens
  chr4:718160-718162
  hypo
gg

SEQ ID NO: 44190 - DNA, 31 bp, Homo sapiens; identical to SEQ ID NO: 11883
  chr4:718960-718991
  hypo

SEQ ID NO: 44191 - DNA, 16 bp, Homo sapiens
  chr4:757281-757297
  hypo
tacatgatcagggaaa

SEQ ID NO: 44192 - DNA, 11 bp, Homo sapiens
  chr4:757326-757337
  hypo
accccatagaa

SEQ ID NO: 44193 - DNA, 31 bp, Homo sapiens; identical to SEQ ID NO: 11887
  chr4:757352-757383
  hypo

SEQ ID NO: 44194 - DNA, 31 bp, Homo sapiens; identical to SEQ ID NO: 11888
  chr4:760152-760183
  hypo

SEQ ID NO: 44195 - DNA, 44 bp, Homo sapiens; identical to SEQ ID NO: 11889
  chr4:765528-765572
  hypo

SEQ ID NO: 44196 - DNA, 31 bp, Homo sapiens; identical to SEQ ID NO: 11890
  chr4:765627-765658
  hypo

SEQ ID NO: 44197 - DNA, 36 bp, Homo sapiens; identical to SEQ ID NO: 11891
  chr4:765703-765739
  hypo

SEQ ID NO: 44198 - DNA, 35 bp, Homo sapiens; identical to SEQ ID NO: 11892
  chr4:793058-793093
  hypo

SEQ ID NO: 44199 - DNA, 57 bp, Homo sapiens; identical to SEQ ID NO: 11894
  chr4:793730-793787
  hypo

SEQ ID NO: 44200 - DNA, 45 bp, Homo sapiens; identical to SEQ ID NO: 1749
  chr4:819689-819734
  hypo

SEQ ID NO: 44201 - DNA, 31 bp, Homo sapiens; identical to SEQ ID NO: 11896
  chr4:852609-852640
  hypo

SEQ ID NO: 44202 - DNA, 37 bp, Homo sapiens; identical to SEQ ID NO: 11897
  chr4:877547-877584
  hypo

SEQ ID NO: 44203 - DNA, 52 bp, Homo sapiens; identical to SEQ ID NO: 11898
  chr4:877607-877659
  hypo

SEQ ID NO: 44204 - DNA, 39 bp, Homo sapiens; identical to SEQ ID NO: 11899
  chr4:881387-881426
  hypo

SEQ ID NO: 44205 - DNA, 35 bp, Homo sapiens; identical to SEQ ID NO: 11900
  chr4:887621-887656
  hypo

SEQ ID NO: 44206 - DNA, 2 bp, Homo sapiens
  chr4:905869-905871
  hypo
cc

SEQ ID NO: 44207 - DNA, 37 bp, Homo sapiens; identical to SEQ ID NO: 11902
  chr4:907578-907615
  hypo

SEQ ID NO: 44208 - DNA, 31 bp, Homo sapiens; identical to SEQ ID NO: 11903
  chr4:942935-942966
  hypo

SEQ ID NO: 44209 - DNA, 42 bp, Homo sapiens; identical to SEQ ID NO: 11904
  chr4:949384-949426
  hypo

SEQ ID NO: 44210 - DNA, 31 bp, Homo sapiens; identical to SEQ ID NO: 11907
  chr4:957057-957088
  hypo

SEQ ID NO: 44211 - DNA, 31 bp, Homo sapiens; identical to SEQ ID NO: 11908
  chr4:957267-957298
  hypo

SEQ ID NO: 44212 - DNA, 31 bp, Homo sapiens; identical to SEQ ID NO: 11909
  chr4:958712-958743
  hypo

SEQ ID NO: 44213 - DNA, 31 bp, Homo sapiens; identical to SEQ ID NO: 1750
  chr4:966932-966963
  hypo

SEQ ID NO: 44214 - DNA, 31 bp, Homo sapiens; identical to SEQ ID NO: 1751
  chr4:966986-967017
  hypo

SEQ ID NO: 44215 - DNA, 34 bp, Homo sapiens; identical to SEQ ID NO: 1752
  chr4:967208-967242
  hypo

SEQ ID NO: 44216 - DNA, 31 bp, Homo sapiens; identical to SEQ ID NO: 1753
  chr4:1004428-1004459
  hypo

SEQ ID NO: 44217 - DNA, 31 bp, Homo sapiens; identical to SEQ ID NO: 1754
  chr4:1004480-1004511
  hypo

SEQ ID NO: 44218 - DNA, 31 bp, Homo sapiens; identical to SEQ ID NO: 11915
  chr4:1032331-1032362
  hypo

SEQ ID NO: 44219 - DNA, 31 bp, Homo sapiens; identical to SEQ ID NO: 1756
  chr4:1036591-1036622
  hypo

SEQ ID NO: 44220 - DNA, 49 bp, Homo sapiens; identical to SEQ ID NO: 11918
  chr4:1044604-1044653
  hypo

SEQ ID NO: 44221 - DNA, 31 bp, Homo sapiens; identical to SEQ ID NO: 11919
  chr4:1077031-1077062
  hypo

SEQ ID NO: 44222 - DNA, 2 bp, Homo sapiens
  chr4:1189020-1189022
  hypo
ct

SEQ ID NO: 44223 - DNA, 14 bp, Homo sapiens
  chr4:1189100-1189114
  hypo
gctctcccccatcc

SEQ ID NO: 44224 - DNA, 43 bp, Homo sapiens; identical to SEQ ID NO: 11921
  chr4:1201009-1201052
  hypo

SEQ ID NO: 44225 - DNA, 31 bp, Homo sapiens; identical to SEQ ID NO: 11922
  chr4:1222995-1223026
  hypo

SEQ ID NO: 44226 - DNA, 31 bp, Homo sapiens; identical to SEQ ID NO: 11923
  chr4:1223049-1223080
  hypo

SEQ ID NO: 44227 - DNA, 70 bp, Homo sapiens; identical to SEQ ID NO: 11924
  chr4:1223145-1223215
  hypo

SEQ ID NO: 44228 - DNA, 31 bp, Homo sapiens; identical to SEQ ID NO: 11925
  chr4:1225294-1225325
  hypo

SEQ ID NO: 44229 - DNA, 31 bp, Homo sapiens; identical to SEQ ID NO: 11926
  chr4:1233071-1233102
  hypo

SEQ ID NO: 44230 - DNA, 2 bp, Homo sapiens
  chr4:1282472-1282474
  hypo
at

SEQ ID NO: 44231 - DNA, 2 bp, Homo sapiens
  chr4:1299055-1299057
  hypo
gg

SEQ ID NO: 44232 - DNA, 31 bp, Homo sapiens; identical to SEQ ID NO: 11934
  chr4:1309979-1310010
  hypo

SEQ ID NO: 44233 - DNA, 31 bp, Homo sapiens; identical to SEQ ID NO: 1757
  chr4:1310814-1310845
  hypo

SEQ ID NO: 44234 - DNA, 33 bp, Homo sapiens; identical to SEQ ID NO: 11936
  chr4:1326207-1326240
  hypo

SEQ ID NO: 44235 - DNA, 2 bp, Homo sapiens
  chr4:1331674-1331676
  hypo
ca

SEQ ID NO: 44236 - DNA, 55 bp, Homo sapiens; identical to SEQ ID NO: 36188
  chr4:1332660-1332715
  hypo

SEQ ID NO: 44237 - DNA, 2 bp, Homo sapiens
  chr4:1332877-1332879
  hypo
gt

SEQ ID NO: 44238 - DNA, 34 bp, Homo sapiens; identical to SEQ ID NO: 11945
  chr4:1338813-1338847
  hypo

SEQ ID NO: 44239 - DNA, 31 bp, Homo sapiens; identical to SEQ ID NO: 11946
  chr4:1338848-1338879
  hypo

SEQ ID NO: 44240 - DNA, 54 bp, Homo sapiens; identical to SEQ ID NO: 11949
  chr4:1621568-1621622
  hypo

SEQ ID NO: 44241 - DNA, 31 bp, Homo sapiens; identical to SEQ ID NO: 11950
  chr4:1640681-1640712
  hypo

SEQ ID NO: 44242 - DNA, 46 bp, Homo sapiens; identical to SEQ ID NO: 11951
  chr4:1642969-1643015
  hypo

SEQ ID NO: 44243 - DNA, 31 bp, Homo sapiens; identical to SEQ ID NO: 11952
  chr4:1658843-1658874
  hypo

SEQ ID NO: 44244 - DNA, 47 bp, Homo sapiens; identical to SEQ ID NO: 11953
  chr4:1658896-1658943
  hypo

SEQ ID NO: 44245 - DNA, 31 bp, Homo sapiens; identical to SEQ ID NO: 11954
  chr4:1672853-1672884
  hypo

SEQ ID NO: 44246 - DNA, 131 bp, Homo sapiens; identical to SEQ ID NO: 11955
  chr4:1673035-1673166
  hypo

SEQ ID NO: 44247 - DNA, 149 bp, Homo sapiens; identical to SEQ ID NO: 11958
  chr4:1763038-1763187
  hypo

SEQ ID NO: 44248 - DNA, 31 bp, Homo sapiens; identical to SEQ ID NO: 11959
  chr4:1764446-1764477
  hypo

SEQ ID NO: 44249 - DNA, 31 bp, Homo sapiens; identical to SEQ ID NO: 11960
  chr4:1780620-1780651
  hypo

SEQ ID NO: 44250 - DNA, 31 bp, Homo sapiens; identical to SEQ ID NO: 11961
  chr4:1781227-1781258
  hypo

SEQ ID NO: 44251 - DNA, 67 bp, Homo sapiens; identical to SEQ ID NO: 11962
  chr4:1781291-1781358
  hypo

SEQ ID NO: 44252 - DNA, 31 bp, Homo sapiens; identical to SEQ ID NO: 11963
  chr4:1781373-1781404
  hypo

SEQ ID NO: 44253 - DNA, 31 bp, Homo sapiens; identical to SEQ ID NO: 11964
  chr4:1782912-1782943
  hypo

SEQ ID NO: 44254 - DNA, 31 bp, Homo sapiens; identical to SEQ ID NO: 11965
  chr4:1782945-1782976
  hypo

SEQ ID NO: 44255 - DNA, 59 bp, Homo sapiens; identical to SEQ ID NO: 11966
  chr4:1787675-1787734
  hypo

SEQ ID NO: 44256 - DNA, 84 bp, Homo sapiens; identical to SEQ ID NO: 1761
  chr4:1794972-1795056
  hypo

SEQ ID NO: 44257 - DNA, 172 bp, Homo sapiens; identical to SEQ ID NO: 1762
  chr4:1795075-1795247
  hypo

SEQ ID NO: 44258 - DNA, 31 bp, Homo sapiens; identical to SEQ ID NO: 1763
  chr4:1795283-1795314
  hypo

SEQ ID NO: 44259 - DNA, 35 bp, Homo sapiens; identical to SEQ ID NO: 1764
  chr4:1795555-1795590
  hypo

SEQ ID NO: 44260 - DNA, 526 bp, Homo sapiens; identical to SEQ ID NO: 36193
  chr4:1795964-1796490
  hypo

SEQ ID NO: 44261 - DNA, 62 bp, Homo sapiens; identical to SEQ ID NO: 11973
  chr4:1801891-1801953
  hypo

SEQ ID NO: 44262 - DNA, 31 bp, Homo sapiens; identical to SEQ ID NO: 11974
  chr4:1840860-1840891
  hypo

SEQ ID NO: 44263 - DNA, 62 bp, Homo sapiens; identical to SEQ ID NO: 11975
  chr4:1955050-1955112
  hypo

SEQ ID NO: 44264 - DNA, 31 bp, Homo sapiens; identical to SEQ ID NO: 11977
  chr4:1977183-1977214
  hypo

SEQ ID NO: 44265 - DNA, 31 bp, Homo sapiens; identical to SEQ ID NO: 11978
  chr4:1993650-1993681
  hypo

SEQ ID NO: 44266 - DNA, 2 bp, Homo sapiens
  chr4:1993714-1993716
  hypo
gg

SEQ ID NO: 44267 - DNA, 18 bp, Homo sapiens
  chr4:1999768-1999786
  hypo
aagagggacatgactacg

SEQ ID NO: 44268 - DNA, 31 bp, Homo sapiens; identical to SEQ ID NO: 11988
  chr4:2171163-2171194
  hypo

SEQ ID NO: 44269 - DNA, 52 bp, Homo sapiens; identical to SEQ ID NO: 11991
  chr4:2337322-2337374
  hypo

SEQ ID NO: 44270 - DNA, 31 bp, Homo sapiens; identical to SEQ ID NO: 11992
  chr4:2339950-2339981
  hypo

SEQ ID NO: 44271 - DNA, 31 bp, Homo sapiens; identical to SEQ ID NO: 11993
  chr4:2353586-2353617
  hypo

SEQ ID NO: 44272 - DNA, 31 bp, Homo sapiens; identical to SEQ ID NO: 11994
  chr4:2361256-2361287
  hypo

SEQ ID NO: 44273 - DNA, 31 bp, Homo sapiens; identical to SEQ ID NO: 11995
  chr4:2362274-2362305
  hypo

SEQ ID NO: 44274 - DNA, 31 bp, Homo sapiens; identical to SEQ ID NO: 11996
  chr4:2387539-2387570
  hypo

SEQ ID NO: 44275 - DNA, 31 bp, Homo sapiens; identical to SEQ ID NO: 11997
  chr4:2411285-2411316
  hypo

SEQ ID NO: 44276 - DNA, 31 bp, Homo sapiens; identical to SEQ ID NO: 11998
  chr4:2426868-2426899
  hypo

SEQ ID NO: 44277 - DNA, 45 bp, Homo sapiens; identical to SEQ ID NO: 11999
  chr4:2427612-2427657
  hypo

SEQ ID NO: 44278 - DNA, 31 bp, Homo sapiens; identical to SEQ ID NO: 12001
  chr4:2459909-2459940
  hypo

SEQ ID NO: 44279 - DNA, 31 bp, Homo sapiens; identical to SEQ ID NO: 12002
  chr4:2459964-2459995
  hypo

SEQ ID NO: 44280 - DNA, 31 bp, Homo sapiens; identical to SEQ ID NO: 12005
  chr4:2571129-2571160
  hypo

SEQ ID NO: 44281 - DNA, 31 bp, Homo sapiens; identical to SEQ ID NO: 12006
  chr4:2639920-2639951
  hypo

SEQ ID NO: 44282 - DNA, 86 bp, Homo sapiens; identical to SEQ ID NO: 12007
  chr4:2639954-2640040
  hypo

SEQ ID NO: 44283 - DNA, 31 bp, Homo sapiens; identical to SEQ ID NO: 12008
  chr4:2733979-2734010
  hypo

SEQ ID NO: 44284 - DNA, 50 bp, Homo sapiens; identical to SEQ ID NO: 12011
  chr4:2926415-2926465
  hypo

SEQ ID NO: 44285 - DNA, 39 bp, Homo sapiens; identical to SEQ ID NO: 12012
  chr4:2957243-2957282
  hypo

SEQ ID NO: 44286 - DNA, 39 bp, Homo sapiens; identical to SEQ ID NO: 12014
  chr4:3267991-3268030
  hypo

SEQ ID NO: 44287 - DNA, 31 bp, Homo sapiens; identical to SEQ ID NO: 12015
  chr4:3310788-3310819
  hypo

SEQ ID NO: 44288 - DNA, 31 bp, Homo sapiens; identical to SEQ ID NO: 12016
  chr4:3363136-3363167
  hypo

SEQ ID NO: 44289 - DNA, 35 bp, Homo sapiens; identical to SEQ ID NO: 12017
  chr4:3368269-3368304
  hypo

SEQ ID NO: 44290 - DNA, 38 bp, Homo sapiens; identical to SEQ ID NO: 12018
  chr4:3375343-3375381
  hypo

SEQ ID NO: 44291 - DNA, 50 bp, Homo sapiens; identical to SEQ ID NO: 12019
  chr4:3375393-3375443
  hypo

SEQ ID NO: 44292 - DNA, 31 bp, Homo sapiens; identical to SEQ ID NO: 12020
  chr4:3413101-3413132
  hypo

SEQ ID NO: 44293 - DNA, 47 bp, Homo sapiens; identical to SEQ ID NO: 12021
  chr4:3418656-3418703
  hypo

SEQ ID NO: 44294 - DNA, 47 bp, Homo sapiens; identical to SEQ ID NO: 12022
  chr4:3418710-3418757
  hypo

SEQ ID NO: 44295 - DNA, 73 bp, Homo sapiens; identical to SEQ ID NO: 12023
  chr4:3425118-3425191
  hypo

SEQ ID NO: 44296 - DNA, 39 bp, Homo sapiens; identical to SEQ ID NO: 12024
  chr4:3425239-3425278
  hypo

SEQ ID NO: 44297 - DNA, 36 bp, Homo sapiens; identical to SEQ ID NO: 12025
  chr4:3425282-3425318
  hypo

SEQ ID NO: 44298 - DNA, 50 bp, Homo sapiens; identical to SEQ ID NO: 12026
  chr4:3448499-3448549
  hypo

SEQ ID NO: 44299 - DNA, 31 bp, Homo sapiens; identical to SEQ ID NO: 12028
  chr4:3453080-3453111
  hypo

SEQ ID NO: 44300 - DNA, 31 bp, Homo sapiens; identical to SEQ ID NO: 12029
  chr4:3468343-3468374
  hypo

SEQ ID NO: 44301 - DNA, 31 bp, Homo sapiens; identical to SEQ ID NO: 12030
  chr4:3516337-3516368
  hypo

SEQ ID NO: 44302 - DNA, 62 bp, Homo sapiens; identical to SEQ ID NO: 12031
  chr4:3588427-3588489
  hypo

SEQ ID NO: 44303 - DNA, 38 bp, Homo sapiens; identical to SEQ ID NO: 12032
  chr4:3588492-3588530
  hypo

SEQ ID NO: 44304 - DNA, 31 bp, Homo sapiens; identical to SEQ ID NO: 12033
  chr4:3588547-3588578
  hypo

SEQ ID NO: 44305 - DNA, 31 bp, Homo sapiens; identical to SEQ ID NO: 12034
  chr4:3671160-3671191
  hypo

SEQ ID NO: 44306 - DNA, 31 bp, Homo sapiens; identical to SEQ ID NO: 12035
  chr4:3692094-3692125
  hypo

SEQ ID NO: 44307 - DNA, 2 bp, Homo sapiens
  chr4:3782693-3782695
  hypo
ca

SEQ ID NO: 44308 - DNA, 44 bp, Homo sapiens; identical to SEQ ID NO: 12037
  chr4:3810693-3810737
  hypo

SEQ ID NO: 44309 - DNA, 31 bp, Homo sapiens; identical to SEQ ID NO: 12038
  chr4:3826670-3826701
  hypo

SEQ ID NO: 44310 - DNA, 31 bp, Homo sapiens; identical to SEQ ID NO: 12039
  chr4:3949947-3949978
  hypo

SEQ ID NO: 44311 - DNA, 31 bp, Homo sapiens; identical to SEQ ID NO: 12040
  chr4:3951479-3951510
  hypo

SEQ ID NO: 44312 - DNA, 31 bp, Homo sapiens; identical to SEQ ID NO: 12041
  chr4:4199685-4199716
  hypo

SEQ ID NO: 44313 - DNA, 31 bp, Homo sapiens; identical to SEQ ID NO: 12043
  chr4:5448003-5448034
  hypo

SEQ ID NO: 44314 - DNA, 31 bp, Homo sapiens; identical to SEQ ID NO: 12044
  chr4:5753889-5753920
  hypo

SEQ ID NO: 44315 - DNA, 37 bp, Homo sapiens; identical to SEQ ID NO: 1780
  chr4:6271358-6271395
  hypo

SEQ ID NO: 44316 - DNA, 39 bp, Homo sapiens; identical to SEQ ID NO: 1781
  chr4:6271572-6271611
  hypo

SEQ ID NO: 44317 - DNA, 52 bp, Homo sapiens; identical to SEQ ID NO: 1782
  chr4:6271619-6271671
  hypo

SEQ ID NO: 44318 - DNA, 248 bp, Homo sapiens; identical to SEQ ID NO: 1783
  chr4:6271702-6271950
  hypo

SEQ ID NO: 44319 - DNA, 31 bp, Homo sapiens; identical to SEQ ID NO: 12049
  chr4:6374029-6374060
  hypo

SEQ ID NO: 44320 - DNA, 31 bp, Homo sapiens; identical to SEQ ID NO: 12050
  chr4:6423229-6423260
  hypo

SEQ ID NO: 44321 - DNA, 31 bp, Homo sapiens; identical to SEQ ID NO: 12051
  chr4:6580165-6580196
  hypo

SEQ ID NO: 44322 - DNA, 31 bp, Homo sapiens; identical to SEQ ID NO: 12052
  chr4:6586517-6586548
  hypo

SEQ ID NO: 44323 - DNA, 31 bp, Homo sapiens; identical to SEQ ID NO: 12053
  chr4:6586549-6586580
  hypo

SEQ ID NO: 44324 - DNA, 31 bp, Homo sapiens; identical to SEQ ID NO: 12054
  chr4:6586598-6586629
  hypo

SEQ ID NO: 44325 - DNA, 55 bp, Homo sapiens; identical to SEQ ID NO: 12055
  chr4:6586645-6586700
  hypo

SEQ ID NO: 44326 - DNA, 31 bp, Homo sapiens; identical to SEQ ID NO: 12056
  chr4:6588842-6588873
  hypo

SEQ ID NO: 44327 - DNA, 41 bp, Homo sapiens; identical to SEQ ID NO: 12057
  chr4:6590874-6590915
  hypo

SEQ ID NO: 44328 - DNA, 31 bp, Homo sapiens; identical to SEQ ID NO: 12058
  chr4:6600202-6600233
  hypo

SEQ ID NO: 44329 - DNA, 31 bp, Homo sapiens; identical to SEQ ID NO: 12059
  chr4:6600600-6600631
  hypo

SEQ ID NO: 44330 - DNA, 31 bp, Homo sapiens; identical to SEQ ID NO: 12060
  chr4:6600761-6600792
  hypo

SEQ ID NO: 44331 - DNA, 95 bp, Homo sapiens; identical to SEQ ID NO: 12061
  chr4:6616020-6616115
  hypo

SEQ ID NO: 44332 - DNA, 31 bp, Homo sapiens; identical to SEQ ID NO: 12062
  chr4:6616126-6616157
  hypo

SEQ ID NO: 44333 - DNA, 31 bp, Homo sapiens; identical to SEQ ID NO: 12064
  chr4:6658783-6658814
  hypo

SEQ ID NO: 44334 - DNA, 61 bp, Homo sapiens; identical to SEQ ID NO: 12065
  chr4:6686432-6686493
  hypo

SEQ ID NO: 44335 - DNA, 31 bp, Homo sapiens; identical to SEQ ID NO: 12066
  chr4:6686513-6686544
  hypo

SEQ ID NO: 44336 - DNA, 123 bp, Homo sapiens; identical to SEQ ID NO: 1787
  chr4:6717791-6717914
  hypo

SEQ ID NO: 44337 - DNA, 31 bp, Homo sapiens; identical to SEQ ID NO: 12068
  chr4:6724730-6724761
  hypo

SEQ ID NO: 44338 - DNA, 58 bp, Homo sapiens; identical to SEQ ID NO: 12069
  chr4:6726064-6726122
  hypo

SEQ ID NO: 44339 - DNA, 78 bp, Homo sapiens; identical to SEQ ID NO: 12070
  chr4:6733364-6733442
  hypo

SEQ ID NO: 44340 - DNA, 34 bp, Homo sapiens; identical to SEQ ID NO: 12071
  chr4:6733444-6733478
  hypo

SEQ ID NO: 44341 - DNA, 31 bp, Homo sapiens; identical to SEQ ID NO: 12072
  chr4:6733641-6733672
  hypo

SEQ ID NO: 44342 - DNA, 42 bp, Homo sapiens; identical to SEQ ID NO: 12073
  chr4:6735825-6735867
  hypo

SEQ ID NO: 44343 - DNA, 59 bp, Homo sapiens; identical to SEQ ID NO: 12075
  chr4:6738206-6738265
  hypo

SEQ ID NO: 44344 - DNA, 30 bp, Homo sapiens; identical to SEQ ID NO: 12076
  chr4:6786672-6786702
  hypo

SEQ ID NO: 44345 - DNA, 31 bp, Homo sapiens; identical to SEQ ID NO: 12078
  chr4:7004327-7004358
  hypo

SEQ ID NO: 44346 - DNA, 36 bp, Homo sapiens; identical to SEQ ID NO: 12079
  chr4:7167401-7167437
  hypo

SEQ ID NO: 44347 - DNA, 31 bp, Homo sapiens; identical to SEQ ID NO: 12080
  chr4:7431090-7431121
  hypo

SEQ ID NO: 44348 - DNA, 31 bp, Homo sapiens; identical to SEQ ID NO: 12081
  chr4:7445128-7445159
  hypo

SEQ ID NO: 44349 - DNA, 31 bp, Homo sapiens; identical to SEQ ID NO: 12082
  chr4:7528960-7528991
  hypo

SEQ ID NO: 44350 - DNA, 75 bp, Homo sapiens; identical to SEQ ID NO: 12083
  chr4:7789548-7789623
  hypo

SEQ ID NO: 44351 - DNA, 45 bp, Homo sapiens; identical to SEQ ID NO: 12084
  chr4:7791291-7791336
  hypo

SEQ ID NO: 44352 - DNA, 35 bp, Homo sapiens; identical to SEQ ID NO: 12085
  chr4:7812694-7812729
  hypo

SEQ ID NO: 44353 - DNA, 31 bp, Homo sapiens; identical to SEQ ID NO: 12086
  chr4:7828943-7828974
  hypo

SEQ ID NO: 44354 - DNA, 50 bp, Homo sapiens; identical to SEQ ID NO: 12087
  chr4:7967942-7967992
  hypo

SEQ ID NO: 44355 - DNA, 31 bp, Homo sapiens; identical to SEQ ID NO: 12088
  chr4:7973586-7973617
  hypo

SEQ ID NO: 44356 - DNA, 31 bp, Homo sapiens; identical to SEQ ID NO: 12089
  chr4:7984131-7984162
  hypo

SEQ ID NO: 44357 - DNA, 31 bp, Homo sapiens; identical to SEQ ID NO: 12090
  chr4:7992551-7992582
  hypo

SEQ ID NO: 44358 - DNA, 48 bp, Homo sapiens; identical to SEQ ID NO: 12091
  chr4:7992671-7992719
  hypo

SEQ ID NO: 44359 - DNA, 41 bp, Homo sapiens; identical to SEQ ID NO: 12092
  chr4:7992722-7992763
  hypo

SEQ ID NO: 44360 - DNA, 48 bp, Homo sapiens; identical to SEQ ID NO: 12093
  chr4:8001654-8001702
  hypo

SEQ ID NO: 44361 - DNA, 31 bp, Homo sapiens; identical to SEQ ID NO: 12094
  chr4:8001712-8001743
  hypo

SEQ ID NO: 44362 - DNA, 45 bp, Homo sapiens; identical to SEQ ID NO: 12095
  chr4:8001768-8001813
  hypo

SEQ ID NO: 44363 - DNA, 31 bp, Homo sapiens; identical to SEQ ID NO: 12096
  chr4:8001814-8001845
  hypo

SEQ ID NO: 44364 - DNA, 82 bp, Homo sapiens; identical to SEQ ID NO: 12097
  chr4:8005624-8005706
  hypo

SEQ ID NO: 44365 - DNA, 31 bp, Homo sapiens; identical to SEQ ID NO: 12098
  chr4:8062716-8062747
  hypo

SEQ ID NO: 44366 - DNA, 31 bp, Homo sapiens; identical to SEQ ID NO: 12099
  chr4:8063598-8063629
  hypo

SEQ ID NO: 44367 - DNA, 31 bp, Homo sapiens; identical to SEQ ID NO: 12100
  chr4:8153833-8153864
  hypo

SEQ ID NO: 44368 - DNA, 85 bp, Homo sapiens; identical to SEQ ID NO: 1797
  chr4:8160485-8160570
  hypo

SEQ ID NO: 44369 - DNA, 31 bp, Homo sapiens; identical to SEQ ID NO: 12103
  chr4:8309965-8309996
  hypo

SEQ ID NO: 44370 - DNA, 31 bp, Homo sapiens; identical to SEQ ID NO: 12104
  chr4:8354965-8354996
  hypo

SEQ ID NO: 44371 - DNA, 39 bp, Homo sapiens; identical to SEQ ID NO: 12105
  chr4:8375723-8375762
  hypo

SEQ ID NO: 44372 - DNA, 31 bp, Homo sapiens; identical to SEQ ID NO: 12106
  chr4:8398833-8398864
  hypo

SEQ ID NO: 44373 - DNA, 44 bp, Homo sapiens; identical to SEQ ID NO: 12107
  chr4:8411914-8411958
  hypo

SEQ ID NO: 44374 - DNA, 31 bp, Homo sapiens; identical to SEQ ID NO: 12108
  chr4:8411989-8412020
  hypo

SEQ ID NO: 44375 - DNA, 31 bp, Homo sapiens; identical to SEQ ID NO: 12109
  chr4:8412038-8412069
  hypo

SEQ ID NO: 44376 - DNA, 35 bp, Homo sapiens; identical to SEQ ID NO: 12110
  chr4:8475667-8475702
  hypo

SEQ ID NO: 44377 - DNA, 38 bp, Homo sapiens; identical to SEQ ID NO: 12111
  chr4:8475738-8475776
  hypo

SEQ ID NO: 44378 - DNA, 31 bp, Homo sapiens; identical to SEQ ID NO: 12112
  chr4:8483723-8483754
  hypo

SEQ ID NO: 44379 - DNA, 36 bp, Homo sapiens; identical to SEQ ID NO: 12113
  chr4:8483758-8483794
  hypo

SEQ ID NO: 44380 - DNA, 31 bp, Homo sapiens; identical to SEQ ID NO: 12114
  chr4:8483827-8483858
  hypo

SEQ ID NO: 44381 - DNA, 56 bp, Homo sapiens; identical to SEQ ID NO: 12115
  chr4:8484046-8484102
  hypo

SEQ ID NO: 44382 - DNA, 31 bp, Homo sapiens; identical to SEQ ID NO: 12116
  chr4:8560622-8560653
  hypo

SEQ ID NO: 44383 - DNA, 35 bp, Homo sapiens; identical to SEQ ID NO: 1799
  chr4:8594317-8594352
  hypo

SEQ ID NO: 44384 - DNA, 26 bp, Homo sapiens
  chr4:8594372-8594398
  hypo
cctcctcctcccccagcggcatcctc

SEQ ID NO: 44385 - DNA, 31 bp, Homo sapiens; identical to SEQ ID NO: 12119
  chr4:8842664-8842695
  hypo

SEQ ID NO: 44386 - DNA, 41 bp, Homo sapiens; identical to SEQ ID NO: 12120
  chr4:9701509-9701550
  hypo

SEQ ID NO: 44387 - DNA, 31 bp, Homo sapiens; identical to SEQ ID NO: 12121
  chr4:9701554-9701585
  hypo

SEQ ID NO: 44388 - DNA, 46 bp, Homo sapiens; identical to SEQ ID NO: 12122
  chr4:9701671-9701717
  hypo

SEQ ID NO: 44389 - DNA, 36 bp, Homo sapiens; identical to SEQ ID NO: 12123
  chr4:9784384-9784420
  hypo

SEQ ID NO: 44390 - DNA, 57 bp, Homo sapiens; identical to SEQ ID NO: 1802
  chr4:10090132-10090189
  hypo

SEQ ID NO: 44391 - DNA, 47 bp, Homo sapiens; identical to SEQ ID NO: 1803
  chr4:10090202-10090249
  hypo

SEQ ID NO: 44392 - DNA, 31 bp, Homo sapiens; identical to SEQ ID NO: 1804
  chr4:10090276-10090307
  hypo

SEQ ID NO: 44393 - DNA, 22 bp, Homo sapiens
  chr4:10412561-10412583
  hypo
agcctgagcgtgcctgcgtggc

SEQ ID NO: 44394 - DNA, 31 bp, Homo sapiens; identical to SEQ ID NO: 12128
  chr4:10575193-10575224
  hypo

SEQ ID NO: 44395 - DNA, 31 bp, Homo sapiens; identical to SEQ ID NO: 12129
  chr4:11374202-11374233
  hypo

SEQ ID NO: 44396 - DNA, 34 bp, Homo sapiens; identical to SEQ ID NO: 12130
  chr4:11374289-11374323
  hypo

SEQ ID NO: 44397 - DNA, 31 bp, Homo sapiens; identical to SEQ ID NO: 12131
  chr4:11374360-11374391
  hypo

SEQ ID NO: 44398 - DNA, 31 bp, Homo sapiens; identical to SEQ ID NO: 12132
  chr4:13300569-13300600
  hypo

SEQ ID NO: 44399 - DNA, 63 bp, Homo sapiens; identical to SEQ ID NO: 12134
  chr4:15789215-15789278
  hypo

SEQ ID NO: 44400 - DNA, 2 bp, Homo sapiens
  chr4:15789490-15789492
  hypo
at

SEQ ID NO: 44401 - DNA, 31 bp, Homo sapiens; identical to SEQ ID NO: 12136
  chr4:17818104-17818135
  hypo

SEQ ID NO: 44402 - DNA, 118 bp, Homo sapiens; identical to SEQ ID NO: 1812
  chr4:22517213-22517331
  hypo

SEQ ID NO: 44403 - DNA, 94 bp, Homo sapiens; identical to SEQ ID NO: 1813
  chr4:22517554-22517648
  hypo

SEQ ID NO: 44404 - DNA, 40 bp, Homo sapiens; identical to SEQ ID NO: 1814
  chr4:22517719-22517759
  hypo

SEQ ID NO: 44405 - DNA, 31 bp, Homo sapiens; identical to SEQ ID NO: 12141
  chr4:24631209-24631240
  hypo

SEQ ID NO: 44406 - DNA, 31 bp, Homo sapiens; identical to SEQ ID NO: 12142
  chr4:24670641-24670672
  hypo

SEQ ID NO: 44407 - DNA, 31 bp, Homo sapiens; identical to SEQ ID NO: 12144
  chr4:25005691-25005722
  hypo

SEQ ID NO: 44408 - DNA, 60 bp, Homo sapiens; identical to SEQ ID NO: 12145
  chr4:25025016-25025076
  hypo

SEQ ID NO: 44409 - DNA, 31 bp, Homo sapiens; identical to SEQ ID NO: 12146
  chr4:25025079-25025110
  hypo

SEQ ID NO: 44410 - DNA, 31 bp, Homo sapiens; identical to SEQ ID NO: 12147
  chr4:25025117-25025148
  hypo

SEQ ID NO: 44411 - DNA, 31 bp, Homo sapiens; identical to SEQ ID NO: 12148
  chr4:25025170-25025201
  hypo

SEQ ID NO: 44412 - DNA, 31 bp, Homo sapiens; identical to SEQ ID NO: 12149
  chr4:25360433-25360464
  hypo

SEQ ID NO: 44413 - DNA, 31 bp, Homo sapiens; identical to SEQ ID NO: 12150
  chr4:25360471-25360502
  hypo

SEQ ID NO: 44414 - DNA, 31 bp, Homo sapiens; identical to SEQ ID NO: 12151
  chr4:25360529-25360560
  hypo

SEQ ID NO: 44415 - DNA, 31 bp, Homo sapiens; identical to SEQ ID NO: 12152
  chr4:35039894-35039925
  hypo

SEQ ID NO: 44416 - DNA, 106 bp, Homo sapiens; identical to SEQ ID NO: 12153
  chr4:35039945-35040051
  hypo

SEQ ID NO: 44417 - DNA, 31 bp, Homo sapiens; identical to SEQ ID NO: 1818
  chr4:37688563-37688594
  hypo

SEQ ID NO: 44418 - DNA, 55 bp, Homo sapiens; identical to SEQ ID NO: 1819
  chr4:37688595-37688650
  hypo

SEQ ID NO: 44419 - DNA, 31 bp, Homo sapiens; identical to SEQ ID NO: 12157
  chr4:38278934-38278965
  hypo

SEQ ID NO: 44420 - DNA, 55 bp, Homo sapiens; identical to SEQ ID NO: 12158
  chr4:38278988-38279043
  hypo

SEQ ID NO: 44421 - DNA, 48 bp, Homo sapiens; identical to SEQ ID NO: 12159
  chr4:38279075-38279123
  hypo

SEQ ID NO: 44422 - DNA, 31 bp, Homo sapiens; identical to SEQ ID NO: 1822
  chr4:38868923-38868954
  hypo

SEQ ID NO: 44423 - DNA, 31 bp, Homo sapiens; identical to SEQ ID NO: 1823
  chr4:38868972-38869003
  hypo

SEQ ID NO: 44424 - DNA, 57 bp, Homo sapiens; identical to SEQ ID NO: 1824
  chr4:38869019-38869076
  hypo

SEQ ID NO: 44425 - DNA, 31 bp, Homo sapiens; identical to SEQ ID NO: 1825
  chr4:38869082-38869113
  hypo

SEQ ID NO: 44426 - DNA, 31 bp, Homo sapiens; identical to SEQ ID NO: 1826
  chr4:38869203-38869234
  hypo

SEQ ID NO: 44427 - DNA, 53 bp, Homo sapiens; identical to SEQ ID NO: 1827
  chr4:38869245-38869298
  hypo

SEQ ID NO: 44428 - DNA, 43 bp, Homo sapiens; identical to SEQ ID NO: 1828
  chr4:38869437-38869480
  hypo

SEQ ID NO: 44429 - DNA, 51 bp, Homo sapiens; identical to SEQ ID NO: 1829
  chr4:38869487-38869538
  hypo

SEQ ID NO: 44430 - DNA, 62 bp, Homo sapiens; identical to SEQ ID NO: 1832
  chr4:39529829-39529891
  hypo

SEQ ID NO: 44431 - DNA, 51 bp, Homo sapiens; identical to SEQ ID NO: 1833
  chr4:39529893-39529944
  hypo

SEQ ID NO: 44432 - DNA, 36 bp, Homo sapiens; identical to SEQ ID NO: 12175
  chr4:39913157-39913193
  hypo

SEQ ID NO: 44433 - DNA, 31 bp, Homo sapiens; identical to SEQ ID NO: 12176
  chr4:39953928-39953959
  hypo

SEQ ID NO: 44434 - DNA, 31 bp, Homo sapiens; identical to SEQ ID NO: 12177
  chr4:40161796-40161827
  hypo

SEQ ID NO: 44435 - DNA, 31 bp, Homo sapiens; identical to SEQ ID NO: 12178
  chr4:40161870-40161901
  hypo

SEQ ID NO: 44436 - DNA, 41 bp, Homo sapiens; identical to SEQ ID NO: 12179
  chr4:40823879-40823920
  hypo

SEQ ID NO: 44437 - DNA, 36 bp, Homo sapiens; identical to SEQ ID NO: 12180
  chr4:40857393-40857429
  hypo

SEQ ID NO: 44438 - DNA, 30 bp, Homo sapiens; identical to SEQ ID NO: 12181
  chr4:40888204-40888234
  hypo

SEQ ID NO: 44439 - DNA, 31 bp, Homo sapiens; identical to SEQ ID NO: 12182
  chr4:40983417-40983448
  hypo

SEQ ID NO: 44440 - DNA, 31 bp, Homo sapiens; identical to SEQ ID NO: 1835
  chr4:41003481-41003512
  hypo

SEQ ID NO: 44441 - DNA, 68 bp, Homo sapiens; identical to SEQ ID NO: 12184
  chr4:41012739-41012807
  hypo

SEQ ID NO: 44442 - DNA, 35 bp, Homo sapiens; identical to SEQ ID NO: 12185
  chr4:41012893-41012928
  hypo

SEQ ID NO: 44443 - DNA, 31 bp, Homo sapiens; identical to SEQ ID NO: 12186
  chr4:41111870-41111901
  hypo

SEQ ID NO: 44444 - DNA, 31 bp, Homo sapiens; identical to SEQ ID NO: 12187
  chr4:41167663-41167694
  hypo

SEQ ID NO: 44445 - DNA, 31 bp, Homo sapiens; identical to SEQ ID NO: 12188
  chr4:41167721-41167752
  hypo

SEQ ID NO: 44446 - DNA, 31 bp, Homo sapiens; identical to SEQ ID NO: 1836
  chr4:41168397-41168428
  hypo

SEQ ID NO: 44447 - DNA, 35 bp, Homo sapiens; identical to SEQ ID NO: 12190
  chr4:41198149-41198184
  hypo

SEQ ID NO: 44448 - DNA, 37 bp, Homo sapiens; identical to SEQ ID NO: 1837
  chr4:41216264-41216301
  hypo

SEQ ID NO: 44449 - DNA, 69 bp, Homo sapiens; identical to SEQ ID NO: 1838
  chr4:41216334-41216403
  hypo

SEQ ID NO: 44450 - DNA, 119 bp, Homo sapiens; identical to SEQ ID NO: 1839
  chr4:41218382-41218501
  hypo

SEQ ID NO: 44451 - DNA, 31 bp, Homo sapiens; identical to SEQ ID NO: 1840
  chr4:41218544-41218575
  hypo

SEQ ID NO: 44452 - DNA, 2 bp, Homo sapiens
  chr4:41994051-41994053
  hypo
gg

SEQ ID NO: 44453 - DNA, 31 bp, Homo sapiens; identical to SEQ ID NO: 1849
  chr4:42658119-42658150
  hypo

SEQ ID NO: 44454 - DNA, 60 bp, Homo sapiens; identical to SEQ ID NO: 12204
  chr4:48017272-48017332
  hypo

SEQ ID NO: 44455 - DNA, 31 bp, Homo sapiens; identical to SEQ ID NO: 12205
  chr4:54357937-54357968
  hypo

SEQ ID NO: 44456 - DNA, 31 bp, Homo sapiens; identical to SEQ ID NO: 12206
  chr4:54459311-54459342
  hypo

SEQ ID NO: 44457 - DNA, 31 bp, Homo sapiens; identical to SEQ ID NO: 12207
  chr4:54500683-54500714
  hypo

SEQ ID NO: 44458 - DNA, 31 bp, Homo sapiens; identical to SEQ ID NO: 12208
  chr4:54775816-54775847
  hypo

SEQ ID NO: 44459 - DNA, 31 bp, Homo sapiens; identical to SEQ ID NO: 12209
  chr4:55021856-55021887
  hypo

SEQ ID NO: 44460 - DNA, 2 bp, Homo sapiens
  chr4:55406439-55406441
  hypo
ta

SEQ ID NO: 44461 - DNA, 7 bp, Homo sapiens
  chr4:55406473-55406480
  hypo
cacgcct

SEQ ID NO: 44462 - DNA, 35 bp, Homo sapiens; identical to SEQ ID NO: 1852
  chr4:56412389-56412424
  hypo

SEQ ID NO: 44463 - DNA, 31 bp, Homo sapiens; identical to SEQ ID NO: 12214
  chr4:57409185-57409216
  hypo

SEQ ID NO: 44464 - DNA, 41 bp, Homo sapiens; identical to SEQ ID NO: 12225
  chr4:71566952-71566993
  hypo

SEQ ID NO: 44465 - DNA, 31 bp, Homo sapiens; identical to SEQ ID NO: 12226
  chr4:71756395-71756426
  hypo

SEQ ID NO: 44466 - DNA, 82 bp, Homo sapiens; identical to SEQ ID NO: 12227
  chr4:71857999-71858081
  hypo

SEQ ID NO: 44467 - DNA, 38 bp, Homo sapiens; identical to SEQ ID NO: 12228
  chr4:71894315-71894353
  hypo

SEQ ID NO: 44468 - DNA, 84 bp, Homo sapiens; identical to SEQ ID NO: 12230
  chr4:71986659-71986743
  hypo

SEQ ID NO: 44469 - DNA, 2 bp, Homo sapiens
  chr4:76394242-76394244
  hypo
tc

SEQ ID NO: 44470 - DNA, 11 bp, Homo sapiens
  chr4:76394262-76394273
  hypo
ggctgccaatc

SEQ ID NO: 44471 - DNA, 31 bp, Homo sapiens; identical to SEQ ID NO: 12233
  chr4:76600185-76600216
  hypo

SEQ ID NO: 44472 - DNA, 61 bp, Homo sapiens; identical to SEQ ID NO: 1877
  chr4:77227950-77228011
  hypo

SEQ ID NO: 44473 - DNA, 31 bp, Homo sapiens; identical to SEQ ID NO: 12238
  chr4:77475935-77475966
  hypo

SEQ ID NO: 44474 - DNA, 31 bp, Homo sapiens; identical to SEQ ID NO: 12239
  chr4:77596099-77596130
  hypo

SEQ ID NO: 44475 - DNA, 62 bp, Homo sapiens; identical to SEQ ID NO: 12240
  chr4:77661924-77661986
  hypo

SEQ ID NO: 44476 - DNA, 31 bp, Homo sapiens; identical to SEQ ID NO: 12241
  chr4:78100428-78100459
  hypo

SEQ ID NO: 44477 - DNA, 31 bp, Homo sapiens; identical to SEQ ID NO: 12242
  chr4:79345221-79345252
  hypo

SEQ ID NO: 44478 - DNA, 2 bp, Homo sapiens
  chr4:79689604-79689606
  hypo
ct

SEQ ID NO: 44479 - DNA, 34 bp, Homo sapiens; identical to SEQ ID NO: 12246
  chr4:83448626-83448660
  hypo

SEQ ID NO: 44480 - DNA, 31 bp, Homo sapiens; identical to SEQ ID NO: 12247
  chr4:83496633-83496664
  hypo

SEQ ID NO: 44481 - DNA, 44 bp, Homo sapiens; identical to SEQ ID NO: 1889
  chr4:84292569-84292613
  hypo

SEQ ID NO: 44482 - DNA, 31 bp, Homo sapiens; identical to SEQ ID NO: 12250
  chr4:84405333-84405364
  hypo

SEQ ID NO: 44483 - DNA, 36 bp, Homo sapiens; identical to SEQ ID NO: 12251
  chr4:84468674-84468710
  hypo

SEQ ID NO: 44484 - DNA, 31 bp, Homo sapiens; identical to SEQ ID NO: 12252
  chr4:85464134-85464165
  hypo

SEQ ID NO: 44485 - DNA, 33 bp, Homo sapiens; identical to SEQ ID NO: 1895
  chr4:85503985-85504018
  hypo

SEQ ID NO: 44486 - DNA, 31 bp, Homo sapiens; identical to SEQ ID NO: 12255
  chr4:85547362-85547393
  hypo

SEQ ID NO: 44487 - DNA, 31 bp, Homo sapiens; identical to SEQ ID NO: 12256
  chr4:85634474-85634505
  hypo

SEQ ID NO: 44488 - DNA, 150 bp, Homo sapiens; identical to SEQ ID NO: 1898
  chr4:85886792-85886942
  hypo

SEQ ID NO: 44489 - DNA, 117 bp, Homo sapiens; identical to SEQ ID NO: 36292
  chr4:85887200-85887317
  hypo

SEQ ID NO: 44490 - DNA, 98 bp, Homo sapiens; identical to SEQ ID NO: 1900
  chr4:85887394-85887492
  hypo

SEQ ID NO: 44491 - DNA, 92 bp, Homo sapiens; identical to SEQ ID NO: 1901
  chr4:85887500-85887592
  hypo

SEQ ID NO: 44492 - DNA, 68 bp, Homo sapiens; identical to SEQ ID NO: 1902
  chr4:85887625-85887693
  hypo

SEQ ID NO: 44493 - DNA, 35 bp, Homo sapiens; identical to SEQ ID NO: 1903
  chr4:85888137-85888172
  hypo

SEQ ID NO: 44494 - DNA, 31 bp, Homo sapiens; identical to SEQ ID NO: 1904
  chr4:85888431-85888462
  hypo

SEQ ID NO: 44495 - DNA, 31 bp, Homo sapiens; identical to SEQ ID NO: 12264
  chr4:85948837-85948868
  hypo

SEQ ID NO: 44496 - DNA, 31 bp, Homo sapiens; identical to SEQ ID NO: 12266
  chr4:88258990-88259021
  hypo

SEQ ID NO: 44497 - DNA, 31 bp, Homo sapiens; identical to SEQ ID NO: 1928
  chr4:91760070-91760101
  hypo

SEQ ID NO: 44498 - DNA, 2 bp, Homo sapiens
  chr4:95127589-95127591
  hypo
aa

SEQ ID NO: 44499 - DNA, 3 bp, Homo sapiens
  chr4:95128037-95128040
  hypo
gtg

SEQ ID NO: 44500 - DNA, 31 bp, Homo sapiens; identical to SEQ ID NO: 12271
  chr4:95257392-95257423
  hypo

SEQ ID NO: 44501 - DNA, 31 bp, Homo sapiens; identical to SEQ ID NO: 12274
  chr4:95461611-95461642
  hypo

SEQ ID NO: 44502 - DNA, 31 bp, Homo sapiens; identical to SEQ ID NO: 12275
  chr4:99178277-99178308
  hypo

SEQ ID NO: 44503 - DNA, 31 bp, Homo sapiens; identical to SEQ ID NO: 12276
  chr4:99835221-99835252
  hypo

SEQ ID NO: 44504 - DNA, 31 bp, Homo sapiens; identical to SEQ ID NO: 12277
  chr4:99836004-99836035
  hypo

SEQ ID NO: 44505 - DNA, 84 bp, Homo sapiens; identical to SEQ ID NO: 1930
  chr4:100867971-100868055
  hypo

SEQ ID NO: 44506 - DNA, 31 bp, Homo sapiens; identical to SEQ ID NO: 12279
  chr4:102332875-102332906
  hypo

SEQ ID NO: 44507 - DNA, 32 bp, Homo sapiens; identical to SEQ ID NO: 12280
  chr4:103421131-103421163
  hypo

SEQ ID NO: 44508 - DNA, 36 bp, Homo sapiens; identical to SEQ ID NO: 12281
  chr4:103494438-103494474
  hypo

SEQ ID NO: 44509 - DNA, 54 bp, Homo sapiens; identical to SEQ ID NO: 1934
  chr4:106067335-106067389
  hypo

SEQ ID NO: 44510 - DNA, 72 bp, Homo sapiens; identical to SEQ ID NO: 1935
  chr4:106067416-106067488
  hypo

SEQ ID NO: 44511 - DNA, 31 bp, Homo sapiens; identical to SEQ ID NO: 12284
  chr4:108789574-108789605
  hypo

SEQ ID NO: 44512 - DNA, 31 bp, Homo sapiens; identical to SEQ ID NO: 12286
  chr4:109680328-109680359
  hypo

SEQ ID NO: 44513 - DNA, 2 bp, Homo sapiens
  chr4:110735439-110735441
  hypo
ta

SEQ ID NO: 44514 - DNA, 31 bp, Homo sapiens; identical to SEQ ID NO: 12289
  chr4:110974665-110974696
  hypo

SEQ ID NO: 44515 - DNA, 88 bp, Homo sapiens; identical to SEQ ID NO: 12290
  chr4:111019209-111019297
  hypo

SEQ ID NO: 44516 - DNA, 45 bp, Homo sapiens; identical to SEQ ID NO: 12292
  chr4:111096240-111096285
  hypo

SEQ ID NO: 44517 - DNA, 31 bp, Homo sapiens; identical to SEQ ID NO: 12293
  chr4:111097858-111097889
  hypo

SEQ ID NO: 44518 - DNA, 31 bp, Homo sapiens; identical to SEQ ID NO: 1946
  chr4:111117164-111117195
  hypo

SEQ ID NO: 44519 - DNA, 31 bp, Homo sapiens; identical to SEQ ID NO: 12296
  chr4:111135520-111135551
  hypo

SEQ ID NO: 44520 - DNA, 31 bp, Homo sapiens; identical to SEQ ID NO: 12297
  chr4:111147617-111147648
  hypo

SEQ ID NO: 44521 - DNA, 31 bp, Homo sapiens; identical to SEQ ID NO: 12298
  chr4:111214505-111214536
  hypo

SEQ ID NO: 44522 - DNA, 2 bp, Homo sapiens
  chr4:113437621-113437623
  hypo
gc

SEQ ID NO: 44523 - DNA, 2 bp, Homo sapiens
  chr4:113559123-113559125
  hypo
ta

SEQ ID NO: 44524 - DNA, 37 bp, Homo sapiens
  chr4:113559165-113559202
  hypo
gcgaggctgggcacggtggctcacgcctgtaatccca

SEQ ID NO: 44525 - DNA, 31 bp, Homo sapiens; identical to SEQ ID NO: 12302
  chr4:114528565-114528596
  hypo

SEQ ID NO: 44526 - DNA, 31 bp, Homo sapiens; identical to SEQ ID NO: 12303
  chr4:114528597-114528628
  hypo

SEQ ID NO: 44527 - DNA, 39 bp, Homo sapiens; identical to SEQ ID NO: 12304
  chr4:119501590-119501629
  hypo

SEQ ID NO: 44528 - DNA, 31 bp, Homo sapiens; identical to SEQ ID NO: 12306
  chr4:120024322-120024353
  hypo

SEQ ID NO: 44529 - DNA, 132 bp, Homo sapiens; identical to SEQ ID NO: 1956
  chr4:120549977-120550109
  hypo

SEQ ID NO: 44530 - DNA, 37 bp, Homo sapiens; identical to SEQ ID NO: 1957
  chr4:120550111-120550148
  hypo

SEQ ID NO: 44531 - DNA, 31 bp, Homo sapiens; identical to SEQ ID NO: 12309
  chr4:122158961-122158992
  hypo

SEQ ID NO: 44532 - DNA, 61 bp, Homo sapiens; identical to SEQ ID NO: 12310
  chr4:122159050-122159111
  hypo

SEQ ID NO: 44533 - DNA, 137 bp, Homo sapiens; identical to SEQ ID NO: 1970
  chr4:124318595-124318732
  hypo

SEQ ID NO: 44534 - DNA, 2 bp, Homo sapiens
  chr4:124335279-124335281
  hypo
aa

SEQ ID NO: 44535 - DNA, 18 bp, Homo sapiens
  chr4:124335297-124335315
  hypo
ggcgcggcagctcacgcc

SEQ ID NO: 44536 - DNA, 38 bp, Homo sapiens; identical to SEQ ID NO: 12315
  chr4:124533357-124533395
  hypo

SEQ ID NO: 44537 - DNA, 96 bp, Homo sapiens; identical to SEQ ID NO: 1974
  chr4:125633238-125633334
  hypo

SEQ ID NO: 44538 - DNA, 133 bp, Homo sapiens; identical to SEQ ID NO: 1975
  chr4:125633807-125633940
  hypo

SEQ ID NO: 44539 - DNA, 60 bp, Homo sapiens; identical to SEQ ID NO: 1976
  chr4:125634007-125634067
  hypo

SEQ ID NO: 44540 - DNA, 34 bp, Homo sapiens; identical to SEQ ID NO: 12319
  chr4:128702665-128702699
  hypo

SEQ ID NO: 44541 - DNA, 54 bp, Homo sapiens; identical to SEQ ID NO: 1977
  chr4:128703234-128703288
  hypo

SEQ ID NO: 44542 - DNA, 78 bp, Homo sapiens; identical to SEQ ID NO: 1978
  chr4:128703294-128703372
  hypo

SEQ ID NO: 44543 - DNA, 31 bp, Homo sapiens; identical to SEQ ID NO: 12324
  chr4:139707320-139707351
  hypo

SEQ ID NO: 44544 - DNA, 103 bp, Homo sapiens; identical to SEQ ID NO: 1979
  chr4:140097253-140097356
  hypo

SEQ ID NO: 44545 - DNA, 31 bp, Homo sapiens; identical to SEQ ID NO: 12327
  chr4:140134627-140134658
  hypo

SEQ ID NO: 44546 - DNA, 31 bp, Homo sapiens; identical to SEQ ID NO: 12328
  chr4:140290552-140290583
  hypo

SEQ ID NO: 44547 - DNA, 35 bp, Homo sapiens; identical to SEQ ID NO: 12330
  chr4:140592641-140592676
  hypo

SEQ ID NO: 44548 - DNA, 31 bp, Homo sapiens; identical to SEQ ID NO: 12331
  chr4:140640070-140640101
  hypo

SEQ ID NO: 44549 - DNA, 31 bp, Homo sapiens; identical to SEQ ID NO: 12332
  chr4:140640122-140640153
  hypo

SEQ ID NO: 44550 - DNA, 40 bp, Homo sapiens; identical to SEQ ID NO: 12333
  chr4:140641397-140641437
  hypo

SEQ ID NO: 44551 - DNA, 36 bp, Homo sapiens; identical to SEQ ID NO: 12334
  chr4:140701210-140701246
  hypo

SEQ ID NO: 44552 - DNA, 31 bp, Homo sapiens; identical to SEQ ID NO: 12335
  chr4:140701270-140701301
  hypo

SEQ ID NO: 44553 - DNA, 36 bp, Homo sapiens; identical to SEQ ID NO: 12336
  chr4:140705887-140705923
  hypo

SEQ ID NO: 44554 - DNA, 31 bp, Homo sapiens; identical to SEQ ID NO: 12337
  chr4:140751842-140751873
  hypo

SEQ ID NO: 44555 - DNA, 31 bp, Homo sapiens; identical to SEQ ID NO: 12338
  chr4:140751894-140751925
  hypo

SEQ ID NO: 44556 - DNA, 31 bp, Homo sapiens; identical to SEQ ID NO: 12339
  chr4:140751953-140751984
  hypo

SEQ ID NO: 44557 - DNA, 45 bp, Homo sapiens; identical to SEQ ID NO: 12340
  chr4:140781102-140781147
  hypo

SEQ ID NO: 44558 - DNA, 31 bp, Homo sapiens; identical to SEQ ID NO: 12342
  chr4:141050717-141050748
  hypo

SEQ ID NO: 44559 - DNA, 68 bp, Homo sapiens; identical to SEQ ID NO: 1982
  chr4:141071934-141072002
  hypo

SEQ ID NO: 44560 - DNA, 145 bp, Homo sapiens; identical to SEQ ID NO: 1983
  chr4:141072010-141072155
  hypo

SEQ ID NO: 44561 - DNA, 164 bp, Homo sapiens; identical to SEQ ID NO: 1984
  chr4:141072156-141072320
  hypo

SEQ ID NO: 44562 - DNA, 175 bp, Homo sapiens; identical to SEQ ID NO: 1985
  chr4:141072547-141072722
  hypo

SEQ ID NO: 44563 - DNA, 31 bp, Homo sapiens; identical to SEQ ID NO: 1986
  chr4:141073195-141073226
  hypo

SEQ ID NO: 44564 - DNA, 87 bp, Homo sapiens; identical to SEQ ID NO: 1987
  chr4:141073274-141073361
  hypo

SEQ ID NO: 44565 - DNA, 49 bp, Homo sapiens; identical to SEQ ID NO: 1988
  chr4:141073451-141073500
  hypo

SEQ ID NO: 44566 - DNA, 40 bp, Homo sapiens; identical to SEQ ID NO: 1989
  chr4:141073590-141073630
  hypo

SEQ ID NO: 44567 - DNA, 103 bp, Homo sapiens; identical to SEQ ID NO: 1992
  chr4:141073988-141074091
  hypo

SEQ ID NO: 44568 - DNA, 42 bp, Homo sapiens; identical to SEQ ID NO: 1993
  chr4:141074134-141074176
  hypo

SEQ ID NO: 44569 - DNA, 181 bp, Homo sapiens; identical to SEQ ID NO: 1994
  chr4:141074191-141074372
  hypo

SEQ ID NO: 44570 - DNA, 31 bp, Homo sapiens; identical to SEQ ID NO: 1995
  chr4:141074619-141074650
  hypo

SEQ ID NO: 44571 - DNA, 37 bp, Homo sapiens; identical to SEQ ID NO: 1996
  chr4:141074696-141074733
  hypo

SEQ ID NO: 44572 - DNA, 31 bp, Homo sapiens; identical to SEQ ID NO: 1997
  chr4:141074879-141074910
  hypo

SEQ ID NO: 44573 - DNA, 74 bp, Homo sapiens; identical to SEQ ID NO: 1998
  chr4:141074924-141074998
  hypo

SEQ ID NO: 44574 - DNA, 36 bp, Homo sapiens; identical to SEQ ID NO: 1999
  chr4:141075021-141075057
  hypo

SEQ ID NO: 44575 - DNA, 161 bp, Homo sapiens; identical to SEQ ID NO: 2000
  chr4:141075080-141075241
  hypo

SEQ ID NO: 44576 - DNA, 68 bp, Homo sapiens; identical to SEQ ID NO: 2001
  chr4:141075245-141075313
  hypo

SEQ ID NO: 44577 - DNA, 75 bp, Homo sapiens; identical to SEQ ID NO: 2002
  chr4:141075316-141075391
  hypo

SEQ ID NO: 44578 - DNA, 31 bp, Homo sapiens; identical to SEQ ID NO: 12362
  chr4:141087175-141087206
  hypo

SEQ ID NO: 44579 - DNA, 85 bp, Homo sapiens; identical to SEQ ID NO: 12363
  chr4:142134703-142134788
  hypo

SEQ ID NO: 44580 - DNA, 31 bp, Homo sapiens; identical to SEQ ID NO: 2003
  chr4:142557475-142557506
  hypo

SEQ ID NO: 44581 - DNA, 79 bp, Homo sapiens; identical to SEQ ID NO: 2004
  chr4:142557742-142557821
  hypo

SEQ ID NO: 44582 - DNA, 100 bp, Homo sapiens; identical to SEQ ID NO: 2005
  chr4:142557826-142557926
  hypo

SEQ ID NO: 44583 - DNA, 31 bp, Homo sapiens; identical to SEQ ID NO: 12367
  chr4:142677008-142677039
  hypo

SEQ ID NO: 44584 - DNA, 72 bp, Homo sapiens; identical to SEQ ID NO: 12368
  chr4:142677066-142677138
  hypo

SEQ ID NO: 44585 - DNA, 31 bp, Homo sapiens; identical to SEQ ID NO: 12369
  chr4:142677163-142677194
  hypo

SEQ ID NO: 44586 - DNA, 31 bp, Homo sapiens; identical to SEQ ID NO: 12370
  chr4:143477971-143478002
  hypo

SEQ ID NO: 44587 - DNA, 31 bp, Homo sapiens; identical to SEQ ID NO: 12371
  chr4:143478013-143478044
  hypo

SEQ ID NO: 44588 - DNA, 31 bp, Homo sapiens; identical to SEQ ID NO: 12372
  chr4:143478100-143478131
  hypo

SEQ ID NO: 44589 - DNA, 31 bp, Homo sapiens; identical to SEQ ID NO: 12373
  chr4:143478137-143478168
  hypo

SEQ ID NO: 44590 - DNA, 76 bp, Homo sapiens; identical to SEQ ID NO: 2008
  chr4:144257423-144257499
  hypo

SEQ ID NO: 44591 - DNA, 190 bp, Homo sapiens; identical to SEQ ID NO: 2009
  chr4:144257936-144258126
  hypo

SEQ ID NO: 44592 - DNA, 250 bp, Homo sapiens; identical to SEQ ID NO: 2010
  chr4:144258374-144258624
  hypo

SEQ ID NO: 44593 - DNA, 31 bp, Homo sapiens; identical to SEQ ID NO: 2012
  chr4:146102129-146102160
  hypo

SEQ ID NO: 44594 - DNA, 52 bp, Homo sapiens; identical to SEQ ID NO: 2014
  chr4:146402905-146402957
  hypo

SEQ ID NO: 44595 - DNA, 117 bp, Homo sapiens; identical to SEQ ID NO: 2016
  chr4:146403592-146403709
  hypo

SEQ ID NO: 44596 - DNA, 35 bp, Homo sapiens; identical to SEQ ID NO: 2017
  chr4:146403852-146403887
  hypo

SEQ ID NO: 44597 - DNA, 31 bp, Homo sapiens; identical to SEQ ID NO: 12383
  chr4:148463774-148463805
  hypo

SEQ ID NO: 44598 - DNA, 34 bp, Homo sapiens; identical to SEQ ID NO: 2018
  chr4:148538934-148538968
  hypo

SEQ ID NO: 44599 - DNA, 31 bp, Homo sapiens; identical to SEQ ID NO: 12386
  chr4:148884819-148884850
  hypo

SEQ ID NO: 44600 - DNA, 31 bp, Homo sapiens; identical to SEQ ID NO: 12387
  chr4:148985416-148985447
  hypo

SEQ ID NO: 44601 - DNA, 31 bp, Homo sapiens; identical to SEQ ID NO: 12388
  chr4:149363505-149363536
  hypo

SEQ ID NO: 44602 - DNA, 31 bp, Homo sapiens; identical to SEQ ID NO: 12389
  chr4:149364526-149364557
  hypo

SEQ ID NO: 44603 - DNA, 31 bp, Homo sapiens; identical to SEQ ID NO: 2019
  chr4:149364622-149364653
  hypo

SEQ ID NO: 44604 - DNA, 96 bp, Homo sapiens; identical to SEQ ID NO: 2022
  chr4:149365995-149366091
  hypo

SEQ ID NO: 44605 - DNA, 164 bp, Homo sapiens; identical to SEQ ID NO: 2023
  chr4:149366094-149366258
  hypo

SEQ ID NO: 44606 - DNA, 31 bp, Homo sapiens; identical to SEQ ID NO: 12393
  chr4:149905344-149905375
  hypo

SEQ ID NO: 44607 - DNA, 42 bp, Homo sapiens; identical to SEQ ID NO: 12396
  chr4:151897749-151897791
  hypo

SEQ ID NO: 44608 - DNA, 31 bp, Homo sapiens; identical to SEQ ID NO: 12397
  chr4:151897841-151897872
  hypo

SEQ ID NO: 44609 - DNA, 34 bp, Homo sapiens; identical to SEQ ID NO: 12398
  chr4:152157385-152157419
  hypo

SEQ ID NO: 44610 - DNA, 31 bp, Homo sapiens; identical to SEQ ID NO: 12399
  chr4:152273414-152273445
  hypo

SEQ ID NO: 44611 - DNA, 31 bp, Homo sapiens; identical to SEQ ID NO: 2029
  chr4:152330027-152330058
  hypo

SEQ ID NO: 44612 - DNA, 120 bp, Homo sapiens; identical to SEQ ID NO: 2030
  chr4:152330090-152330210
  hypo

SEQ ID NO: 44613 - DNA, 38 bp, Homo sapiens; identical to SEQ ID NO: 2031
  chr4:152330252-152330290
  hypo

SEQ ID NO: 44614 - DNA, 226 bp, Homo sapiens; identical to SEQ ID NO: 2032
  chr4:152330321-152330547
  hypo

SEQ ID NO: 44615 - DNA, 63 bp, Homo sapiens; identical to SEQ ID NO: 12404
  chr4:153460845-153460908
  hypo

SEQ ID NO: 44616 - DNA, 31 bp, Homo sapiens; identical to SEQ ID NO: 12409
  chr4:153821325-153821356
  hypo

SEQ ID NO: 44617 - DNA, 2 bp, Homo sapiens
  chr4:153821362-153821364
  hypo
ca

SEQ ID NO: 44618 - DNA, 18 bp, Homo sapiens
  chr4:153821459-153821477
  hypo
agacgtcaccacagttct

SEQ ID NO: 44619 - DNA, 31 bp, Homo sapiens; identical to SEQ ID NO: 12413
  chr4:153896020-153896051
  hypo

SEQ ID NO: 44620 - DNA, 62 bp, Homo sapiens; identical to SEQ ID NO: 12414
  chr4:153897168-153897230
  hypo

SEQ ID NO: 44621 - DNA, 46 bp, Homo sapiens; identical to SEQ ID NO: 12415
  chr4:153897247-153897293
  hypo

SEQ ID NO: 44622 - DNA, 123 bp, Homo sapiens; identical to SEQ ID NO: 2037
  chr4:154387494-154387617
  hypo

SEQ ID NO: 44623 - DNA, 67 bp, Homo sapiens; identical to SEQ ID NO: 2038
  chr4:154387667-154387734
  hypo

SEQ ID NO: 44624 - DNA, 83 bp, Homo sapiens; identical to SEQ ID NO: 2039
  chr4:154388113-154388196
  hypo

SEQ ID NO: 44625 - DNA, 31 bp, Homo sapiens; identical to SEQ ID NO: 12419
  chr4:154410568-154410599
  hypo

SEQ ID NO: 44626 - DNA, 31 bp, Homo sapiens; identical to SEQ ID NO: 12422
  chr4:154454482-154454513
  hypo

SEQ ID NO: 44627 - DNA, 35 bp, Homo sapiens; identical to SEQ ID NO: 12424
  chr4:154469358-154469393
  hypo

SEQ ID NO: 44628 - DNA, 31 bp, Homo sapiens; identical to SEQ ID NO: 12426
  chr4:154520338-154520369
  hypo

SEQ ID NO: 44629 - DNA, 99 bp, Homo sapiens; identical to SEQ ID NO: 12427
  chr4:154520383-154520482
  hypo

SEQ ID NO: 44630 - DNA, 31 bp, Homo sapiens; identical to SEQ ID NO: 12428
  chr4:154681753-154681784
  hypo

SEQ ID NO: 44631 - DNA, 31 bp, Homo sapiens; identical to SEQ ID NO: 12429
  chr4:157974482-157974513
  hypo

SEQ ID NO: 44632 - DNA, 31 bp, Homo sapiens; identical to SEQ ID NO: 12430
  chr4:157974528-157974559
  hypo

SEQ ID NO: 44633 - DNA, 151 bp, Homo sapiens; identical to SEQ ID NO: 2041
  chr4:159690016-159690167
  hypo

SEQ ID NO: 44634 - DNA, 195 bp, Homo sapiens; identical to SEQ ID NO: 2042
  chr4:159690191-159690386
  hypo

SEQ ID NO: 44635 - DNA, 48 bp, Homo sapiens; identical to SEQ ID NO: 2043
  chr4:159690395-159690443
  hypo

SEQ ID NO: 44636 - DNA, 109 bp, Homo sapiens; identical to SEQ ID NO: 2044
  chr4:159690446-159690555
  hypo

SEQ ID NO: 44637 - DNA, 125 bp, Homo sapiens; identical to SEQ ID NO: 2045
  chr4:159690556-159690681
  hypo

SEQ ID NO: 44638 - DNA, 31 bp, Homo sapiens; identical to SEQ ID NO: 12436
  chr4:159790257-159790288
  hypo

SEQ ID NO: 44639 - DNA, 34 bp, Homo sapiens; identical to SEQ ID NO: 12437
  chr4:159919844-159919878
  hypo

SEQ ID NO: 44640 - DNA, 31 bp, Homo sapiens; identical to SEQ ID NO: 12438
  chr4:159919944-159919975
  hypo

SEQ ID NO: 44641 - DNA, 31 bp, Homo sapiens; identical to SEQ ID NO: 12439
  chr4:159920009-159920040
  hypo

SEQ ID NO: 44642 - DNA, 31 bp, Homo sapiens; identical to SEQ ID NO: 12440
  chr4:160286683-160286714
  hypo

SEQ ID NO: 44643 - DNA, 30 bp, Homo sapiens; identical to SEQ ID NO: 12441
  chr4:160310849-160310879
  hypo

SEQ ID NO: 44644 - DNA, 31 bp, Homo sapiens; identical to SEQ ID NO: 12443
  chr4:166035174-166035205
  hypo

SEQ ID NO: 44645 - DNA, 31 bp, Homo sapiens; identical to SEQ ID NO: 12444
  chr4:167457985-167458016
  hypo

SEQ ID NO: 44646 - DNA, 35 bp, Homo sapiens; identical to SEQ ID NO: 12445
  chr4:169198693-169198728
  hypo

SEQ ID NO: 44647 - DNA, 33 bp, Homo sapiens; identical to SEQ ID NO: 12446
  chr4:169224158-169224191
  hypo

SEQ ID NO: 44648 - DNA, 31 bp, Homo sapiens; identical to SEQ ID NO: 12447
  chr4:169358977-169359008
  hypo

SEQ ID NO: 44649 - DNA, 60 bp, Homo sapiens; identical to SEQ ID NO: 12448
  chr4:169377151-169377211
  hypo

SEQ ID NO: 44650 - DNA, 42 bp, Homo sapiens; identical to SEQ ID NO: 12449
  chr4:169377228-169377270
  hypo

SEQ ID NO: 44651 - DNA, 31 bp, Homo sapiens; identical to SEQ ID NO: 12450
  chr4:169377284-169377315
  hypo

SEQ ID NO: 44652 - DNA, 31 bp, Homo sapiens; identical to SEQ ID NO: 12451
  chr4:169667597-169667628
  hypo

SEQ ID NO: 44653 - DNA, 31 bp, Homo sapiens; identical to SEQ ID NO: 12452
  chr4:169667637-169667668
  hypo

SEQ ID NO: 44654 - DNA, 83 bp, Homo sapiens; identical to SEQ ID NO: 12453
  chr4:169667720-169667803
  hypo

SEQ ID NO: 44655 - DNA, 46 bp, Homo sapiens; identical to SEQ ID NO: 12454
  chr4:169744532-169744578
  hypo

SEQ ID NO: 44656 - DNA, 31 bp, Homo sapiens; identical to SEQ ID NO: 12457
  chr4:169978303-169978334
  hypo

SEQ ID NO: 44657 - DNA, 74 bp, Homo sapiens; identical to SEQ ID NO: 2048
  chr4:170192273-170192347
  hypo

SEQ ID NO: 44658 - DNA, 31 bp, Homo sapiens; identical to SEQ ID NO: 12460
  chr4:170211793-170211824
  hypo

SEQ ID NO: 44659 - DNA, 31 bp, Homo sapiens; identical to SEQ ID NO: 12461
  chr4:171014687-171014718
  hypo

SEQ ID NO: 44660 - DNA, 31 bp, Homo sapiens; identical to SEQ ID NO: 12463
  chr4:173298763-173298794
  hypo

SEQ ID NO: 44661 - DNA, 31 bp, Homo sapiens; identical to SEQ ID NO: 12464
  chr4:183081013-183081044
  hypo

SEQ ID NO: 44662 - DNA, 68 bp, Homo sapiens; identical to SEQ ID NO: 12465
  chr4:183824603-183824671
  hypo

SEQ ID NO: 44663 - DNA, 31 bp, Homo sapiens; identical to SEQ ID NO: 12466
  chr4:183824716-183824747
  hypo

SEQ ID NO: 44664 - DNA, 31 bp, Homo sapiens; identical to SEQ ID NO: 12467
  chr4:183824764-183824795
  hypo

SEQ ID NO: 44665 - DNA, 31 bp, Homo sapiens; identical to SEQ ID NO: 12468
  chr4:184000059-184000090
  hypo

SEQ ID NO: 44666 - DNA, 31 bp, Homo sapiens; identical to SEQ ID NO: 12469
  chr4:184160137-184160168
  hypo

SEQ ID NO: 44667 - DNA, 31 bp, Homo sapiens; identical to SEQ ID NO: 12470
  chr4:184265808-184265839
  hypo

SEQ ID NO: 44668 - DNA, 31 bp, Homo sapiens; identical to SEQ ID NO: 12471
  chr4:184289494-184289525
  hypo

SEQ ID NO: 44669 - DNA, 31 bp, Homo sapiens; identical to SEQ ID NO: 12472
  chr4:184322586-184322617
  hypo

SEQ ID NO: 44670 - DNA, 31 bp, Homo sapiens; identical to SEQ ID NO: 2058
  chr4:184328289-184328320
  hypo

SEQ ID NO: 44671 - DNA, 34 bp, Homo sapiens; identical to SEQ ID NO: 2059
  chr4:184328355-184328389
  hypo

SEQ ID NO: 44672 - DNA, 38 bp, Homo sapiens; identical to SEQ ID NO: 12475
  chr4:184339995-184340033
  hypo

SEQ ID NO: 44673 - DNA, 31 bp, Homo sapiens; identical to SEQ ID NO: 12478
  chr4:184546934-184546965
  hypo

SEQ ID NO: 44674 - DNA, 31 bp, Homo sapiens; identical to SEQ ID NO: 12479
  chr4:184649712-184649743
  hypo

SEQ ID NO: 44675 - DNA, 31 bp, Homo sapiens; identical to SEQ ID NO: 12480
  chr4:184670514-184670545
  hypo

SEQ ID NO: 44676 - DNA, 31 bp, Homo sapiens; identical to SEQ ID NO: 12481
  chr4:184670631-184670662
  hypo

SEQ ID NO: 44677 - DNA, 39 bp, Homo sapiens; identical to SEQ ID NO: 12482
  chr4:184670676-184670715
  hypo

SEQ ID NO: 44678 - DNA, 31 bp, Homo sapiens; identical to SEQ ID NO: 12484
  chr4:184952936-184952967
  hypo

SEQ ID NO: 44679 - DNA, 38 bp, Homo sapiens; identical to SEQ ID NO: 12485
  chr4:185185201-185185239
  hypo

SEQ ID NO: 44680 - DNA, 31 bp, Homo sapiens; identical to SEQ ID NO: 12487
  chr4:185239991-185240022
  hypo

SEQ ID NO: 44681 - DNA, 46 bp, Homo sapiens; identical to SEQ ID NO: 12488
  chr4:185240070-185240116
  hypo

SEQ ID NO: 44682 - DNA, 31 bp, Homo sapiens; identical to SEQ ID NO: 12489
  chr4:185352803-185352834
  hypo

SEQ ID NO: 44683 - DNA, 31 bp, Homo sapiens; identical to SEQ ID NO: 12490
  chr4:185353295-185353326
  hypo

SEQ ID NO: 44684 - DNA, 31 bp, Homo sapiens; identical to SEQ ID NO: 12491
  chr4:185480838-185480869
  hypo

SEQ ID NO: 44685 - DNA, 70 bp, Homo sapiens; identical to SEQ ID NO: 12492
  chr4:185873078-185873148
  hypo

SEQ ID NO: 44686 - DNA, 34 bp, Homo sapiens; identical to SEQ ID NO: 2061
  chr4:186130482-186130516
  hypo

SEQ ID NO: 44687 - DNA, 31 bp, Homo sapiens; identical to SEQ ID NO: 2062
  chr4:186130520-186130551
  hypo

SEQ ID NO: 44688 - DNA, 31 bp, Homo sapiens; identical to SEQ ID NO: 12496
  chr4:186580879-186580910
  hypo

SEQ ID NO: 44689 - DNA, 35 bp, Homo sapiens; identical to SEQ ID NO: 12497
  chr4:186933525-186933560
  hypo

SEQ ID NO: 44690 - DNA, 31 bp, Homo sapiens; identical to SEQ ID NO: 2063
  chr4:187066081-187066112
  hypo

SEQ ID NO: 44691 - DNA, 31 bp, Homo sapiens; identical to SEQ ID NO: 12499
  chr4:187206901-187206932
  hypo

SEQ ID NO: 44692 - DNA, 45 bp, Homo sapiens; identical to SEQ ID NO: 12500
  chr4:187206954-187206999
  hypo

SEQ ID NO: 44693 - DNA, 58 bp, Homo sapiens; identical to SEQ ID NO: 12501
  chr4:187207023-187207081
  hypo

SEQ ID NO: 44694 - DNA, 37 bp, Homo sapiens; identical to SEQ ID NO: 12502
  chr4:187509899-187509936
  hypo

SEQ ID NO: 44695 - DNA, 31 bp, Homo sapiens; identical to SEQ ID NO: 12503
  chr4:187527078-187527109
  hypo

SEQ ID NO: 44696 - DNA, 36 bp, Homo sapiens; identical to SEQ ID NO: 12504
  chr4:187527242-187527278
  hypo

SEQ ID NO: 44697 - DNA, 49 bp, Homo sapiens; identical to SEQ ID NO: 12505
  chr4:187550653-187550702
  hypo

SEQ ID NO: 44698 - DNA, 36 bp, Homo sapiens; identical to SEQ ID NO: 12506
  chr4:187550726-187550762
  hypo

SEQ ID NO: 44699 - DNA, 31 bp, Homo sapiens; identical to SEQ ID NO: 12507
  chr4:187550800-187550831
  hypo

SEQ ID NO: 44700 - DNA, 31 bp, Homo sapiens; identical to SEQ ID NO: 12508
  chr4:187552633-187552664
  hypo

SEQ ID NO: 44701 - DNA, 198 bp, Homo sapiens; identical to SEQ ID NO: 36439
  chr4:187647865-187648063
  hypo

SEQ ID NO: 44702 - DNA, 7 bp, Homo sapiens
  chr4:187648119-187648126
  hypo
gcgcctg

SEQ ID NO: 44703 - DNA, 31 bp, Homo sapiens; identical to SEQ ID NO: 12510
  chr4:187680707-187680738
  hypo

SEQ ID NO: 44704 - DNA, 31 bp, Homo sapiens; identical to SEQ ID NO: 12511
  chr4:187796051-187796082
  hypo

SEQ ID NO: 44705 - DNA, 31 bp, Homo sapiens; identical to SEQ ID NO: 2069
  chr4:187855389-187855420
  hypo

SEQ ID NO: 44706 - DNA, 31 bp, Homo sapiens; identical to SEQ ID NO: 12513
  chr4:188428284-188428315
  hypo

SEQ ID NO: 44707 - DNA, 31 bp, Homo sapiens; identical to SEQ ID NO: 12514
  chr4:188593959-188593990
  hypo

SEQ ID NO: 44708 - DNA, 70 bp, Homo sapiens; identical to SEQ ID NO: 12516
  chr4:189100384-189100454
  hypo

SEQ ID NO: 44709 - DNA, 31 bp, Homo sapiens; identical to SEQ ID NO: 12517
  chr4:190509468-190509499
  hypo

SEQ ID NO: 44710 - DNA, 106 bp, Homo sapiens; identical to SEQ ID NO: 12518
  chr4:190509512-190509618
  hypo

SEQ ID NO: 44711 - DNA, 31 bp, Homo sapiens; identical to SEQ ID NO: 12519
  chr5:156162-156193
  hypo

SEQ ID NO: 44712 - DNA, 31 bp, Homo sapiens; identical to SEQ ID NO: 12520
  chr5:286453-286484
  hypo

SEQ ID NO: 44713 - DNA, 31 bp, Homo sapiens; identical to SEQ ID NO: 12521
  chr5:397105-397136
  hypo

SEQ ID NO: 44714 - DNA, 31 bp, Homo sapiens; identical to SEQ ID NO: 12523
  chr5:453958-453989
  hypo

SEQ ID NO: 44715 - DNA, 2 bp, Homo sapiens
  chr5:465821-465823
  hypo
ct

SEQ ID NO: 44716 - DNA, 31 bp, Homo sapiens; identical to SEQ ID NO: 2070
  chr5:472704-472735
  hypo

SEQ ID NO: 44717 - DNA, 31 bp, Homo sapiens; identical to SEQ ID NO: 12526
  chr5:492757-492788
  hypo

SEQ ID NO: 44718 - DNA, 2 bp, Homo sapiens
  chr5:554298-554300
  hypo
tg

SEQ ID NO: 44719 - DNA, 28 bp, Homo sapiens
  chr5:554604-554632
  hypo
gtggggggctgggtcacgggatgaacgg

SEQ ID NO: 44720 - DNA, 45 bp, Homo sapiens
  chr5:554751-554796
  hypo
gatgaacggggggcgggtcacaggatgaaccgtgggtgggtcatg

SEQ ID NO: 44721 - DNA, 5 bp, Homo sapiens
  chr5:554807-554812
  hypo
ggtgg

SEQ ID NO: 44722 - DNA, 31 bp, Homo sapiens; identical to SEQ ID NO: 12534
  chr5:555054-555085
  hypo

SEQ ID NO: 44723 - DNA, 36 bp, Homo sapiens; identical to SEQ ID NO: 2071
  chr5:693797-693833
  hypo

SEQ ID NO: 44724 - DNA, 78 bp, Homo sapiens; identical to SEQ ID NO: 12538
  chr5:750520-750598
  hypo

SEQ ID NO: 44725 - DNA, 31 bp, Homo sapiens; identical to SEQ ID NO: 12539
  chr5:750635-750666
  hypo

SEQ ID NO: 44726 - DNA, 41 bp, Homo sapiens; identical to SEQ ID NO: 12540
  chr5:760083-760124
  hypo

SEQ ID NO: 44727 - DNA, 57 bp, Homo sapiens; identical to SEQ ID NO: 12541
  chr5:881865-881922
  hypo

SEQ ID NO: 44728 - DNA, 92 bp, Homo sapiens; identical to SEQ ID NO: 12542
  chr5:881947-882039
  hypo

SEQ ID NO: 44729 - DNA, 66 bp, Homo sapiens; identical to SEQ ID NO: 12543
  chr5:882040-882106
  hypo

SEQ ID NO: 44730 - DNA, 31 bp, Homo sapiens; identical to SEQ ID NO: 12544
  chr5:936463-936494
  hypo

SEQ ID NO: 44731 - DNA, 31 bp, Homo sapiens; identical to SEQ ID NO: 12545
  chr5:948028-948059
  hypo

SEQ ID NO: 44732 - DNA, 89 bp, Homo sapiens; identical to SEQ ID NO: 12546
  chr5:948090-948179
  hypo

SEQ ID NO: 44733 - DNA, 31 bp, Homo sapiens; identical to SEQ ID NO: 12547
  chr5:962517-962548
  hypo

SEQ ID NO: 44734 - DNA, 2 bp, Homo sapiens
  chr5:1003104-1003106
  hypo
tg

SEQ ID NO: 44735 - DNA, 31 bp, Homo sapiens; identical to SEQ ID NO: 12549
  chr5:1013562-1013593
  hypo

SEQ ID NO: 44736 - DNA, 37 bp, Homo sapiens; identical to SEQ ID NO: 12550
  chr5:1031040-1031077
  hypo

SEQ ID NO: 44737 - DNA, 31 bp, Homo sapiens; identical to SEQ ID NO: 12551
  chr5:1049742-1049773
  hypo

SEQ ID NO: 44738 - DNA, 31 bp, Homo sapiens; identical to SEQ ID NO: 12552
  chr5:1050925-1050956
  hypo

SEQ ID NO: 44739 - DNA, 61 bp, Homo sapiens; identical to SEQ ID NO: 12553
  chr5:1052176-1052237
  hypo

SEQ ID NO: 44740 - DNA, 41 bp, Homo sapiens; identical to SEQ ID NO: 12554
  chr5:1052412-1052453
  hypo

SEQ ID NO: 44741 - DNA, 31 bp, Homo sapiens; identical to SEQ ID NO: 12555
  chr5:1052712-1052743
  hypo

SEQ ID NO: 44742 - DNA, 61 bp, Homo sapiens; identical to SEQ ID NO: 12556
  chr5:1054676-1054737
  hypo

SEQ ID NO: 44743 - DNA, 31 bp, Homo sapiens; identical to SEQ ID NO: 12557
  chr5:1055003-1055034
  hypo

SEQ ID NO: 44744 - DNA, 31 bp, Homo sapiens; identical to SEQ ID NO: 12558
  chr5:1055878-1055909
  hypo

SEQ ID NO: 44745 - DNA, 163 bp, Homo sapiens; identical to SEQ ID NO: 12559
  chr5:1056092-1056255
  hypo

SEQ ID NO: 44746 - DNA, 31 bp, Homo sapiens; identical to SEQ ID NO: 12560
  chr5:1056257-1056288
  hypo

SEQ ID NO: 44747 - DNA, 31 bp, Homo sapiens; identical to SEQ ID NO: 12561
  chr5:1056306-1056337
  hypo

SEQ ID NO: 44748 - DNA, 41 bp, Homo sapiens; identical to SEQ ID NO: 12562
  chr5:1056388-1056429
  hypo

SEQ ID NO: 44749 - DNA, 46 bp, Homo sapiens; identical to SEQ ID NO: 12563
  chr5:1057063-1057109
  hypo

SEQ ID NO: 44750 - DNA, 31 bp, Homo sapiens; identical to SEQ ID NO: 12564
  chr5:1057143-1057174
  hypo

SEQ ID NO: 44751 - DNA, 57 bp, Homo sapiens; identical to SEQ ID NO: 12565
  chr5:1057248-1057305
  hypo

SEQ ID NO: 44752 - DNA, 31 bp, Homo sapiens; identical to SEQ ID NO: 12566
  chr5:1057330-1057361
  hypo

SEQ ID NO: 44753 - DNA, 133 bp, Homo sapiens; identical to SEQ ID NO: 12567
  chr5:1057676-1057809
  hypo

SEQ ID NO: 44754 - DNA, 102 bp, Homo sapiens; identical to SEQ ID NO: 12568
  chr5:1057872-1057974
  hypo

SEQ ID NO: 44755 - DNA, 31 bp, Homo sapiens; identical to SEQ ID NO: 12569
  chr5:1058966-1058997
  hypo

SEQ ID NO: 44756 - DNA, 31 bp, Homo sapiens; identical to SEQ ID NO: 12570
  chr5:1059003-1059034
  hypo

SEQ ID NO: 44757 - DNA, 65 bp, Homo sapiens; identical to SEQ ID NO: 12571
  chr5:1059646-1059711
  hypo

SEQ ID NO: 44758 - DNA, 75 bp, Homo sapiens; identical to SEQ ID NO: 12572
  chr5:1060519-1060594
  hypo

SEQ ID NO: 44759 - DNA, 41 bp, Homo sapiens; identical to SEQ ID NO: 12574
  chr5:1060848-1060889
  hypo

SEQ ID NO: 44760 - DNA, 35 bp, Homo sapiens; identical to SEQ ID NO: 12575
  chr5:1060981-1061016
  hypo

SEQ ID NO: 44761 - DNA, 190 bp, Homo sapiens; identical to SEQ ID NO: 12576
  chr5:1061023-1061213
  hypo

SEQ ID NO: 44762 - DNA, 154 bp, Homo sapiens; identical to SEQ ID NO: 2073
  chr5:1061581-1061735
  hypo

SEQ ID NO: 44763 - DNA, 31 bp, Homo sapiens; identical to SEQ ID NO: 12579
  chr5:1062886-1062917
  hypo

SEQ ID NO: 44764 - DNA, 100 bp, Homo sapiens; identical to SEQ ID NO: 12580
  chr5:1062967-1063067
  hypo

SEQ ID NO: 44765 - DNA, 90 bp, Homo sapiens; identical to SEQ ID NO: 12581
  chr5:1063070-1063160
  hypo

SEQ ID NO: 44766 - DNA, 100 bp, Homo sapiens; identical to SEQ ID NO: 12582
  chr5:1063202-1063302
  hypo

SEQ ID NO: 44767 - DNA, 31 bp, Homo sapiens; identical to SEQ ID NO: 12583
  chr5:1063304-1063335
  hypo

SEQ ID NO: 44768 - DNA, 31 bp, Homo sapiens; identical to SEQ ID NO: 12584
  chr5:1063374-1063405
  hypo

SEQ ID NO: 44769 - DNA, 31 bp, Homo sapiens; identical to SEQ ID NO: 12585
  chr5:1063437-1063468
  hypo

SEQ ID NO: 44770 - DNA, 31 bp, Homo sapiens; identical to SEQ ID NO: 12586
  chr5:1063496-1063527
  hypo

SEQ ID NO: 44771 - DNA, 46 bp, Homo sapiens; identical to SEQ ID NO: 12587
  chr5:1063537-1063583
  hypo

SEQ ID NO: 44772 - DNA, 40 bp, Homo sapiens; identical to SEQ ID NO: 12588
  chr5:1063687-1063727
  hypo

SEQ ID NO: 44773 - DNA, 37 bp, Homo sapiens; identical to SEQ ID NO: 2074
  chr5:1064051-1064088
  hypo

SEQ ID NO: 44774 - DNA, 143 bp, Homo sapiens; identical to SEQ ID NO: 2075
  chr5:1064116-1064259
  hypo

SEQ ID NO: 44775 - DNA, 220 bp, Homo sapiens; identical to SEQ ID NO: 2076
  chr5:1064261-1064481
  hypo

SEQ ID NO: 44776 - DNA, 31 bp, Homo sapiens; identical to SEQ ID NO: 2077
  chr5:1064568-1064599
  hypo

SEQ ID NO: 44777 - DNA, 270 bp, Homo sapiens; identical to SEQ ID NO: 2078
  chr5:1064616-1064886
  hypo

SEQ ID NO: 44778 - DNA, 97 bp, Homo sapiens; identical to SEQ ID NO: 2079
  chr5:1065012-1065109
  hypo

SEQ ID NO: 44779 - DNA, 50 bp, Homo sapiens; identical to SEQ ID NO: 12595
  chr5:1065119-1065169
  hypo

SEQ ID NO: 44780 - DNA, 34 bp, Homo sapiens; identical to SEQ ID NO: 12596
  chr5:1065213-1065247
  hypo

SEQ ID NO: 44781 - DNA, 56 bp, Homo sapiens; identical to SEQ ID NO: 12597
  chr5:1065255-1065311
  hypo

SEQ ID NO: 44782 - DNA, 83 bp, Homo sapiens; identical to SEQ ID NO: 12598
  chr5:1065313-1065396
  hypo

SEQ ID NO: 44783 - DNA, 63 bp, Homo sapiens; identical to SEQ ID NO: 12599
  chr5:1066028-1066091
  hypo

SEQ ID NO: 44784 - DNA, 108 bp, Homo sapiens; identical to SEQ ID NO: 12600
  chr5:1066125-1066233
  hypo

SEQ ID NO: 44785 - DNA, 59 bp, Homo sapiens; identical to SEQ ID NO: 12601
  chr5:1066840-1066899
  hypo

SEQ ID NO: 44786 - DNA, 31 bp, Homo sapiens; identical to SEQ ID NO: 12602
  chr5:1067373-1067404
  hypo

SEQ ID NO: 44787 - DNA, 31 bp, Homo sapiens; identical to SEQ ID NO: 12603
  chr5:1068168-1068199
  hypo

SEQ ID NO: 44788 - DNA, 68 bp, Homo sapiens; identical to SEQ ID NO: 12604
  chr5:1068742-1068810
  hypo

SEQ ID NO: 44789 - DNA, 146 bp, Homo sapiens; identical to SEQ ID NO: 12605
  chr5:1068815-1068961
  hypo

SEQ ID NO: 44790 - DNA, 44 bp, Homo sapiens; identical to SEQ ID NO: 12606
  chr5:1068968-1069012
  hypo

SEQ ID NO: 44791 - DNA, 31 bp, Homo sapiens; identical to SEQ ID NO: 12607
  chr5:1069442-1069473
  hypo

SEQ ID NO: 44792 - DNA, 46 bp, Homo sapiens; identical to SEQ ID NO: 12608
  chr5:1074938-1074984
  hypo

SEQ ID NO: 44793 - DNA, 51 bp, Homo sapiens; identical to SEQ ID NO: 12609
  chr5:1074985-1075036
  hypo

SEQ ID NO: 44794 - DNA, 44 bp, Homo sapiens; identical to SEQ ID NO: 12610
  chr5:1076149-1076193
  hypo

SEQ ID NO: 44795 - DNA, 35 bp, Homo sapiens; identical to SEQ ID NO: 12611
  chr5:1076214-1076249
  hypo

SEQ ID NO: 44796 - DNA, 52 bp, Homo sapiens; identical to SEQ ID NO: 12612
  chr5:1076254-1076306
  hypo

SEQ ID NO: 44797 - DNA, 47 bp, Homo sapiens; identical to SEQ ID NO: 12613
  chr5:1076344-1076391
  hypo

SEQ ID NO: 44798 - DNA, 60 bp, Homo sapiens; identical to SEQ ID NO: 12614
  chr5:1076436-1076496
  hypo

SEQ ID NO: 44799 - DNA, 123 bp, Homo sapiens; identical to SEQ ID NO: 12615
  chr5:1077829-1077952
  hypo

SEQ ID NO: 44800 - DNA, 91 bp, Homo sapiens; identical to SEQ ID NO: 12616
  chr5:1077978-1078069
  hypo

SEQ ID NO: 44801 - DNA, 93 bp, Homo sapiens; identical to SEQ ID NO: 12617
  chr5:1078071-1078164
  hypo

SEQ ID NO: 44802 - DNA, 91 bp, Homo sapiens; identical to SEQ ID NO: 12618
  chr5:1078185-1078276
  hypo

SEQ ID NO: 44803 - DNA, 31 bp, Homo sapiens; identical to SEQ ID NO: 12619
  chr5:1078338-1078369
  hypo

SEQ ID NO: 44804 - DNA, 31 bp, Homo sapiens; identical to SEQ ID NO: 12620
  chr5:1078425-1078456
  hypo

SEQ ID NO: 44805 - DNA, 31 bp, Homo sapiens; identical to SEQ ID NO: 12621
  chr5:1078529-1078560
  hypo

SEQ ID NO: 44806 - DNA, 31 bp, Homo sapiens; identical to SEQ ID NO: 12622
  chr5:1078565-1078596
  hypo

SEQ ID NO: 44807 - DNA, 73 bp, Homo sapiens; identical to SEQ ID NO: 12623
  chr5:1078867-1078940
  hypo

SEQ ID NO: 44808 - DNA, 146 bp, Homo sapiens; identical to SEQ ID NO: 12624
  chr5:1078960-1079106
  hypo

SEQ ID NO: 44809 - DNA, 31 bp, Homo sapiens; identical to SEQ ID NO: 12625
  chr5:1079119-1079150
  hypo

SEQ ID NO: 44810 - DNA, 50 bp, Homo sapiens; identical to SEQ ID NO: 12626
  chr5:1079345-1079395
  hypo

SEQ ID NO: 44811 - DNA, 78 bp, Homo sapiens; identical to SEQ ID NO: 12627
  chr5:1080130-1080208
  hypo

SEQ ID NO: 44812 - DNA, 39 bp, Homo sapiens; identical to SEQ ID NO: 12628
  chr5:1080284-1080323
  hypo

SEQ ID NO: 44813 - DNA, 55 bp, Homo sapiens; identical to SEQ ID NO: 12629
  chr5:1080434-1080489
  hypo

SEQ ID NO: 44814 - DNA, 59 bp, Homo sapiens; identical to SEQ ID NO: 12630
  chr5:1081413-1081472
  hypo

SEQ ID NO: 44815 - DNA, 30 bp, Homo sapiens; identical to SEQ ID NO: 12631
  chr5:1081477-1081507
  hypo

SEQ ID NO: 44816 - DNA, 54 bp, Homo sapiens; identical to SEQ ID NO: 12632
  chr5:1083625-1083679
  hypo

SEQ ID NO: 44817 - DNA, 31 bp, Homo sapiens; identical to SEQ ID NO: 12633
  chr5:1083725-1083756
  hypo

SEQ ID NO: 44818 - DNA, 66 bp, Homo sapiens; identical to SEQ ID NO: 12634
  chr5:1083768-1083834
  hypo

SEQ ID NO: 44819 - DNA, 36 bp, Homo sapiens; identical to SEQ ID NO: 12635
  chr5:1083863-1083899
  hypo

SEQ ID NO: 44820 - DNA, 58 bp, Homo sapiens; identical to SEQ ID NO: 12636
  chr5:1083912-1083970
  hypo

SEQ ID NO: 44821 - DNA, 89 bp, Homo sapiens; identical to SEQ ID NO: 12637
  chr5:1084002-1084091
  hypo

SEQ ID NO: 44822 - DNA, 36 bp, Homo sapiens; identical to SEQ ID NO: 12638
  chr5:1084145-1084181
  hypo

SEQ ID NO: 44823 - DNA, 52 bp, Homo sapiens; identical to SEQ ID NO: 12639
  chr5:1084267-1084319
  hypo

SEQ ID NO: 44824 - DNA, 31 bp, Homo sapiens; identical to SEQ ID NO: 12640
  chr5:1084668-1084699
  hypo

SEQ ID NO: 44825 - DNA, 603 bp, Homo sapiens; identical to SEQ ID NO: 12641
  chr5:1085306-1085909
  hypo

SEQ ID NO: 44826 - DNA, 48 bp, Homo sapiens; identical to SEQ ID NO: 12642
  chr5:1085910-1085958
  hypo

SEQ ID NO: 44827 - DNA, 83 bp, Homo sapiens; identical to SEQ ID NO: 12643
  chr5:1085983-1086066
  hypo

SEQ ID NO: 44828 - DNA, 37 bp, Homo sapiens; identical to SEQ ID NO: 12644
  chr5:1086076-1086113
  hypo

SEQ ID NO: 44829 - DNA, 31 bp, Homo sapiens; identical to SEQ ID NO: 12645
  chr5:1086242-1086273
  hypo

SEQ ID NO: 44830 - DNA, 31 bp, Homo sapiens; identical to SEQ ID NO: 12646
  chr5:1086827-1086858
  hypo

SEQ ID NO: 44831 - DNA, 248 bp, Homo sapiens; identical to SEQ ID NO: 12647
  chr5:1087126-1087374
  hypo

SEQ ID NO: 44832 - DNA, 73 bp, Homo sapiens; identical to SEQ ID NO: 12648
  chr5:1087849-1087922
  hypo

SEQ ID NO: 44833 - DNA, 31 bp, Homo sapiens; identical to SEQ ID NO: 12649
  chr5:1087936-1087967
  hypo

SEQ ID NO: 44834 - DNA, 31 bp, Homo sapiens; identical to SEQ ID NO: 12650
  chr5:1087973-1088004
  hypo

SEQ ID NO: 44835 - DNA, 31 bp, Homo sapiens; identical to SEQ ID NO: 12651
  chr5:1088062-1088093
  hypo

SEQ ID NO: 44836 - DNA, 82 bp, Homo sapiens; identical to SEQ ID NO: 12652
  chr5:1088100-1088182
  hypo

SEQ ID NO: 44837 - DNA, 189 bp, Homo sapiens; identical to SEQ ID NO: 12653
  chr5:1088187-1088376
  hypo

SEQ ID NO: 44838 - DNA, 95 bp, Homo sapiens; identical to SEQ ID NO: 12654
  chr5:1088382-1088477
  hypo

SEQ ID NO: 44839 - DNA, 46 bp, Homo sapiens; identical to SEQ ID NO: 12655
  chr5:1088624-1088670
  hypo

SEQ ID NO: 44840 - DNA, 31 bp, Homo sapiens; identical to SEQ ID NO: 12656
  chr5:1088673-1088704
  hypo

SEQ ID NO: 44841 - DNA, 38 bp, Homo sapiens; identical to SEQ ID NO: 12657
  chr5:1088761-1088799
  hypo

SEQ ID NO: 44842 - DNA, 230 bp, Homo sapiens; identical to SEQ ID NO: 12658
  chr5:1088805-1089035
  hypo

SEQ ID NO: 44843 - DNA, 57 bp, Homo sapiens; identical to SEQ ID NO: 12659
  chr5:1089040-1089097
  hypo

SEQ ID NO: 44844 - DNA, 101 bp, Homo sapiens; identical to SEQ ID NO: 12660
  chr5:1089188-1089289
  hypo

SEQ ID NO: 44845 - DNA, 36 bp, Homo sapiens; identical to SEQ ID NO: 12661
  chr5:1090421-1090457
  hypo

SEQ ID NO: 44846 - DNA, 71 bp, Homo sapiens; identical to SEQ ID NO: 12662
  chr5:1090502-1090573
  hypo

SEQ ID NO: 44847 - DNA, 31 bp, Homo sapiens; identical to SEQ ID NO: 12663
  chr5:1090632-1090663
  hypo

SEQ ID NO: 44848 - DNA, 58 bp, Homo sapiens; identical to SEQ ID NO: 12664
  chr5:1091173-1091231
  hypo

SEQ ID NO: 44849 - DNA, 38 bp, Homo sapiens; identical to SEQ ID NO: 12665
  chr5:1092773-1092811
  hypo

SEQ ID NO: 44850 - DNA, 2 bp, Homo sapiens
  chr5:1094018-1094020
  hypo
gg

SEQ ID NO: 44851 - DNA, 31 bp, Homo sapiens; identical to SEQ ID NO: 12667
  chr5:1094547-1094578
  hypo

SEQ ID NO: 44852 - DNA, 31 bp, Homo sapiens; identical to SEQ ID NO: 12668
  chr5:1094655-1094686
  hypo

SEQ ID NO: 44853 - DNA, 53 bp, Homo sapiens; identical to SEQ ID NO: 12669
  chr5:1095612-1095665
  hypo

SEQ ID NO: 44854 - DNA, 56 bp, Homo sapiens; identical to SEQ ID NO: 12670
  chr5:1095704-1095760
  hypo

SEQ ID NO: 44855 - DNA, 107 bp, Homo sapiens; identical to SEQ ID NO: 12671
  chr5:1095830-1095937
  hypo

SEQ ID NO: 44856 - DNA, 138 bp, Homo sapiens; identical to SEQ ID NO: 2080
  chr5:1111380-1111518
  hypo

SEQ ID NO: 44857 - DNA, 132 bp, Homo sapiens; identical to SEQ ID NO: 2081
  chr5:1111655-1111787
  hypo

SEQ ID NO: 44858 - DNA, 31 bp, Homo sapiens; identical to SEQ ID NO: 2082
  chr5:1111873-1111904
  hypo

SEQ ID NO: 44859 - DNA, 31 bp, Homo sapiens; identical to SEQ ID NO: 2083
  chr5:1111996-1112027
  hypo

SEQ ID NO: 44860 - DNA, 68 bp, Homo sapiens; identical to SEQ ID NO: 2084
  chr5:1112174-1112242
  hypo

SEQ ID NO: 44861 - DNA, 35 bp, Homo sapiens; identical to SEQ ID NO: 2085
  chr5:1112256-1112291
  hypo

SEQ ID NO: 44862 - DNA, 98 bp, Homo sapiens; identical to SEQ ID NO: 2086
  chr5:1112303-1112401
  hypo

SEQ ID NO: 44863 - DNA, 90 bp, Homo sapiens; identical to SEQ ID NO: 12679
  chr5:1115141-1115231
  hypo

SEQ ID NO: 44864 - DNA, 31 bp, Homo sapiens; identical to SEQ ID NO: 12680
  chr5:1115242-1115273
  hypo

SEQ ID NO: 44865 - DNA, 31 bp, Homo sapiens; identical to SEQ ID NO: 12681
  chr5:1115288-1115319
  hypo

SEQ ID NO: 44866 - DNA, 43 bp, Homo sapiens; identical to SEQ ID NO: 12682
  chr5:1115328-1115371
  hypo

SEQ ID NO: 44867 - DNA, 83 bp, Homo sapiens; identical to SEQ ID NO: 12683
  chr5:1116659-1116742
  hypo

SEQ ID NO: 44868 - DNA, 31 bp, Homo sapiens; identical to SEQ ID NO: 12684
  chr5:1116758-1116789
  hypo

SEQ ID NO: 44869 - DNA, 31 bp, Homo sapiens; identical to SEQ ID NO: 12685
  chr5:1120598-1120629
  hypo

SEQ ID NO: 44870 - DNA, 31 bp, Homo sapiens; identical to SEQ ID NO: 12686
  chr5:1120638-1120669
  hypo

SEQ ID NO: 44871 - DNA, 31 bp, Homo sapiens; identical to SEQ ID NO: 12687
  chr5:1121381-1121412
  hypo

SEQ ID NO: 44872 - DNA, 49 bp, Homo sapiens; identical to SEQ ID NO: 12688
  chr5:1122643-1122692
  hypo

SEQ ID NO: 44873 - DNA, 31 bp, Homo sapiens; identical to SEQ ID NO: 12689
  chr5:1129214-1129245
  hypo

SEQ ID NO: 44874 - DNA, 31 bp, Homo sapiens; identical to SEQ ID NO: 12690
  chr5:1129555-1129586
  hypo

SEQ ID NO: 44875 - DNA, 31 bp, Homo sapiens; identical to SEQ ID NO: 12691
  chr5:1149269-1149300
  hypo

SEQ ID NO: 44876 - DNA, 2 bp, Homo sapiens
  chr5:1213549-1213551
  hypo
cc

SEQ ID NO: 44877 - DNA, 55 bp, Homo sapiens; identical to SEQ ID NO: 12693
  chr5:1266472-1266527
  hypo

SEQ ID NO: 44878 - DNA, 31 bp, Homo sapiens; identical to SEQ ID NO: 12694
  chr5:1272203-1272234
  hypo

SEQ ID NO: 44879 - DNA, 2 bp, Homo sapiens
  chr5:1272252-1272254
  hypo
cc

SEQ ID NO: 44880 - DNA, 2 bp, Homo sapiens
  chr5:1294181-1294183
  hypo
ca

SEQ ID NO: 44881 - DNA, 31 bp, Homo sapiens; identical to SEQ ID NO: 12698
  chr5:1341689-1341720
  hypo

SEQ ID NO: 44882 - DNA, 31 bp, Homo sapiens; identical to SEQ ID NO: 12699
  chr5:1342378-1342409
  hypo

SEQ ID NO: 44883 - DNA, 2 bp, Homo sapiens
  chr5:1381048-1381050
  hypo
gg

SEQ ID NO: 44884 - DNA, 1 bp, Homo sapiens
  chr5:1381087-1381088
  hypo
t

SEQ ID NO: 44885 - DNA, 1 bp, Homo sapiens
  chr5:1381147-1381148
  hypo
a

SEQ ID NO: 44886 - DNA, 3 bp, Homo sapiens
  chr5:1381244-1381247
  hypo
cct

SEQ ID NO: 44887 - DNA, 31 bp, Homo sapiens; identical to SEQ ID NO: 12703
  chr5:1490330-1490361
  hypo

SEQ ID NO: 44888 - DNA, 31 bp, Homo sapiens; identical to SEQ ID NO: 12704
  chr5:1490395-1490426
  hypo

SEQ ID NO: 44889 - DNA, 31 bp, Homo sapiens; identical to SEQ ID NO: 12705
  chr5:1511331-1511362
  hypo

SEQ ID NO: 44890 - DNA, 31 bp, Homo sapiens; identical to SEQ ID NO: 12706
  chr5:1588247-1588278
  hypo

SEQ ID NO: 44891 - DNA, 31 bp, Homo sapiens; identical to SEQ ID NO: 12708
  chr5:1786713-1786744
  hypo

SEQ ID NO: 44892 - DNA, 44 bp, Homo sapiens; identical to SEQ ID NO: 12709
  chr5:1815266-1815310
  hypo

SEQ ID NO: 44893 - DNA, 35 bp, Homo sapiens; identical to SEQ ID NO: 12710
  chr5:1815351-1815386
  hypo

SEQ ID NO: 44894 - DNA, 58 bp, Homo sapiens; identical to SEQ ID NO: 12711
  chr5:1815394-1815452
  hypo

SEQ ID NO: 44895 - DNA, 31 bp, Homo sapiens; identical to SEQ ID NO: 12712
  chr5:1840310-1840341
  hypo

SEQ ID NO: 44896 - DNA, 31 bp, Homo sapiens; identical to SEQ ID NO: 12713
  chr5:2007815-2007846
  hypo

SEQ ID NO: 44897 - DNA, 31 bp, Homo sapiens; identical to SEQ ID NO: 12714
  chr5:2181885-2181916
  hypo

SEQ ID NO: 44898 - DNA, 30 bp, Homo sapiens
  chr5:3325333-3325363
  hypo
gccctagctgttcggcgtgtgtgtgtgtgt

SEQ ID NO: 44899 - DNA, 31 bp, Homo sapiens; identical to SEQ ID NO: 12721
  chr5:6546412-6546443
  hypo

SEQ ID NO: 44900 - DNA, 77 bp, Homo sapiens; identical to SEQ ID NO: 12723
  chr5:10278514-10278591
  hypo

SEQ ID NO: 44901 - DNA, 31 bp, Homo sapiens; identical to SEQ ID NO: 12724
  chr5:10278674-10278705
  hypo

SEQ ID NO: 44902 - DNA, 31 bp, Homo sapiens; identical to SEQ ID NO: 12725
  chr5:10296893-10296924
  hypo

SEQ ID NO: 44903 - DNA, 57 bp, Homo sapiens; identical to SEQ ID NO: 12726
  chr5:10322103-10322160
  hypo

SEQ ID NO: 44904 - DNA, 31 bp, Homo sapiens; identical to SEQ ID NO: 12728
  chr5:10352315-10352346
  hypo

SEQ ID NO: 44905 - DNA, 31 bp, Homo sapiens; identical to SEQ ID NO: 12729
  chr5:10477381-10477412
  hypo

SEQ ID NO: 44906 - DNA, 31 bp, Homo sapiens; identical to SEQ ID NO: 12730
  chr5:10483795-10483826
  hypo

SEQ ID NO: 44907 - DNA, 31 bp, Homo sapiens; identical to SEQ ID NO: 12731
  chr5:10486100-10486131
  hypo

SEQ ID NO: 44908 - DNA, 31 bp, Homo sapiens; identical to SEQ ID NO: 12732
  chr5:10486176-10486207
  hypo

SEQ ID NO: 44909 - DNA, 47 bp, Homo sapiens; identical to SEQ ID NO: 2096
  chr5:10564408-10564455
  hypo

SEQ ID NO: 44910 - DNA, 2 bp, Homo sapiens
  chr5:10564470-10564472
  hypo
ac

SEQ ID NO: 44911 - DNA, 37 bp, Homo sapiens; identical to SEQ ID NO: 12738
  chr5:10618605-10618642
  hypo

SEQ ID NO: 44912 - DNA, 31 bp, Homo sapiens; identical to SEQ ID NO: 12739
  chr5:14046165-14046196
  hypo

SEQ ID NO: 44913 - DNA, 31 bp, Homo sapiens; identical to SEQ ID NO: 12740
  chr5:14122605-14122636
  hypo

SEQ ID NO: 44914 - DNA, 132 bp, Homo sapiens; identical to SEQ ID NO: 2104
  chr5:14143001-14143133
  hypo

SEQ ID NO: 44915 - DNA, 45 bp, Homo sapiens; identical to SEQ ID NO: 2105
  chr5:14143190-14143235
  hypo

SEQ ID NO: 44916 - DNA, 166 bp, Homo sapiens; identical to SEQ ID NO: 2106
  chr5:14143456-14143622
  hypo

SEQ ID NO: 44917 - DNA, 49 bp, Homo sapiens; identical to SEQ ID NO: 2107
  chr5:14143766-14143815
  hypo

SEQ ID NO: 44918 - DNA, 166 bp, Homo sapiens; identical to SEQ ID NO: 2108
  chr5:14143872-14144038
  hypo

SEQ ID NO: 44919 - DNA, 113 bp, Homo sapiens; identical to SEQ ID NO: 2109
  chr5:14144296-14144409
  hypo

SEQ ID NO: 44920 - DNA, 35 bp, Homo sapiens; identical to SEQ ID NO: 12749
  chr5:14253720-14253755
  hypo

SEQ ID NO: 44921 - DNA, 31 bp, Homo sapiens; identical to SEQ ID NO: 12750
  chr5:14253783-14253814
  hypo

SEQ ID NO: 44922 - DNA, 53 bp, Homo sapiens; identical to SEQ ID NO: 12751
  chr5:14273914-14273967
  hypo

SEQ ID NO: 44923 - DNA, 37 bp, Homo sapiens; identical to SEQ ID NO: 12752
  chr5:14274010-14274047
  hypo

SEQ ID NO: 44924 - DNA, 31 bp, Homo sapiens; identical to SEQ ID NO: 12753
  chr5:14274065-14274096
  hypo

SEQ ID NO: 44925 - DNA, 31 bp, Homo sapiens; identical to SEQ ID NO: 12754
  chr5:14289049-14289080
  hypo

SEQ ID NO: 44926 - DNA, 57 bp, Homo sapiens; identical to SEQ ID NO: 12755
  chr5:14303325-14303382
  hypo

SEQ ID NO: 44927 - DNA, 31 bp, Homo sapiens; identical to SEQ ID NO: 12756
  chr5:14303397-14303428
  hypo

SEQ ID NO: 44928 - DNA, 49 bp, Homo sapiens; identical to SEQ ID NO: 12757
  chr5:14303467-14303516
  hypo

SEQ ID NO: 44929 - DNA, 42 bp, Homo sapiens; identical to SEQ ID NO: 12758
  chr5:14315627-14315669
  hypo

SEQ ID NO: 44930 - DNA, 57 bp, Homo sapiens; identical to SEQ ID NO: 12760
  chr5:14325500-14325557
  hypo

SEQ ID NO: 44931 - DNA, 31 bp, Homo sapiens; identical to SEQ ID NO: 12762
  chr5:14338463-14338494
  hypo

SEQ ID NO: 44932 - DNA, 41 bp, Homo sapiens; identical to SEQ ID NO: 12763
  chr5:14338521-14338562
  hypo

SEQ ID NO: 44933 - DNA, 45 bp, Homo sapiens; identical to SEQ ID NO: 12764
  chr5:14338578-14338623
  hypo

SEQ ID NO: 44934 - DNA, 35 bp, Homo sapiens; identical to SEQ ID NO: 12765
  chr5:14349006-14349041
  hypo

SEQ ID NO: 44935 - DNA, 31 bp, Homo sapiens; identical to SEQ ID NO: 12766
  chr5:14349045-14349076
  hypo

SEQ ID NO: 44936 - DNA, 35 bp, Homo sapiens; identical to SEQ ID NO: 12767
  chr5:14349082-14349117
  hypo

SEQ ID NO: 44937 - DNA, 35 bp, Homo sapiens; identical to SEQ ID NO: 12768
  chr5:14349127-14349162
  hypo

SEQ ID NO: 44938 - DNA, 31 bp, Homo sapiens; identical to SEQ ID NO: 12769
  chr5:14368814-14368845
  hypo

SEQ ID NO: 44939 - DNA, 36 bp, Homo sapiens; identical to SEQ ID NO: 12770
  chr5:14369626-14369662
  hypo

SEQ ID NO: 44940 - DNA, 46 bp, Homo sapiens; identical to SEQ ID NO: 12771
  chr5:14369673-14369719
  hypo

SEQ ID NO: 44941 - DNA, 31 bp, Homo sapiens; identical to SEQ ID NO: 12772
  chr5:14369738-14369769
  hypo

SEQ ID NO: 44942 - DNA, 31 bp, Homo sapiens; identical to SEQ ID NO: 12773
  chr5:14378047-14378078
  hypo

SEQ ID NO: 44943 - DNA, 31 bp, Homo sapiens; identical to SEQ ID NO: 12774
  chr5:14378127-14378158
  hypo

SEQ ID NO: 44944 - DNA, 54 bp, Homo sapiens; identical to SEQ ID NO: 12775
  chr5:14378169-14378223
  hypo

SEQ ID NO: 44945 - DNA, 60 bp, Homo sapiens; identical to SEQ ID NO: 12776
  chr5:14381248-14381308
  hypo

SEQ ID NO: 44946 - DNA, 31 bp, Homo sapiens; identical to SEQ ID NO: 12777
  chr5:14381320-14381351
  hypo

SEQ ID NO: 44947 - DNA, 35 bp, Homo sapiens; identical to SEQ ID NO: 12778
  chr5:14390711-14390746
  hypo

SEQ ID NO: 44948 - DNA, 31 bp, Homo sapiens; identical to SEQ ID NO: 12779
  chr5:14390752-14390783
  hypo

SEQ ID NO: 44949 - DNA, 42 bp, Homo sapiens; identical to SEQ ID NO: 12780
  chr5:14390790-14390832
  hypo

SEQ ID NO: 44950 - DNA, 31 bp, Homo sapiens; identical to SEQ ID NO: 12781
  chr5:14390834-14390865
  hypo

SEQ ID NO: 44951 - DNA, 31 bp, Homo sapiens; identical to SEQ ID NO: 12782
  chr5:14390944-14390975
  hypo

SEQ ID NO: 44952 - DNA, 74 bp, Homo sapiens; identical to SEQ ID NO: 12783
  chr5:14409997-14410071
  hypo

SEQ ID NO: 44953 - DNA, 31 bp, Homo sapiens; identical to SEQ ID NO: 12784
  chr5:14420064-14420095
  hypo

SEQ ID NO: 44954 - DNA, 43 bp, Homo sapiens; identical to SEQ ID NO: 12785
  chr5:14420167-14420210
  hypo

SEQ ID NO: 44955 - DNA, 31 bp, Homo sapiens; identical to SEQ ID NO: 12786
  chr5:14426902-14426933
  hypo

SEQ ID NO: 44956 - DNA, 65 bp, Homo sapiens; identical to SEQ ID NO: 12787
  chr5:14427741-14427806
  hypo

SEQ ID NO: 44957 - DNA, 58 bp, Homo sapiens; identical to SEQ ID NO: 12788
  chr5:14427843-14427901
  hypo

SEQ ID NO: 44958 - DNA, 31 bp, Homo sapiens; identical to SEQ ID NO: 12789
  chr5:14431095-14431126
  hypo

SEQ ID NO: 44959 - DNA, 58 bp, Homo sapiens; identical to SEQ ID NO: 12790
  chr5:14435334-14435392
  hypo

SEQ ID NO: 44960 - DNA, 62 bp, Homo sapiens; identical to SEQ ID NO: 12792
  chr5:14454375-14454437
  hypo

SEQ ID NO: 44961 - DNA, 31 bp, Homo sapiens; identical to SEQ ID NO: 12793
  chr5:14454470-14454501
  hypo

SEQ ID NO: 44962 - DNA, 47 bp, Homo sapiens; identical to SEQ ID NO: 12794
  chr5:14459598-14459645
  hypo

SEQ ID NO: 44963 - DNA, 86 bp, Homo sapiens; identical to SEQ ID NO: 12796
  chr5:14460408-14460494
  hypo

SEQ ID NO: 44964 - DNA, 31 bp, Homo sapiens; identical to SEQ ID NO: 12797
  chr5:14461136-14461167
  hypo

SEQ ID NO: 44965 - DNA, 49 bp, Homo sapiens; identical to SEQ ID NO: 12798
  chr5:14461195-14461244
  hypo

SEQ ID NO: 44966 - DNA, 77 bp, Homo sapiens; identical to SEQ ID NO: 12799
  chr5:14461251-14461328
  hypo

SEQ ID NO: 44967 - DNA, 52 bp, Homo sapiens; identical to SEQ ID NO: 12800
  chr5:14461340-14461392
  hypo

SEQ ID NO: 44968 - DNA, 44 bp, Homo sapiens; identical to SEQ ID NO: 12801
  chr5:14485222-14485266
  hypo

SEQ ID NO: 44969 - DNA, 31 bp, Homo sapiens; identical to SEQ ID NO: 12802
  chr5:14485278-14485309
  hypo

SEQ ID NO: 44970 - DNA, 31 bp, Homo sapiens; identical to SEQ ID NO: 12803
  chr5:14485323-14485354
  hypo

SEQ ID NO: 44971 - DNA, 31 bp, Homo sapiens; identical to SEQ ID NO: 12804
  chr5:14485379-14485410
  hypo

SEQ ID NO: 44972 - DNA, 47 bp, Homo sapiens; identical to SEQ ID NO: 12805
  chr5:14487502-14487549
  hypo

SEQ ID NO: 44973 - DNA, 101 bp, Homo sapiens; identical to SEQ ID NO: 12806
  chr5:14488199-14488300
  hypo

SEQ ID NO: 44974 - DNA, 87 bp, Homo sapiens; identical to SEQ ID NO: 12807
  chr5:14488414-14488501
  hypo

SEQ ID NO: 44975 - DNA, 31 bp, Homo sapiens; identical to SEQ ID NO: 12808
  chr5:14488667-14488698
  hypo

SEQ ID NO: 44976 - DNA, 57 bp, Homo sapiens; identical to SEQ ID NO: 12809
  chr5:14489507-14489564
  hypo

SEQ ID NO: 44977 - DNA, 42 bp, Homo sapiens; identical to SEQ ID NO: 12810
  chr5:14489593-14489635
  hypo

SEQ ID NO: 44978 - DNA, 31 bp, Homo sapiens; identical to SEQ ID NO: 12811
  chr5:14489660-14489691
  hypo

SEQ ID NO: 44979 - DNA, 31 bp, Homo sapiens; identical to SEQ ID NO: 12812
  chr5:14492757-14492788
  hypo

SEQ ID NO: 44980 - DNA, 54 bp, Homo sapiens; identical to SEQ ID NO: 12813
  chr5:14492803-14492857
  hypo

SEQ ID NO: 44981 - DNA, 46 bp, Homo sapiens; identical to SEQ ID NO: 12814
  chr5:14492880-14492926
  hypo

SEQ ID NO: 44982 - DNA, 35 bp, Homo sapiens; identical to SEQ ID NO: 12815
  chr5:14493320-14493355
  hypo

SEQ ID NO: 44983 - DNA, 31 bp, Homo sapiens; identical to SEQ ID NO: 12816
  chr5:14493409-14493440
  hypo

SEQ ID NO: 44984 - DNA, 51 bp, Homo sapiens; identical to SEQ ID NO: 12817
  chr5:14493445-14493496
  hypo

SEQ ID NO: 44985 - DNA, 43 bp, Homo sapiens; identical to SEQ ID NO: 12818
  chr5:14498252-14498295
  hypo

SEQ ID NO: 44986 - DNA, 31 bp, Homo sapiens; identical to SEQ ID NO: 12819
  chr5:14498372-14498403
  hypo

SEQ ID NO: 44987 - DNA, 89 bp, Homo sapiens; identical to SEQ ID NO: 12820
  chr5:14498424-14498513
  hypo

SEQ ID NO: 44988 - DNA, 238 bp, Homo sapiens; identical to SEQ ID NO: 12821
  chr5:14498552-14498790
  hypo

SEQ ID NO: 44989 - DNA, 99 bp, Homo sapiens; identical to SEQ ID NO: 12822
  chr5:14504055-14504154
  hypo

SEQ ID NO: 44990 - DNA, 31 bp, Homo sapiens; identical to SEQ ID NO: 12823
  chr5:14504531-14504562
  hypo

SEQ ID NO: 44991 - DNA, 31 bp, Homo sapiens; identical to SEQ ID NO: 12824
  chr5:14505470-14505501
  hypo

SEQ ID NO: 44992 - DNA, 31 bp, Homo sapiens; identical to SEQ ID NO: 12825
  chr5:14507311-14507342
  hypo

SEQ ID NO: 44993 - DNA, 73 bp, Homo sapiens; identical to SEQ ID NO: 12826
  chr5:14507366-14507439
  hypo

SEQ ID NO: 44994 - DNA, 116 bp, Homo sapiens; identical to SEQ ID NO: 12827
  chr5:14507565-14507681
  hypo

SEQ ID NO: 44995 - DNA, 51 bp, Homo sapiens; identical to SEQ ID NO: 12828
  chr5:14508325-14508376
  hypo

SEQ ID NO: 44996 - DNA, 34 bp, Homo sapiens; identical to SEQ ID NO: 12829
  chr5:14508434-14508468
  hypo

SEQ ID NO: 44997 - DNA, 31 bp, Homo sapiens; identical to SEQ ID NO: 12830
  chr5:14509070-14509101
  hypo

SEQ ID NO: 44998 - DNA, 31 bp, Homo sapiens; identical to SEQ ID NO: 12831
  chr5:16537287-16537318
  hypo

SEQ ID NO: 44999 - DNA, 129 bp, Homo sapiens; identical to SEQ ID NO: 2111
  chr5:16616954-16617083
  hypo

SEQ ID NO: 45000 - DNA, 31 bp, Homo sapiens; identical to SEQ ID NO: 12833
  chr5:16668249-16668280
  hypo

SEQ ID NO: 45001 - DNA, 53 bp, Homo sapiens; identical to SEQ ID NO: 12834
  chr5:16668401-16668454
  hypo

SEQ ID NO: 45002 - DNA, 34 bp, Homo sapiens; identical to SEQ ID NO: 12835
  chr5:16671130-16671164
  hypo

SEQ ID NO: 45003 - DNA, 37 bp, Homo sapiens; identical to SEQ ID NO: 12836
  chr5:16671881-16671918
  hypo

SEQ ID NO: 45004 - DNA, 35 bp, Homo sapiens; identical to SEQ ID NO: 12837
  chr5:16680074-16680109
  hypo

SEQ ID NO: 45005 - DNA, 31 bp, Homo sapiens; identical to SEQ ID NO: 12838
  chr5:16701782-16701813
  hypo

SEQ ID NO: 45006 - DNA, 78 bp, Homo sapiens; identical to SEQ ID NO: 12839
  chr5:16766143-16766221
  hypo

SEQ ID NO: 45007 - DNA, 31 bp, Homo sapiens; identical to SEQ ID NO: 12840
  chr5:16766274-16766305
  hypo

SEQ ID NO: 45008 - DNA, 10 bp, Homo sapiens
  chr5:16935547-16935557
  hypo
cctgcacccg

SEQ ID NO: 45009 - DNA, 70 bp, Homo sapiens; identical to SEQ ID NO: 36478
  chr5:16935617-16935687
  hypo

SEQ ID NO: 45010 - DNA, 71 bp, Homo sapiens; identical to SEQ ID NO: 29259
  chr5:16936514-16936585
  hypo

SEQ ID NO: 45011 - DNA, 31 bp, Homo sapiens; identical to SEQ ID NO: 2128
  chr5:29296868-29296899
  hypo

SEQ ID NO: 45012 - DNA, 31 bp, Homo sapiens; identical to SEQ ID NO: 12852
  chr5:32199878-32199909
  hypo

SEQ ID NO: 45013 - DNA, 31 bp, Homo sapiens; identical to SEQ ID NO: 12853
  chr5:32314527-32314558
  hypo

SEQ ID NO: 45014 - DNA, 31 bp, Homo sapiens; identical to SEQ ID NO: 12855
  chr5:32526514-32526545
  hypo

SEQ ID NO: 45015 - DNA, 2 bp, Homo sapiens
  chr5:32526557-32526559
  hypo
at

SEQ ID NO: 45016 - DNA, 9 bp, Homo sapiens
  chr5:32526582-32526591
  hypo
cggtggctc

SEQ ID NO: 45017 - DNA, 40 bp, Homo sapiens; identical to SEQ ID NO: 12858
  chr5:33724925-33724965
  hypo

SEQ ID NO: 45018 - DNA, 84 bp, Homo sapiens; identical to SEQ ID NO: 12859
  chr5:34551766-34551850
  hypo

SEQ ID NO: 45019 - DNA, 43 bp, Homo sapiens; identical to SEQ ID NO: 12861
  chr5:34591123-34591166
  hypo

SEQ ID NO: 45020 - DNA, 31 bp, Homo sapiens; identical to SEQ ID NO: 12862
  chr5:34702683-34702714
  hypo

SEQ ID NO: 45021 - DNA, 35 bp, Homo sapiens; identical to SEQ ID NO: 12863
  chr5:34756420-34756455
  hypo

SEQ ID NO: 45022 - DNA, 31 bp, Homo sapiens; identical to SEQ ID NO: 12864
  chr5:35044505-35044536
  hypo

SEQ ID NO: 45023 - DNA, 43 bp, Homo sapiens; identical to SEQ ID NO: 12865
  chr5:36240987-36241030
  hypo

SEQ ID NO: 45024 - DNA, 2 bp, Homo sapiens
  chr5:40775146-40775148
  hypo
at

SEQ ID NO: 45025 - DNA, 31 bp, Homo sapiens; identical to SEQ ID NO: 12869
  chr5:43387665-43387696
  hypo

SEQ ID NO: 45026 - DNA, 31 bp, Homo sapiens; identical to SEQ ID NO: 2177
  chr5:43603562-43603593
  hypo

SEQ ID NO: 45027 - DNA, 31 bp, Homo sapiens; identical to SEQ ID NO: 12877
  chr5:53593991-53594022
  hypo

SEQ ID NO: 45028 - DNA, 108 bp, Homo sapiens; identical to SEQ ID NO: 2193
  chr5:54469035-54469143
  hypo

SEQ ID NO: 45029 - DNA, 33 bp, Homo sapiens; identical to SEQ ID NO: 12879
  chr5:54734439-54734472
  hypo

SEQ ID NO: 45030 - DNA, 41 bp, Homo sapiens; identical to SEQ ID NO: 12880
  chr5:54952934-54952975
  hypo

SEQ ID NO: 45031 - DNA, 70 bp, Homo sapiens; identical to SEQ ID NO: 12882
  chr5:56011131-56011201
  hypo

SEQ ID NO: 45032 - DNA, 35 bp, Homo sapiens; identical to SEQ ID NO: 12883
  chr5:56011243-56011278
  hypo

SEQ ID NO: 45033 - DNA, 51 bp, Homo sapiens; identical to SEQ ID NO: 2198
  chr5:57755844-57755895
  hypo

SEQ ID NO: 45034 - DNA, 111 bp, Homo sapiens; identical to SEQ ID NO: 2199
  chr5:57755954-57756065
  hypo

SEQ ID NO: 45035 - DNA, 38 bp, Homo sapiens; identical to SEQ ID NO: 2200
  chr5:57756488-57756526
  hypo

SEQ ID NO: 45036 - DNA, 31 bp, Homo sapiens; identical to SEQ ID NO: 2201
  chr5:57756573-57756604
  hypo

SEQ ID NO: 45037 - DNA, 31 bp, Homo sapiens; identical to SEQ ID NO: 2203
  chr5:60626140-60626171
  hypo

SEQ ID NO: 45038 - DNA, 31 bp, Homo sapiens; identical to SEQ ID NO: 12889
  chr5:60821653-60821684
  hypo

SEQ ID NO: 45039 - DNA, 31 bp, Homo sapiens; identical to SEQ ID NO: 12890
  chr5:60821801-60821832
  hypo

SEQ ID NO: 45040 - DNA, 31 bp, Homo sapiens; identical to SEQ ID NO: 2204
  chr5:60840110-60840141
  hypo

SEQ ID NO: 45041 - DNA, 31 bp, Homo sapiens; identical to SEQ ID NO: 12892
  chr5:64339981-64340012
  hypo

SEQ ID NO: 45042 - DNA, 38 bp, Homo sapiens; identical to SEQ ID NO: 12895
  chr5:66441262-66441300
  hypo

SEQ ID NO: 45043 - DNA, 31 bp, Homo sapiens; identical to SEQ ID NO: 12896
  chr5:66441341-66441372
  hypo

SEQ ID NO: 45044 - DNA, 59 bp, Homo sapiens; identical to SEQ ID NO: 12897
  chr5:66441390-66441449
  hypo

SEQ ID NO: 45045 - DNA, 31 bp, Homo sapiens; identical to SEQ ID NO: 12898
  chr5:66534314-66534345
  hypo

SEQ ID NO: 45046 - DNA, 35 bp, Homo sapiens; identical to SEQ ID NO: 12899
  chr5:66911430-66911465
  hypo

SEQ ID NO: 45047 - DNA, 44 bp, Homo sapiens; identical to SEQ ID NO: 12900
  chr5:66938603-66938647
  hypo

SEQ ID NO: 45048 - DNA, 91 bp, Homo sapiens; identical to SEQ ID NO: 12901
  chr5:66938675-66938766
  hypo

SEQ ID NO: 45049 - DNA, 38 bp, Homo sapiens; identical to SEQ ID NO: 12902
  chr5:66987569-66987607
  hypo

SEQ ID NO: 45050 - DNA, 37 bp, Homo sapiens; identical to SEQ ID NO: 12903
  chr5:67015512-67015549
  hypo

SEQ ID NO: 45051 - DNA, 31 bp, Homo sapiens; identical to SEQ ID NO: 12904
  chr5:67021474-67021505
  hypo

SEQ ID NO: 45052 - DNA, 34 bp, Homo sapiens; identical to SEQ ID NO: 12905
  chr5:67617619-67617653
  hypo

SEQ ID NO: 45053 - DNA, 31 bp, Homo sapiens; identical to SEQ ID NO: 12906
  chr5:67617691-67617722
  hypo

SEQ ID NO: 45054 - DNA, 56 bp, Homo sapiens; identical to SEQ ID NO: 12907
  chr5:67617738-67617794
  hypo

SEQ ID NO: 45055 - DNA, 31 bp, Homo sapiens; identical to SEQ ID NO: 12909
  chr5:67708115-67708146
  hypo

SEQ ID NO: 45056 - DNA, 30 bp, Homo sapiens; identical to SEQ ID NO: 12910
  chr5:67708166-67708196
  hypo

SEQ ID NO: 45057 - DNA, 31 bp, Homo sapiens; identical to SEQ ID NO: 12911
  chr5:67857567-67857598
  hypo

SEQ ID NO: 45058 - DNA, 31 bp, Homo sapiens; identical to SEQ ID NO: 12912
  chr5:68018530-68018561
  hypo

SEQ ID NO: 45059 - DNA, 31 bp, Homo sapiens; identical to SEQ ID NO: 12914
  chr5:68238778-68238809
  hypo

SEQ ID NO: 45060 - DNA, 31 bp, Homo sapiens; identical to SEQ ID NO: 12915
  chr5:68368094-68368125
  hypo

SEQ ID NO: 45061 - DNA, 31 bp, Homo sapiens; identical to SEQ ID NO: 12917
  chr5:68476732-68476763
  hypo

SEQ ID NO: 45062 - DNA, 31 bp, Homo sapiens; identical to SEQ ID NO: 2205
  chr5:68485209-68485240
  hypo

SEQ ID NO: 45063 - DNA, 37 bp, Homo sapiens; identical to SEQ ID NO: 12920
  chr5:72242482-72242519
  hypo

SEQ ID NO: 45064 - DNA, 31 bp, Homo sapiens; identical to SEQ ID NO: 12921
  chr5:72806527-72806558
  hypo

SEQ ID NO: 45065 - DNA, 220 bp, Homo sapiens; identical to SEQ ID NO: 2209
  chr5:72921556-72921776
  hypo

SEQ ID NO: 45066 - DNA, 54 bp, Homo sapiens; identical to SEQ ID NO: 2210
  chr5:72921779-72921833
  hypo

SEQ ID NO: 45067 - DNA, 142 bp, Homo sapiens; identical to SEQ ID NO: 2211
  chr5:72921840-72921982
  hypo

SEQ ID NO: 45068 - DNA, 258 bp, Homo sapiens; identical to SEQ ID NO: 2212
  chr5:72921983-72922241
  hypo

SEQ ID NO: 45069 - DNA, 72 bp, Homo sapiens; identical to SEQ ID NO: 12926
  chr5:73081112-73081184
  hypo

SEQ ID NO: 45070 - DNA, 54 bp, Homo sapiens; identical to SEQ ID NO: 12927
  chr5:73081253-73081307
  hypo

SEQ ID NO: 45071 - DNA, 39 bp, Homo sapiens; identical to SEQ ID NO: 12928
  chr5:73102525-73102564
  hypo

SEQ ID NO: 45072 - DNA, 42 bp, Homo sapiens; identical to SEQ ID NO: 12930
  chr5:73192670-73192712
  hypo

SEQ ID NO: 45073 - DNA, 59 bp, Homo sapiens; identical to SEQ ID NO: 12931
  chr5:73205692-73205751
  hypo

SEQ ID NO: 45074 - DNA, 43 bp, Homo sapiens; identical to SEQ ID NO: 12932
  chr5:73228901-73228944
  hypo

SEQ ID NO: 45075 - DNA, 31 bp, Homo sapiens; identical to SEQ ID NO: 12933
  chr5:73229007-73229038
  hypo

SEQ ID NO: 45076 - DNA, 46 bp, Homo sapiens; identical to SEQ ID NO: 12934
  chr5:73247792-73247838
  hypo

SEQ ID NO: 45077 - DNA, 31 bp, Homo sapiens; identical to SEQ ID NO: 12935
  chr5:73627933-73627964
  hypo

SEQ ID NO: 45078 - DNA, 43 bp, Homo sapiens; identical to SEQ ID NO: 12936
  chr5:73628000-73628043
  hypo

SEQ ID NO: 45079 - DNA, 42 bp, Homo sapiens; identical to SEQ ID NO: 12937
  chr5:73628070-73628112
  hypo

SEQ ID NO: 45080 - DNA, 31 bp, Homo sapiens; identical to SEQ ID NO: 12938
  chr5:73636136-73636167
  hypo

SEQ ID NO: 45081 - DNA, 36 bp, Homo sapiens; identical to SEQ ID NO: 12939
  chr5:73665485-73665521
  hypo

SEQ ID NO: 45082 - DNA, 31 bp, Homo sapiens; identical to SEQ ID NO: 12940
  chr5:73771007-73771038
  hypo

SEQ ID NO: 45083 - DNA, 41 bp, Homo sapiens; identical to SEQ ID NO: 2215
  chr5:73843884-73843925
  hypo

SEQ ID NO: 45084 - DNA, 40 bp, Homo sapiens; identical to SEQ ID NO: 2216
  chr5:73844038-73844078
  hypo

SEQ ID NO: 45085 - DNA, 85 bp, Homo sapiens; identical to SEQ ID NO: 12943
  chr5:73855840-73855925
  hypo

SEQ ID NO: 45086 - DNA, 45 bp, Homo sapiens; identical to SEQ ID NO: 12944
  chr5:73855987-73856032
  hypo

SEQ ID NO: 45087 - DNA, 118 bp, Homo sapiens; identical to SEQ ID NO: 2217
  chr5:73935723-73935841
  hypo

SEQ ID NO: 45088 - DNA, 144 bp, Homo sapiens; identical to SEQ ID NO: 2218
  chr5:73935843-73935987
  hypo

SEQ ID NO: 45089 - DNA, 516 bp, Homo sapiens; identical to SEQ ID NO: 2219
  chr5:73936032-73936548
  hypo

SEQ ID NO: 45090 - DNA, 95 bp, Homo sapiens; identical to SEQ ID NO: 2220
  chr5:73936773-73936868
  hypo

SEQ ID NO: 45091 - DNA, 31 bp, Homo sapiens; identical to SEQ ID NO: 12950
  chr5:74238223-74238254
  hypo

SEQ ID NO: 45092 - DNA, 34 bp, Homo sapiens; identical to SEQ ID NO: 2226
  chr5:74348705-74348739
  hypo

SEQ ID NO: 45093 - DNA, 53 bp, Homo sapiens; identical to SEQ ID NO: 2227
  chr5:74348751-74348804
  hypo

SEQ ID NO: 45094 - DNA, 75 bp, Homo sapiens; identical to SEQ ID NO: 2228
  chr5:74348819-74348894
  hypo

SEQ ID NO: 45095 - DNA, 97 bp, Homo sapiens; identical to SEQ ID NO: 2230
  chr5:74349197-74349294
  hypo

SEQ ID NO: 45096 - DNA, 35 bp, Homo sapiens; identical to SEQ ID NO: 12955
  chr5:76159637-76159672
  hypo

SEQ ID NO: 45097 - DNA, 47 bp, Homo sapiens; identical to SEQ ID NO: 12957
  chr5:76373686-76373733
  hypo

SEQ ID NO: 45098 - DNA, 80 bp, Homo sapiens; identical to SEQ ID NO: 12958
  chr5:76399985-76400065
  hypo

SEQ ID NO: 45099 - DNA, 31 bp, Homo sapiens; identical to SEQ ID NO: 12959
  chr5:76400067-76400098
  hypo

SEQ ID NO: 45100 - DNA, 31 bp, Homo sapiens; identical to SEQ ID NO: 12960
  chr5:76400152-76400183
  hypo

SEQ ID NO: 45101 - DNA, 33 bp, Homo sapiens; identical to SEQ ID NO: 12961
  chr5:76738422-76738455
  hypo

SEQ ID NO: 45102 - DNA, 51 bp, Homo sapiens; identical to SEQ ID NO: 12963
  chr5:77655147-77655198
  hypo

SEQ ID NO: 45103 - DNA, 31 bp, Homo sapiens; identical to SEQ ID NO: 12964
  chr5:77655603-77655634
  hypo

SEQ ID NO: 45104 - DNA, 31 bp, Homo sapiens; identical to SEQ ID NO: 12965
  chr5:77810047-77810078
  hypo

SEQ ID NO: 45105 - DNA, 31 bp, Homo sapiens; identical to SEQ ID NO: 12966
  chr5:77816709-77816740
  hypo

SEQ ID NO: 45106 - DNA, 54 bp, Homo sapiens; identical to SEQ ID NO: 12967
  chr5:77816767-77816821
  hypo

SEQ ID NO: 45107 - DNA, 31 bp, Homo sapiens; identical to SEQ ID NO: 12969
  chr5:77916703-77916734
  hypo

SEQ ID NO: 45108 - DNA, 31 bp, Homo sapiens; identical to SEQ ID NO: 2244
  chr5:77944026-77944057
  hypo

SEQ ID NO: 45109 - DNA, 31 bp, Homo sapiens; identical to SEQ ID NO: 12973
  chr5:78356327-78356358
  hypo

SEQ ID NO: 45110 - DNA, 32 bp, Homo sapiens; identical to SEQ ID NO: 12974
  chr5:78949959-78949991
  hypo

SEQ ID NO: 45111 - DNA, 31 bp, Homo sapiens; identical to SEQ ID NO: 12976
  chr5:79086452-79086483
  hypo

SEQ ID NO: 45112 - DNA, 31 bp, Homo sapiens; identical to SEQ ID NO: 12977
  chr5:79451010-79451041
  hypo

SEQ ID NO: 45113 - DNA, 31 bp, Homo sapiens; identical to SEQ ID NO: 12978
  chr5:79453490-79453521
  hypo

SEQ ID NO: 45114 - DNA, 31 bp, Homo sapiens; identical to SEQ ID NO: 12979
  chr5:79498711-79498742
  hypo

SEQ ID NO: 45115 - DNA, 51 bp, Homo sapiens; identical to SEQ ID NO: 2247
  chr5:79551392-79551443
  hypo

SEQ ID NO: 45116 - DNA, 31 bp, Homo sapiens; identical to SEQ ID NO: 12986
  chr5:79911331-79911362
  hypo

SEQ ID NO: 45117 - DNA, 31 bp, Homo sapiens; identical to SEQ ID NO: 12987
  chr5:80652823-80652854
  hypo

SEQ ID NO: 45118 - DNA, 63 bp, Homo sapiens; identical to SEQ ID NO: 12988
  chr5:80652907-80652970
  hypo

SEQ ID NO: 45119 - DNA, 31 bp, Homo sapiens; identical to SEQ ID NO: 12989
  chr5:80652976-80653007
  hypo

SEQ ID NO: 45120 - DNA, 61 bp, Homo sapiens; identical to SEQ ID NO: 12991
  chr5:83095504-83095565
  hypo

SEQ ID NO: 45121 - DNA, 31 bp, Homo sapiens; identical to SEQ ID NO: 12992
  chr5:84845601-84845632
  hypo

SEQ ID NO: 45122 - DNA, 41 bp, Homo sapiens; identical to SEQ ID NO: 2249
  chr5:87437222-87437263
  hypo

SEQ ID NO: 45123 - DNA, 31 bp, Homo sapiens; identical to SEQ ID NO: 12994
  chr5:88097575-88097606
  hypo

SEQ ID NO: 45124 - DNA, 18 bp, Homo sapiens
  chr5:88179111-88179129
  hypo
gctcggaagaggaggagg

SEQ ID NO: 45125 - DNA, 31 bp, Homo sapiens; identical to SEQ ID NO: 12998
  chr5:90256912-90256943
  hypo

SEQ ID NO: 45126 - DNA, 31 bp, Homo sapiens; identical to SEQ ID NO: 12999
  chr5:90257318-90257349
  hypo

SEQ ID NO: 45127 - DNA, 31 bp, Homo sapiens; identical to SEQ ID NO: 13000
  chr5:92310056-92310087
  hypo

SEQ ID NO: 45128 - DNA, 31 bp, Homo sapiens; identical to SEQ ID NO: 2264
  chr5:92917347-92917378
  hypo

SEQ ID NO: 45129 - DNA, 31 bp, Homo sapiens; identical to SEQ ID NO: 13002
  chr5:93823875-93823906
  hypo

SEQ ID NO: 45130 - DNA, 31 bp, Homo sapiens; identical to SEQ ID NO: 13003
  chr5:94981772-94981803
  hypo

SEQ ID NO: 45131 - DNA, 33 bp, Homo sapiens; identical to SEQ ID NO: 13005
  chr5:95290420-95290453
  hypo

SEQ ID NO: 45132 - DNA, 31 bp, Homo sapiens; identical to SEQ ID NO: 13006
  chr5:96114668-96114699
  hypo

SEQ ID NO: 45133 - DNA, 31 bp, Homo sapiens; identical to SEQ ID NO: 13007
  chr5:96121581-96121612
  hypo

SEQ ID NO: 45134 - DNA, 43 bp, Homo sapiens; identical to SEQ ID NO: 2270
  chr5:98109212-98109255
  hypo

SEQ ID NO: 45135 - DNA, 34 bp, Homo sapiens; identical to SEQ ID NO: 2271
  chr5:98109257-98109291
  hypo

SEQ ID NO: 45136 - DNA, 80 bp, Homo sapiens; identical to SEQ ID NO: 2272
  chr5:98109331-98109411
  hypo

SEQ ID NO: 45137 - DNA, 83 bp, Homo sapiens; identical to SEQ ID NO: 2273
  chr5:98109412-98109495
  hypo

SEQ ID NO: 45138 - DNA, 31 bp, Homo sapiens; identical to SEQ ID NO: 2275
  chr5:98109926-98109957
  hypo

SEQ ID NO: 45139 - DNA, 131 bp, Homo sapiens; identical to SEQ ID NO: 2276
  chr5:98110030-98110161
  hypo

SEQ ID NO: 45140 - DNA, 61 bp, Homo sapiens; identical to SEQ ID NO: 13014
  chr5:98242973-98243034
  hypo

SEQ ID NO: 45141 - DNA, 81 bp, Homo sapiens; identical to SEQ ID NO: 13023
  chr5:103289776-103289857
  hypo

SEQ ID NO: 45142 - DNA, 31 bp, Homo sapiens; identical to SEQ ID NO: 2308
  chr5:107006663-107006694
  hypo

SEQ ID NO: 45143 - DNA, 31 bp, Homo sapiens; identical to SEQ ID NO: 2310
  chr5:107007962-107007993
  hypo

SEQ ID NO: 45144 - DNA, 50 bp, Homo sapiens; identical to SEQ ID NO: 2311
  chr5:107008015-107008065
  hypo

SEQ ID NO: 45145 - DNA, 39 bp, Homo sapiens; identical to SEQ ID NO: 13033
  chr5:111065739-111065778
  hypo

SEQ ID NO: 45146 - DNA, 67 bp, Homo sapiens; identical to SEQ ID NO: 13034
  chr5:111065795-111065862
  hypo

SEQ ID NO: 45147 - DNA, 31 bp, Homo sapiens; identical to SEQ ID NO: 2322
  chr5:114879309-114879340
  hypo

SEQ ID NO: 45148 - DNA, 31 bp, Homo sapiens; identical to SEQ ID NO: 13037
  chr5:118420252-118420283
  hypo

SEQ ID NO: 45149 - DNA, 31 bp, Homo sapiens; identical to SEQ ID NO: 13039
  chr5:120004769-120004800
  hypo

SEQ ID NO: 45150 - DNA, 31 bp, Homo sapiens; identical to SEQ ID NO: 13040
  chr5:121495181-121495212
  hypo

SEQ ID NO: 45151 - DNA, 42 bp, Homo sapiens; identical to SEQ ID NO: 13042
  chr5:121874489-121874531
  hypo

SEQ ID NO: 45152 - DNA, 31 bp, Homo sapiens; identical to SEQ ID NO: 13043
  chr5:121874591-121874622
  hypo

SEQ ID NO: 45153 - DNA, 31 bp, Homo sapiens; identical to SEQ ID NO: 13044
  chr5:121906793-121906824
  hypo

SEQ ID NO: 45154 - DNA, 77 bp, Homo sapiens; identical to SEQ ID NO: 13045
  chr5:121906920-121906997
  hypo

SEQ ID NO: 45155 - DNA, 31 bp, Homo sapiens; identical to SEQ ID NO: 13046
  chr5:122116620-122116651
  hypo

SEQ ID NO: 45156 - DNA, 39 bp, Homo sapiens; identical to SEQ ID NO: 13047
  chr5:123929399-123929438
  hypo

SEQ ID NO: 45157 - DNA, 31 bp, Homo sapiens; identical to SEQ ID NO: 13048
  chr5:123929457-123929488
  hypo

SEQ ID NO: 45158 - DNA, 31 bp, Homo sapiens; identical to SEQ ID NO: 2328
  chr5:124084142-124084173
  hypo

SEQ ID NO: 45159 - DNA, 31 bp, Homo sapiens; identical to SEQ ID NO: 13053
  chr5:126139595-126139626
  hypo

SEQ ID NO: 45160 - DNA, 2 bp, Homo sapiens
  chr5:126409451-126409453
  hypo
tc

SEQ ID NO: 45161 - DNA, 41 bp, Homo sapiens; identical to SEQ ID NO: 13056
  chr5:126479574-126479615
  hypo

SEQ ID NO: 45162 - DNA, 31 bp, Homo sapiens; identical to SEQ ID NO: 13058
  chr5:130661705-130661736
  hypo

SEQ ID NO: 45163 - DNA, 31 bp, Homo sapiens; identical to SEQ ID NO: 13059
  chr5:130661740-130661771
  hypo

SEQ ID NO: 45164 - DNA, 31 bp, Homo sapiens; identical to SEQ ID NO: 2334
  chr5:131133197-131133228
  hypo

SEQ ID NO: 45165 - DNA, 81 bp, Homo sapiens; identical to SEQ ID NO: 2335
  chr5:131133234-131133315
  hypo

SEQ ID NO: 45166 - DNA, 73 bp, Homo sapiens; identical to SEQ ID NO: 2336
  chr5:131133322-131133395
  hypo

SEQ ID NO: 45167 - DNA, 41 bp, Homo sapiens; identical to SEQ ID NO: 13063
  chr5:131133934-131133975
  hypo

SEQ ID NO: 45168 - DNA, 40 bp, Homo sapiens; identical to SEQ ID NO: 2340
  chr5:131563665-131563705
  hypo

SEQ ID NO: 45169 - DNA, 129 bp, Homo sapiens; identical to SEQ ID NO: 2341
  chr5:131563707-131563836
  hypo

SEQ ID NO: 45170 - DNA, 54 bp, Homo sapiens; identical to SEQ ID NO: 13066
  chr5:132001669-132001723
  hypo

SEQ ID NO: 45171 - DNA, 31 bp, Homo sapiens; identical to SEQ ID NO: 13067
  chr5:132001725-132001756
  hypo

SEQ ID NO: 45172 - DNA, 31 bp, Homo sapiens; identical to SEQ ID NO: 13068
  chr5:132001761-132001792
  hypo

SEQ ID NO: 45173 - DNA, 31 bp, Homo sapiens; identical to SEQ ID NO: 13069
  chr5:132001798-132001829
  hypo

SEQ ID NO: 45174 - DNA, 53 bp, Homo sapiens; identical to SEQ ID NO: 13070
  chr5:132095766-132095819
  hypo

SEQ ID NO: 45175 - DNA, 40 bp, Homo sapiens; identical to SEQ ID NO: 13071
  chr5:132095846-132095886
  hypo

SEQ ID NO: 45176 - DNA, 31 bp, Homo sapiens; identical to SEQ ID NO: 13072
  chr5:132095887-132095918
  hypo

SEQ ID NO: 45177 - DNA, 60 bp, Homo sapiens; identical to SEQ ID NO: 13073
  chr5:132095926-132095986
  hypo

SEQ ID NO: 45178 - DNA, 31 bp, Homo sapiens; identical to SEQ ID NO: 13074
  chr5:132383280-132383311
  hypo

SEQ ID NO: 45179 - DNA, 31 bp, Homo sapiens; identical to SEQ ID NO: 13075
  chr5:132448250-132448281
  hypo

SEQ ID NO: 45180 - DNA, 31 bp, Homo sapiens; identical to SEQ ID NO: 13076
  chr5:132654499-132654530
  hypo

SEQ ID NO: 45181 - DNA, 31 bp, Homo sapiens; identical to SEQ ID NO: 13077
  chr5:132654562-132654593
  hypo

SEQ ID NO: 45182 - DNA, 31 bp, Homo sapiens; identical to SEQ ID NO: 13078
  chr5:132654605-132654636
  hypo

SEQ ID NO: 45183 - DNA, 39 bp, Homo sapiens; identical to SEQ ID NO: 13079
  chr5:132654667-132654706
  hypo

SEQ ID NO: 45184 - DNA, 31 bp, Homo sapiens; identical to SEQ ID NO: 13080
  chr5:132664449-132664480
  hypo

SEQ ID NO: 45185 - DNA, 79 bp, Homo sapiens; identical to SEQ ID NO: 13081
  chr5:132664568-132664647
  hypo

SEQ ID NO: 45186 - DNA, 31 bp, Homo sapiens; identical to SEQ ID NO: 13082
  chr5:132738534-132738565
  hypo

SEQ ID NO: 45187 - DNA, 31 bp, Homo sapiens; identical to SEQ ID NO: 13083
  chr5:133034437-133034468
  hypo

SEQ ID NO: 45188 - DNA, 31 bp, Homo sapiens; identical to SEQ ID NO: 13084
  chr5:133237867-133237898
  hypo

SEQ ID NO: 45189 - DNA, 61 bp, Homo sapiens; identical to SEQ ID NO: 13086
  chr5:133240436-133240497
  hypo

SEQ ID NO: 45190 - DNA, 31 bp, Homo sapiens; identical to SEQ ID NO: 13087
  chr5:133337022-133337053
  hypo

SEQ ID NO: 45191 - DNA, 31 bp, Homo sapiens; identical to SEQ ID NO: 13088
  chr5:133362903-133362934
  hypo

SEQ ID NO: 45192 - DNA, 61 bp, Homo sapiens; identical to SEQ ID NO: 13089
  chr5:133362957-133363018
  hypo

SEQ ID NO: 45193 - DNA, 51 bp, Homo sapiens; identical to SEQ ID NO: 13090
  chr5:133363043-133363094
  hypo

SEQ ID NO: 45194 - DNA, 31 bp, Homo sapiens; identical to SEQ ID NO: 13091
  chr5:133363360-133363391
  hypo

SEQ ID NO: 45195 - DNA, 31 bp, Homo sapiens; identical to SEQ ID NO: 13092
  chr5:133459374-133459405
  hypo

SEQ ID NO: 45196 - DNA, 31 bp, Homo sapiens; identical to SEQ ID NO: 13093
  chr5:133459407-133459438
  hypo

SEQ ID NO: 45197 - DNA, 31 bp, Homo sapiens; identical to SEQ ID NO: 13094
  chr5:133459442-133459473
  hypo

SEQ ID NO: 45198 - DNA, 41 bp, Homo sapiens; identical to SEQ ID NO: 13095
  chr5:133459478-133459519
  hypo

SEQ ID NO: 45199 - DNA, 31 bp, Homo sapiens; identical to SEQ ID NO: 13096
  chr5:133459551-133459582
  hypo

SEQ ID NO: 45200 - DNA, 31 bp, Homo sapiens; identical to SEQ ID NO: 13098
  chr5:133464240-133464271
  hypo

SEQ ID NO: 45201 - DNA, 99 bp, Homo sapiens; identical to SEQ ID NO: 13099
  chr5:133465709-133465808
  hypo

SEQ ID NO: 45202 - DNA, 49 bp, Homo sapiens; identical to SEQ ID NO: 13100
  chr5:133465810-133465859
  hypo

SEQ ID NO: 45203 - DNA, 46 bp, Homo sapiens; identical to SEQ ID NO: 13101
  chr5:133465871-133465917
  hypo

SEQ ID NO: 45204 - DNA, 43 bp, Homo sapiens; identical to SEQ ID NO: 13102
  chr5:133469214-133469257
  hypo

SEQ ID NO: 45205 - DNA, 65 bp, Homo sapiens; identical to SEQ ID NO: 13103
  chr5:133469260-133469325
  hypo

SEQ ID NO: 45206 - DNA, 31 bp, Homo sapiens; identical to SEQ ID NO: 13104
  chr5:133665434-133665465
  hypo

SEQ ID NO: 45207 - DNA, 44 bp, Homo sapiens; identical to SEQ ID NO: 13106
  chr5:133819199-133819243
  hypo

SEQ ID NO: 45208 - DNA, 39 bp, Homo sapiens; identical to SEQ ID NO: 13107
  chr5:133984528-133984567
  hypo

SEQ ID NO: 45209 - DNA, 31 bp, Homo sapiens; identical to SEQ ID NO: 13108
  chr5:134331950-134331981
  hypo

SEQ ID NO: 45210 - DNA, 31 bp, Homo sapiens; identical to SEQ ID NO: 13109
  chr5:134343157-134343188
  hypo

SEQ ID NO: 45211 - DNA, 31 bp, Homo sapiens; identical to SEQ ID NO: 13110
  chr5:134436702-134436733
  hypo

SEQ ID NO: 45212 - DNA, 31 bp, Homo sapiens; identical to SEQ ID NO: 13111
  chr5:134436753-134436784
  hypo

SEQ ID NO: 45213 - DNA, 31 bp, Homo sapiens; identical to SEQ ID NO: 13112
  chr5:134436788-134436819
  hypo

SEQ ID NO: 45214 - DNA, 53 bp, Homo sapiens; identical to SEQ ID NO: 13113
  chr5:134436873-134436926
  hypo

SEQ ID NO: 45215 - DNA, 31 bp, Homo sapiens; identical to SEQ ID NO: 13114
  chr5:134440294-134440325
  hypo

SEQ ID NO: 45216 - DNA, 57 bp, Homo sapiens; identical to SEQ ID NO: 13115
  chr5:134453699-134453756
  hypo

SEQ ID NO: 45217 - DNA, 46 bp, Homo sapiens; identical to SEQ ID NO: 13116
  chr5:134453781-134453827
  hypo

SEQ ID NO: 45218 - DNA, 31 bp, Homo sapiens; identical to SEQ ID NO: 13117
  chr5:134453855-134453886
  hypo

SEQ ID NO: 45219 - DNA, 31 bp, Homo sapiens; identical to SEQ ID NO: 13118
  chr5:134468970-134469001
  hypo

SEQ ID NO: 45220 - DNA, 31 bp, Homo sapiens; identical to SEQ ID NO: 13119
  chr5:134513709-134513740
  hypo

SEQ ID NO: 45221 - DNA, 31 bp, Homo sapiens; identical to SEQ ID NO: 13120
  chr5:134513793-134513824
  hypo

SEQ ID NO: 45222 - DNA, 31 bp, Homo sapiens; identical to SEQ ID NO: 13121
  chr5:134513833-134513864
  hypo

SEQ ID NO: 45223 - DNA, 31 bp, Homo sapiens; identical to SEQ ID NO: 13122
  chr5:134547962-134547993
  hypo

SEQ ID NO: 45224 - DNA, 31 bp, Homo sapiens; identical to SEQ ID NO: 13125
  chr5:134585644-134585675
  hypo

SEQ ID NO: 45225 - DNA, 31 bp, Homo sapiens; identical to SEQ ID NO: 13126
  chr5:134585683-134585714
  hypo

SEQ ID NO: 45226 - DNA, 31 bp, Homo sapiens; identical to SEQ ID NO: 13127
  chr5:134585723-134585754
  hypo

SEQ ID NO: 45227 - DNA, 41 bp, Homo sapiens; identical to SEQ ID NO: 13128
  chr5:134585808-134585849
  hypo

SEQ ID NO: 45228 - DNA, 40 bp, Homo sapiens; identical to SEQ ID NO: 13129
  chr5:134608287-134608327
  hypo

SEQ ID NO: 45229 - DNA, 31 bp, Homo sapiens; identical to SEQ ID NO: 13130
  chr5:134608335-134608366
  hypo

SEQ ID NO: 45230 - DNA, 62 bp, Homo sapiens; identical to SEQ ID NO: 13131
  chr5:134608377-134608439
  hypo

SEQ ID NO: 45231 - DNA, 31 bp, Homo sapiens; identical to SEQ ID NO: 13132
  chr5:134666318-134666349
  hypo

SEQ ID NO: 45232 - DNA, 39 bp, Homo sapiens; identical to SEQ ID NO: 13133
  chr5:134666377-134666416
  hypo

SEQ ID NO: 45233 - DNA, 31 bp, Homo sapiens; identical to SEQ ID NO: 13134
  chr5:134785498-134785529
  hypo

SEQ ID NO: 45234 - DNA, 2 bp, Homo sapiens
  chr5:135265700-135265702
  hypo
tg

SEQ ID NO: 45235 - DNA, 80 bp, Homo sapiens; identical to SEQ ID NO: 2345
  chr5:135468431-135468511
  hypo

SEQ ID NO: 45236 - DNA, 31 bp, Homo sapiens; identical to SEQ ID NO: 2346
  chr5:135468535-135468566
  hypo

SEQ ID NO: 45237 - DNA, 31 bp, Homo sapiens; identical to SEQ ID NO: 13138
  chr5:135802138-135802169
  hypo

SEQ ID NO: 45238 - DNA, 35 bp, Homo sapiens; identical to SEQ ID NO: 13139
  chr5:135989644-135989679
  hypo

SEQ ID NO: 45239 - DNA, 56 bp, Homo sapiens; identical to SEQ ID NO: 13141
  chr5:137727708-137727764
  hypo

SEQ ID NO: 45240 - DNA, 31 bp, Homo sapiens; identical to SEQ ID NO: 13142
  chr5:137790369-137790400
  hypo

SEQ ID NO: 45241 - DNA, 40 bp, Homo sapiens; identical to SEQ ID NO: 2347
  chr5:137801266-137801306
  hypo

SEQ ID NO: 45242 - DNA, 55 bp, Homo sapiens; identical to SEQ ID NO: 2348
  chr5:137801307-137801362
  hypo

SEQ ID NO: 45243 - DNA, 41 bp, Homo sapiens; identical to SEQ ID NO: 13145
  chr5:137865701-137865742
  hypo

SEQ ID NO: 45244 - DNA, 31 bp, Homo sapiens; identical to SEQ ID NO: 13146
  chr5:137911776-137911807
  hypo

SEQ ID NO: 45245 - DNA, 31 bp, Homo sapiens; identical to SEQ ID NO: 13148
  chr5:138064358-138064389
  hypo

SEQ ID NO: 45246 - DNA, 80 bp, Homo sapiens; identical to SEQ ID NO: 2349
  chr5:138088595-138088675
  hypo

SEQ ID NO: 45247 - DNA, 52 bp, Homo sapiens; identical to SEQ ID NO: 2350
  chr5:138089783-138089835
  hypo

SEQ ID NO: 45248 - DNA, 31 bp, Homo sapiens; identical to SEQ ID NO: 2351
  chr5:138089858-138089889
  hypo

SEQ ID NO: 45249 - DNA, 31 bp, Homo sapiens; identical to SEQ ID NO: 13152
  chr5:138119914-138119945
  hypo

SEQ ID NO: 45250 - DNA, 31 bp, Homo sapiens; identical to SEQ ID NO: 13153
  chr5:138119973-138120004
  hypo

SEQ ID NO: 45251 - DNA, 31 bp, Homo sapiens; identical to SEQ ID NO: 13154
  chr5:138627554-138627585
  hypo

SEQ ID NO: 45252 - DNA, 2 bp, Homo sapiens
  chr5:138676298-138676300
  hypo
gc

SEQ ID NO: 45253 - DNA, 78 bp, Homo sapiens; identical to SEQ ID NO: 2353
  chr5:139017027-139017105
  hypo

SEQ ID NO: 45254 - DNA, 167 bp, Homo sapiens; identical to SEQ ID NO: 2354
  chr5:139017117-139017284
  hypo

SEQ ID NO: 45255 - DNA, 31 bp, Homo sapiens; identical to SEQ ID NO: 2355
  chr5:139017454-139017485
  hypo

SEQ ID NO: 45256 - DNA, 31 bp, Homo sapiens; identical to SEQ ID NO: 2356
  chr5:139017554-139017585
  hypo

SEQ ID NO: 45257 - DNA, 31 bp, Homo sapiens; identical to SEQ ID NO: 2357
  chr5:139017711-139017742
  hypo

SEQ ID NO: 45258 - DNA, 31 bp, Homo sapiens; identical to SEQ ID NO: 2358
  chr5:139039950-139039981
  hypo

SEQ ID NO: 45259 - DNA, 31 bp, Homo sapiens; identical to SEQ ID NO: 2359
  chr5:139039984-139040015
  hypo

SEQ ID NO: 45260 - DNA, 73 bp, Homo sapiens; identical to SEQ ID NO: 2360
  chr5:139089042-139089115
  hypo

SEQ ID NO: 45261 - DNA, 31 bp, Homo sapiens; identical to SEQ ID NO: 13165
  chr5:139535849-139535880
  hypo

SEQ ID NO: 45262 - DNA, 2 bp, Homo sapiens
  chr5:139556301-139556303
  hypo
tg

SEQ ID NO: 45263 - DNA, 92 bp, Homo sapiens; identical to SEQ ID NO: 2364
  chr5:139725996-139726088
  hypo

SEQ ID NO: 45264 - DNA, 55 bp, Homo sapiens; identical to SEQ ID NO: 2365
  chr5:139726093-139726148
  hypo

SEQ ID NO: 45265 - DNA, 33 bp, Homo sapiens; identical to SEQ ID NO: 13170
  chr5:140088249-140088282
  hypo

SEQ ID NO: 45266 - DNA, 31 bp, Homo sapiens; identical to SEQ ID NO: 13171
  chr5:141051472-141051503
  hypo

SEQ ID NO: 45267 - DNA, 31 bp, Homo sapiens; identical to SEQ ID NO: 13172
  chr5:141051521-141051552
  hypo

SEQ ID NO: 45268 - DNA, 31 bp, Homo sapiens; identical to SEQ ID NO: 13173
  chr5:141051586-141051617
  hypo

SEQ ID NO: 45269 - DNA, 31 bp, Homo sapiens; identical to SEQ ID NO: 13174
  chr5:141052013-141052044
  hypo

SEQ ID NO: 45270 - DNA, 94 bp, Homo sapiens; identical to SEQ ID NO: 13175
  chr5:141052406-141052500
  hypo

SEQ ID NO: 45271 - DNA, 66 bp, Homo sapiens; identical to SEQ ID NO: 2383
  chr5:141257915-141257981
  hypo

SEQ ID NO: 45272 - DNA, 34 bp, Homo sapiens; identical to SEQ ID NO: 2384
  chr5:141257996-141258030
  hypo

SEQ ID NO: 45273 - DNA, 31 bp, Homo sapiens; identical to SEQ ID NO: 13178
  chr5:141303243-141303274
  hypo

SEQ ID NO: 45274 - DNA, 30 bp, Homo sapiens; identical to SEQ ID NO: 13179
  chr5:141576297-141576327
  hypo

SEQ ID NO: 45275 - DNA, 35 bp, Homo sapiens; identical to SEQ ID NO: 13180
  chr5:141581714-141581749
  hypo

SEQ ID NO: 45276 - DNA, 31 bp, Homo sapiens; identical to SEQ ID NO: 13181
  chr5:141639936-141639967
  hypo

SEQ ID NO: 45277 - DNA, 31 bp, Homo sapiens; identical to SEQ ID NO: 13182
  chr5:141663281-141663312
  hypo

SEQ ID NO: 45278 - DNA, 49 bp, Homo sapiens; identical to SEQ ID NO: 13183
  chr5:141663477-141663526
  hypo

SEQ ID NO: 45279 - DNA, 35 bp, Homo sapiens; identical to SEQ ID NO: 13184
  chr5:141674167-141674202
  hypo

SEQ ID NO: 45280 - DNA, 35 bp, Homo sapiens; identical to SEQ ID NO: 13185
  chr5:141674501-141674536
  hypo

SEQ ID NO: 45281 - DNA, 113 bp, Homo sapiens; identical to SEQ ID NO: 2386
  chr5:141704447-141704560
  hypo

SEQ ID NO: 45282 - DNA, 55 bp, Homo sapiens; identical to SEQ ID NO: 2387
  chr5:141704618-141704673
  hypo

SEQ ID NO: 45283 - DNA, 39 bp, Homo sapiens; identical to SEQ ID NO: 2388
  chr5:141736298-141736337
  hypo

SEQ ID NO: 45284 - DNA, 148 bp, Homo sapiens; identical to SEQ ID NO: 2389
  chr5:141736379-141736527
  hypo

SEQ ID NO: 45285 - DNA, 41 bp, Homo sapiens; identical to SEQ ID NO: 2390
  chr5:141736531-141736572
  hypo

SEQ ID NO: 45286 - DNA, 36 bp, Homo sapiens; identical to SEQ ID NO: 2391
  chr5:141736579-141736615
  hypo

SEQ ID NO: 45287 - DNA, 31 bp, Homo sapiens; identical to SEQ ID NO: 13192
  chr5:141803866-141803897
  hypo

SEQ ID NO: 45288 - DNA, 31 bp, Homo sapiens; identical to SEQ ID NO: 13193
  chr5:141815622-141815653
  hypo

SEQ ID NO: 45289 - DNA, 51 bp, Homo sapiens; identical to SEQ ID NO: 13194
  chr5:141850812-141850863
  hypo

SEQ ID NO: 45290 - DNA, 31 bp, Homo sapiens; identical to SEQ ID NO: 13196
  chr5:141903303-141903334
  hypo

SEQ ID NO: 45291 - DNA, 31 bp, Homo sapiens; identical to SEQ ID NO: 13197
  chr5:142054639-142054670
  hypo

SEQ ID NO: 45292 - DNA, 31 bp, Homo sapiens; identical to SEQ ID NO: 2392
  chr5:142092798-142092829
  hypo

SEQ ID NO: 45293 - DNA, 49 bp, Homo sapiens; identical to SEQ ID NO: 13199
  chr5:142239512-142239561
  hypo

SEQ ID NO: 45294 - DNA, 47 bp, Homo sapiens; identical to SEQ ID NO: 13200
  chr5:142239637-142239684
  hypo

SEQ ID NO: 45295 - DNA, 73 bp, Homo sapiens; identical to SEQ ID NO: 2394
  chr5:142781965-142782038
  hypo

SEQ ID NO: 45296 - DNA, 72 bp, Homo sapiens; identical to SEQ ID NO: 2395
  chr5:142782056-142782128
  hypo

SEQ ID NO: 45297 - DNA, 31 bp, Homo sapiens; identical to SEQ ID NO: 2396
  chr5:142782141-142782172
  hypo

SEQ ID NO: 45298 - DNA, 212 bp, Homo sapiens; identical to SEQ ID NO: 2397
  chr5:142782221-142782433
  hypo

SEQ ID NO: 45299 - DNA, 31 bp, Homo sapiens; identical to SEQ ID NO: 2398
  chr5:142784013-142784044
  hypo

SEQ ID NO: 45300 - DNA, 108 bp, Homo sapiens; identical to SEQ ID NO: 36662
  chr5:142784568-142784676
  hypo

SEQ ID NO: 45301 - DNA, 40 bp, Homo sapiens; identical to SEQ ID NO: 13210
  chr5:143182535-143182575
  hypo

SEQ ID NO: 45302 - DNA, 31 bp, Homo sapiens; identical to SEQ ID NO: 13211
  chr5:145379610-145379641
  hypo

SEQ ID NO: 45303 - DNA, 31 bp, Homo sapiens; identical to SEQ ID NO: 13212
  chr5:145379648-145379679
  hypo

SEQ ID NO: 45304 - DNA, 31 bp, Homo sapiens; identical to SEQ ID NO: 13213
  chr5:145379688-145379719
  hypo

SEQ ID NO: 45305 - DNA, 31 bp, Homo sapiens; identical to SEQ ID NO: 13214
  chr5:145379738-145379769
  hypo

SEQ ID NO: 45306 - DNA, 31 bp, Homo sapiens; identical to SEQ ID NO: 13215
  chr5:145438102-145438133
  hypo

SEQ ID NO: 45307 - DNA, 56 bp, Homo sapiens; identical to SEQ ID NO: 13216
  chr5:147040650-147040706
  hypo

SEQ ID NO: 45308 - DNA, 35 bp, Homo sapiens; identical to SEQ ID NO: 13217
  chr5:147274325-147274360
  hypo

SEQ ID NO: 45309 - DNA, 31 bp, Homo sapiens; identical to SEQ ID NO: 13218
  chr5:148409734-148409765
  hypo

SEQ ID NO: 45310 - DNA, 31 bp, Homo sapiens; identical to SEQ ID NO: 13219
  chr5:148409804-148409835
  hypo

SEQ ID NO: 45311 - DNA, 43 bp, Homo sapiens; identical to SEQ ID NO: 13220
  chr5:148409889-148409932
  hypo

SEQ ID NO: 45312 - DNA, 31 bp, Homo sapiens; identical to SEQ ID NO: 13221
  chr5:148669501-148669532
  hypo

SEQ ID NO: 45313 - DNA, 36 bp, Homo sapiens; identical to SEQ ID NO: 13222
  chr5:148686934-148686970
  hypo

SEQ ID NO: 45314 - DNA, 62 bp, Homo sapiens; identical to SEQ ID NO: 13223
  chr5:148695864-148695926
  hypo

SEQ ID NO: 45315 - DNA, 31 bp, Homo sapiens; identical to SEQ ID NO: 13224
  chr5:148695933-148695964
  hypo

SEQ ID NO: 45316 - DNA, 31 bp, Homo sapiens; identical to SEQ ID NO: 2408
  chr5:148724796-148724827
  hypo

SEQ ID NO: 45317 - DNA, 31 bp, Homo sapiens; identical to SEQ ID NO: 2409
  chr5:148724872-148724903
  hypo

SEQ ID NO: 45318 - DNA, 31 bp, Homo sapiens; identical to SEQ ID NO: 13227
  chr5:148745523-148745554
  hypo

SEQ ID NO: 45319 - DNA, 31 bp, Homo sapiens; identical to SEQ ID NO: 13228
  chr5:148748095-148748126
  hypo

SEQ ID NO: 45320 - DNA, 50 bp, Homo sapiens; identical to SEQ ID NO: 13229
  chr5:148754032-148754082
  hypo

SEQ ID NO: 45321 - DNA, 31 bp, Homo sapiens; identical to SEQ ID NO: 13230
  chr5:148823375-148823406
  hypo

SEQ ID NO: 45322 - DNA, 31 bp, Homo sapiens; identical to SEQ ID NO: 13231
  chr5:148850848-148850879
  hypo

SEQ ID NO: 45323 - DNA, 59 bp, Homo sapiens; identical to SEQ ID NO: 13233
  chr5:148938521-148938580
  hypo

SEQ ID NO: 45324 - DNA, 62 bp, Homo sapiens; identical to SEQ ID NO: 13235
  chr5:148980119-148980181
  hypo

SEQ ID NO: 45325 - DNA, 31 bp, Homo sapiens; identical to SEQ ID NO: 13236
  chr5:148981577-148981608
  hypo

SEQ ID NO: 45326 - DNA, 31 bp, Homo sapiens; identical to SEQ ID NO: 13237
  chr5:148982436-148982467
  hypo

SEQ ID NO: 45327 - DNA, 90 bp, Homo sapiens; identical to SEQ ID NO: 13239
  chr5:148989227-148989317
  hypo

SEQ ID NO: 45328 - DNA, 43 bp, Homo sapiens; identical to SEQ ID NO: 13240
  chr5:148989329-148989372
  hypo

SEQ ID NO: 45329 - DNA, 37 bp, Homo sapiens; identical to SEQ ID NO: 13241
  chr5:148999329-148999366
  hypo

SEQ ID NO: 45330 - DNA, 44 bp, Homo sapiens; identical to SEQ ID NO: 13242
  chr5:149006875-149006919
  hypo

SEQ ID NO: 45331 - DNA, 31 bp, Homo sapiens; identical to SEQ ID NO: 13243
  chr5:149270743-149270774
  hypo

SEQ ID NO: 45332 - DNA, 103 bp, Homo sapiens; identical to SEQ ID NO: 13244
  chr5:149323763-149323866
  hypo

SEQ ID NO: 45333 - DNA, 31 bp, Homo sapiens; identical to SEQ ID NO: 13245
  chr5:149333519-149333550
  hypo

SEQ ID NO: 45334 - DNA, 52 bp, Homo sapiens; identical to SEQ ID NO: 13246
  chr5:149449458-149449510
  hypo

SEQ ID NO: 45335 - DNA, 40 bp, Homo sapiens; identical to SEQ ID NO: 13247
  chr5:149501435-149501475
  hypo

SEQ ID NO: 45336 - DNA, 31 bp, Homo sapiens; identical to SEQ ID NO: 13248
  chr5:149502536-149502567
  hypo

SEQ ID NO: 45337 - DNA, 75 bp, Homo sapiens; identical to SEQ ID NO: 13249
  chr5:149503639-149503714
  hypo

SEQ ID NO: 45338 - DNA, 31 bp, Homo sapiens; identical to SEQ ID NO: 13250
  chr5:149503735-149503766
  hypo

SEQ ID NO: 45339 - DNA, 36 bp, Homo sapiens; identical to SEQ ID NO: 13251
  chr5:149573354-149573390
  hypo

SEQ ID NO: 45340 - DNA, 31 bp, Homo sapiens; identical to SEQ ID NO: 13252
  chr5:149573406-149573437
  hypo

SEQ ID NO: 45341 - DNA, 31 bp, Homo sapiens; identical to SEQ ID NO: 13253
  chr5:149573467-149573498
  hypo

SEQ ID NO: 45342 - DNA, 31 bp, Homo sapiens; identical to SEQ ID NO: 13254
  chr5:149573511-149573542
  hypo

SEQ ID NO: 45343 - DNA, 31 bp, Homo sapiens; identical to SEQ ID NO: 13255
  chr5:149581943-149581974
  hypo

SEQ ID NO: 45344 - DNA, 55 bp, Homo sapiens; identical to SEQ ID NO: 13256
  chr5:149725940-149725995
  hypo

SEQ ID NO: 45345 - DNA, 31 bp, Homo sapiens; identical to SEQ ID NO: 13257
  chr5:149726051-149726082
  hypo

SEQ ID NO: 45346 - DNA, 31 bp, Homo sapiens; identical to SEQ ID NO: 13258
  chr5:149726098-149726129
  hypo

SEQ ID NO: 45347 - DNA, 42 bp, Homo sapiens; identical to SEQ ID NO: 13259
  chr5:149800712-149800754
  hypo

SEQ ID NO: 45348 - DNA, 31 bp, Homo sapiens; identical to SEQ ID NO: 13262
  chr5:149866413-149866444
  hypo

SEQ ID NO: 45349 - DNA, 31 bp, Homo sapiens; identical to SEQ ID NO: 13263
  chr5:149922920-149922951
  hypo

SEQ ID NO: 45350 - DNA, 31 bp, Homo sapiens; identical to SEQ ID NO: 13264
  chr5:149925306-149925337
  hypo

SEQ ID NO: 45351 - DNA, 55 bp, Homo sapiens; identical to SEQ ID NO: 13265
  chr5:150028667-150028722
  hypo

SEQ ID NO: 45352 - DNA, 31 bp, Homo sapiens; identical to SEQ ID NO: 13266
  chr5:150030360-150030391
  hypo

SEQ ID NO: 45353 - DNA, 31 bp, Homo sapiens; identical to SEQ ID NO: 13267
  chr5:150055342-150055373
  hypo

SEQ ID NO: 45354 - DNA, 31 bp, Homo sapiens; identical to SEQ ID NO: 13268
  chr5:150446151-150446182
  hypo

SEQ ID NO: 45355 - DNA, 62 bp, Homo sapiens; identical to SEQ ID NO: 13269
  chr5:150446274-150446336
  hypo

SEQ ID NO: 45356 - DNA, 31 bp, Homo sapiens; identical to SEQ ID NO: 13270
  chr5:150834190-150834221
  hypo

SEQ ID NO: 45357 - DNA, 31 bp, Homo sapiens; identical to SEQ ID NO: 13271
  chr5:150885248-150885279
  hypo

SEQ ID NO: 45358 - DNA, 31 bp, Homo sapiens; identical to SEQ ID NO: 13272
  chr5:150885683-150885714
  hypo

SEQ ID NO: 45359 - DNA, 135 bp, Homo sapiens; identical to SEQ ID NO: 36670
  chr5:151150429-151150564
  hypo

SEQ ID NO: 45360 - DNA, 59 bp, Homo sapiens; identical to SEQ ID NO: 36671
  chr5:151150681-151150740
  hypo

SEQ ID NO: 45361 - DNA, 2 bp, Homo sapiens
  chr5:153785958-153785960
  hypo
tg

SEQ ID NO: 45362 - DNA, 35 bp, Homo sapiens; identical to SEQ ID NO: 13275
  chr5:153786061-153786096
  hypo

SEQ ID NO: 45363 - DNA, 9 bp, Homo sapiens
  chr5:154318069-154318078
  hypo
tgttcaacc

SEQ ID NO: 45364 - DNA, 31 bp, Homo sapiens; identical to SEQ ID NO: 2426
  chr5:159228213-159228244
  hypo

SEQ ID NO: 45365 - DNA, 31 bp, Homo sapiens; identical to SEQ ID NO: 13288
  chr5:159669396-159669427
  hypo

SEQ ID NO: 45366 - DNA, 62 bp, Homo sapiens; identical to SEQ ID NO: 13289
  chr5:159686735-159686797
  hypo

SEQ ID NO: 45367 - DNA, 31 bp, Homo sapiens; identical to SEQ ID NO: 13290
  chr5:159686824-159686855
  hypo

SEQ ID NO: 45368 - DNA, 31 bp, Homo sapiens; identical to SEQ ID NO: 13291
  chr5:159686888-159686919
  hypo

SEQ ID NO: 45369 - DNA, 37 bp, Homo sapiens; identical to SEQ ID NO: 13292
  chr5:159687105-159687142
  hypo

SEQ ID NO: 45370 - DNA, 31 bp, Homo sapiens; identical to SEQ ID NO: 13293
  chr5:159692187-159692218
  hypo

SEQ ID NO: 45371 - DNA, 52 bp, Homo sapiens; identical to SEQ ID NO: 2428
  chr5:159826415-159826467
  hypo

SEQ ID NO: 45372 - DNA, 56 bp, Homo sapiens; identical to SEQ ID NO: 2429
  chr5:159826533-159826589
  hypo

SEQ ID NO: 45373 - DNA, 2 bp, Homo sapiens
  chr5:160498376-160498378
  hypo
cg

SEQ ID NO: 45374 - DNA, 31 bp, Homo sapiens; identical to SEQ ID NO: 13297
  chr5:166318065-166318096
  hypo

SEQ ID NO: 45375 - DNA, 66 bp, Homo sapiens; identical to SEQ ID NO: 13298
  chr5:166477137-166477203
  hypo

SEQ ID NO: 45376 - DNA, 57 bp, Homo sapiens; identical to SEQ ID NO: 13299
  chr5:167652912-167652969
  hypo

SEQ ID NO: 45377 - DNA, 49 bp, Homo sapiens; identical to SEQ ID NO: 13300
  chr5:167671585-167671634
  hypo

SEQ ID NO: 45378 - DNA, 31 bp, Homo sapiens; identical to SEQ ID NO: 13301
  chr5:167689408-167689439
  hypo

SEQ ID NO: 45379 - DNA, 36 bp, Homo sapiens; identical to SEQ ID NO: 13302
  chr5:167698410-167698446
  hypo

SEQ ID NO: 45380 - DNA, 149 bp, Homo sapiens; identical to SEQ ID NO: 2434
  chr5:167718507-167718656
  hypo

SEQ ID NO: 45381 - DNA, 66 bp, Homo sapiens; identical to SEQ ID NO: 2435
  chr5:167718665-167718731
  hypo

SEQ ID NO: 45382 - DNA, 31 bp, Homo sapiens; identical to SEQ ID NO: 2436
  chr5:167718951-167718982
  hypo

SEQ ID NO: 45383 - DNA, 72 bp, Homo sapiens; identical to SEQ ID NO: 2437
  chr5:167719031-167719103
  hypo

SEQ ID NO: 45384 - DNA, 35 bp, Homo sapiens; identical to SEQ ID NO: 2438
  chr5:167719147-167719182
  hypo

SEQ ID NO: 45385 - DNA, 31 bp, Homo sapiens; identical to SEQ ID NO: 13308
  chr5:167825007-167825038
  hypo

SEQ ID NO: 45386 - DNA, 31 bp, Homo sapiens; identical to SEQ ID NO: 13309
  chr5:167833667-167833698
  hypo

SEQ ID NO: 45387 - DNA, 43 bp, Homo sapiens; identical to SEQ ID NO: 13310
  chr5:167847700-167847743
  hypo

SEQ ID NO: 45388 - DNA, 52 bp, Homo sapiens; identical to SEQ ID NO: 13311
  chr5:167853640-167853692
  hypo

SEQ ID NO: 45389 - DNA, 55 bp, Homo sapiens; identical to SEQ ID NO: 13312
  chr5:167853707-167853762
  hypo

SEQ ID NO: 45390 - DNA, 49 bp, Homo sapiens; identical to SEQ ID NO: 13313
  chr5:167853770-167853819
  hypo

SEQ ID NO: 45391 - DNA, 31 bp, Homo sapiens; identical to SEQ ID NO: 13314
  chr5:167858405-167858436
  hypo

SEQ ID NO: 45392 - DNA, 45 bp, Homo sapiens; identical to SEQ ID NO: 13315
  chr5:167897878-167897923
  hypo

SEQ ID NO: 45393 - DNA, 31 bp, Homo sapiens; identical to SEQ ID NO: 13316
  chr5:168184344-168184375
  hypo

SEQ ID NO: 45394 - DNA, 2 bp, Homo sapiens
  chr5:169157435-169157437
  hypo
ag

SEQ ID NO: 45395 - DNA, 20 bp, Homo sapiens
  chr5:169157538-169157558
  hypo
tagcacgtataatacttggg

SEQ ID NO: 45396 - DNA, 38 bp, Homo sapiens; identical to SEQ ID NO: 13322
  chr5:169157572-169157610
  hypo

SEQ ID NO: 45397 - DNA, 31 bp, Homo sapiens; identical to SEQ ID NO: 13323
  chr5:169821168-169821199
  hypo

SEQ ID NO: 45398 - DNA, 31 bp, Homo sapiens; identical to SEQ ID NO: 13324
  chr5:170169587-170169618
  hypo

SEQ ID NO: 45399 - DNA, 31 bp, Homo sapiens; identical to SEQ ID NO: 13325
  chr5:170680140-170680171
  hypo

SEQ ID NO: 45400 - DNA, 85 bp, Homo sapiens; identical to SEQ ID NO: 13326
  chr5:170863091-170863176
  hypo

SEQ ID NO: 45401 - DNA, 2 bp, Homo sapiens
  chr5:171533618-171533620
  hypo
ct

SEQ ID NO: 45402 - DNA, 90 bp, Homo sapiens
  chr5:171533658-171533748
  hypo
cttggcgatctttagcaggacccgcatggggttgagctcgtggtgtggcggctcgatctgggccatctcaatcagcgtgatgcccaggga

SEQ ID NO: 45403 - DNA, 46 bp, Homo sapiens; identical to SEQ ID NO: 13328
  chr5:171724014-171724060
  hypo

SEQ ID NO: 45404 - DNA, 31 bp, Homo sapiens; identical to SEQ ID NO: 13329
  chr5:171762546-171762577
  hypo

SEQ ID NO: 45405 - DNA, 168 bp, Homo sapiens; identical to SEQ ID NO: 13330
  chr5:171766443-171766611
  hypo

SEQ ID NO: 45406 - DNA, 31 bp, Homo sapiens; identical to SEQ ID NO: 13331
  chr5:171766652-171766683
  hypo

SEQ ID NO: 45407 - DNA, 73 bp, Homo sapiens; identical to SEQ ID NO: 13332
  chr5:171766796-171766869
  hypo

SEQ ID NO: 45408 - DNA, 73 bp, Homo sapiens; identical to SEQ ID NO: 13333
  chr5:171769328-171769401
  hypo

SEQ ID NO: 45409 - DNA, 41 bp, Homo sapiens; identical to SEQ ID NO: 13334
  chr5:171777274-171777315
  hypo

SEQ ID NO: 45410 - DNA, 31 bp, Homo sapiens; identical to SEQ ID NO: 13335
  chr5:171777336-171777367
  hypo

SEQ ID NO: 45411 - DNA, 61 bp, Homo sapiens; identical to SEQ ID NO: 13338
  chr5:171821578-171821639
  hypo

SEQ ID NO: 45412 - DNA, 31 bp, Homo sapiens; identical to SEQ ID NO: 13339
  chr5:171821706-171821737
  hypo

SEQ ID NO: 45413 - DNA, 31 bp, Homo sapiens; identical to SEQ ID NO: 13340
  chr5:171821749-171821780
  hypo

SEQ ID NO: 45414 - DNA, 45 bp, Homo sapiens; identical to SEQ ID NO: 13341
  chr5:171858872-171858917
  hypo

SEQ ID NO: 45415 - DNA, 31 bp, Homo sapiens; identical to SEQ ID NO: 13342
  chr5:171859508-171859539
  hypo

SEQ ID NO: 45416 - DNA, 31 bp, Homo sapiens; identical to SEQ ID NO: 13343
  chr5:171859591-171859622
  hypo

SEQ ID NO: 45417 - DNA, 31 bp, Homo sapiens; identical to SEQ ID NO: 13344
  chr5:171863585-171863616
  hypo

SEQ ID NO: 45418 - DNA, 31 bp, Homo sapiens; identical to SEQ ID NO: 13345
  chr5:171892635-171892666
  hypo

SEQ ID NO: 45419 - DNA, 31 bp, Homo sapiens; identical to SEQ ID NO: 13346
  chr5:171916859-171916890
  hypo

SEQ ID NO: 45420 - DNA, 31 bp, Homo sapiens; identical to SEQ ID NO: 13347
  chr5:171916917-171916948
  hypo

SEQ ID NO: 45421 - DNA, 45 bp, Homo sapiens; identical to SEQ ID NO: 13348
  chr5:171916965-171917010
  hypo

SEQ ID NO: 45422 - DNA, 31 bp, Homo sapiens; identical to SEQ ID NO: 13349
  chr5:172016614-172016645
  hypo

SEQ ID NO: 45423 - DNA, 31 bp, Homo sapiens; identical to SEQ ID NO: 13350
  chr5:172016649-172016680
  hypo

SEQ ID NO: 45424 - DNA, 33 bp, Homo sapiens; identical to SEQ ID NO: 13351
  chr5:172062314-172062347
  hypo

SEQ ID NO: 45425 - DNA, 31 bp, Homo sapiens; identical to SEQ ID NO: 13352
  chr5:172097650-172097681
  hypo

SEQ ID NO: 45426 - DNA, 31 bp, Homo sapiens; identical to SEQ ID NO: 13353
  chr5:172097714-172097745
  hypo

SEQ ID NO: 45427 - DNA, 40 bp, Homo sapiens; identical to SEQ ID NO: 13354
  chr5:172105003-172105043
  hypo

SEQ ID NO: 45428 - DNA, 64 bp, Homo sapiens; identical to SEQ ID NO: 13355
  chr5:172113721-172113785
  hypo

SEQ ID NO: 45429 - DNA, 38 bp, Homo sapiens; identical to SEQ ID NO: 13356
  chr5:172114001-172114039
  hypo

SEQ ID NO: 45430 - DNA, 38 bp, Homo sapiens; identical to SEQ ID NO: 13357
  chr5:172114044-172114082
  hypo

SEQ ID NO: 45431 - DNA, 31 bp, Homo sapiens; identical to SEQ ID NO: 13358
  chr5:172118020-172118051
  hypo

SEQ ID NO: 45432 - DNA, 69 bp, Homo sapiens; identical to SEQ ID NO: 13362
  chr5:172346277-172346346
  hypo

SEQ ID NO: 45433 - DNA, 31 bp, Homo sapiens; identical to SEQ ID NO: 13363
  chr5:172346379-172346410
  hypo

SEQ ID NO: 45434 - DNA, 31 bp, Homo sapiens; identical to SEQ ID NO: 13364
  chr5:172346412-172346443
  hypo

SEQ ID NO: 45435 - DNA, 31 bp, Homo sapiens; identical to SEQ ID NO: 13365
  chr5:172346455-172346486
  hypo

SEQ ID NO: 45436 - DNA, 2 bp, Homo sapiens
  chr5:172354042-172354044
  hypo
ct

SEQ ID NO: 45437 - DNA, 65 bp, Homo sapiens; identical to SEQ ID NO: 2452
  chr5:172385727-172385792
  hypo

SEQ ID NO: 45438 - DNA, 50 bp, Homo sapiens; identical to SEQ ID NO: 2453
  chr5:172385794-172385844
  hypo

SEQ ID NO: 45439 - DNA, 72 bp, Homo sapiens; identical to SEQ ID NO: 2454
  chr5:172385853-172385925
  hypo

SEQ ID NO: 45440 - DNA, 45 bp, Homo sapiens; identical to SEQ ID NO: 2455
  chr5:172386282-172386327
  hypo

SEQ ID NO: 45441 - DNA, 51 bp, Homo sapiens; identical to SEQ ID NO: 2456
  chr5:172386395-172386446
  hypo

SEQ ID NO: 45442 - DNA, 35 bp, Homo sapiens; identical to SEQ ID NO: 13373
  chr5:172454587-172454622
  hypo

SEQ ID NO: 45443 - DNA, 31 bp, Homo sapiens; identical to SEQ ID NO: 13374
  chr5:172724771-172724802
  hypo

SEQ ID NO: 45444 - DNA, 61 bp, Homo sapiens; identical to SEQ ID NO: 13375
  chr5:172765670-172765731
  hypo

SEQ ID NO: 45445 - DNA, 40 bp, Homo sapiens; identical to SEQ ID NO: 13376
  chr5:172765757-172765797
  hypo

SEQ ID NO: 45446 - DNA, 31 bp, Homo sapiens; identical to SEQ ID NO: 13377
  chr5:172765836-172765867
  hypo

SEQ ID NO: 45447 - DNA, 42 bp, Homo sapiens; identical to SEQ ID NO: 13378
  chr5:173396937-173396979
  hypo

SEQ ID NO: 45448 - DNA, 27 bp, Homo sapiens
  chr5:173397036-173397063
  hypo
tagttcttgagaaagccgtgaacgttc

SEQ ID NO: 45449 - DNA, 31 bp, Homo sapiens; identical to SEQ ID NO: 13383
  chr5:175337161-175337192
  hypo

SEQ ID NO: 45450 - DNA, 31 bp, Homo sapiens; identical to SEQ ID NO: 13384
  chr5:175387361-175387392
  hypo

SEQ ID NO: 45451 - DNA, 31 bp, Homo sapiens; identical to SEQ ID NO: 13385
  chr5:175387428-175387459
  hypo

SEQ ID NO: 45452 - DNA, 62 bp, Homo sapiens; identical to SEQ ID NO: 13386
  chr5:175387490-175387552
  hypo

SEQ ID NO: 45453 - DNA, 31 bp, Homo sapiens; identical to SEQ ID NO: 13388
  chr5:175831151-175831182
  hypo

SEQ ID NO: 45454 - DNA, 31 bp, Homo sapiens; identical to SEQ ID NO: 13389
  chr5:175831642-175831673
  hypo

SEQ ID NO: 45455 - DNA, 31 bp, Homo sapiens; identical to SEQ ID NO: 13390
  chr5:175871777-175871808
  hypo

SEQ ID NO: 45456 - DNA, 31 bp, Homo sapiens; identical to SEQ ID NO: 13393
  chr5:175975194-175975225
  hypo

SEQ ID NO: 45457 - DNA, 88 bp, Homo sapiens; identical to SEQ ID NO: 13394
  chr5:176003231-176003319
  hypo

SEQ ID NO: 45458 - DNA, 36 bp, Homo sapiens; identical to SEQ ID NO: 13395
  chr5:176003352-176003388
  hypo

SEQ ID NO: 45459 - DNA, 38 bp, Homo sapiens; identical to SEQ ID NO: 13396
  chr5:176003398-176003436
  hypo

SEQ ID NO: 45460 - DNA, 31 bp, Homo sapiens; identical to SEQ ID NO: 13397
  chr5:176012686-176012717
  hypo

SEQ ID NO: 45461 - DNA, 94 bp, Homo sapiens; identical to SEQ ID NO: 13398
  chr5:176012755-176012849
  hypo

SEQ ID NO: 45462 - DNA, 77 bp, Homo sapiens; identical to SEQ ID NO: 13399
  chr5:176016152-176016229
  hypo

SEQ ID NO: 45463 - DNA, 31 bp, Homo sapiens; identical to SEQ ID NO: 13400
  chr5:176066107-176066138
  hypo

SEQ ID NO: 45464 - DNA, 31 bp, Homo sapiens; identical to SEQ ID NO: 13401
  chr5:176066139-176066170
  hypo

SEQ ID NO: 45465 - DNA, 31 bp, Homo sapiens; identical to SEQ ID NO: 13402
  chr5:176087845-176087876
  hypo

SEQ ID NO: 45466 - DNA, 31 bp, Homo sapiens; identical to SEQ ID NO: 13403
  chr5:176680868-176680899
  hypo

SEQ ID NO: 45467 - DNA, 31 bp, Homo sapiens; identical to SEQ ID NO: 13404
  chr5:176694902-176694933
  hypo

SEQ ID NO: 45468 - DNA, 76 bp, Homo sapiens; identical to SEQ ID NO: 13405
  chr5:176694989-176695065
  hypo

SEQ ID NO: 45469 - DNA, 2 bp, Homo sapiens
  chr5:176764099-176764101
  hypo
ct

SEQ ID NO: 45470 - DNA, 18 bp, Homo sapiens
  chr5:176764238-176764256
  hypo
ggtcggtcatcacctgca

SEQ ID NO: 45471 - DNA, 35 bp, Homo sapiens; identical to SEQ ID NO: 13407
  chr5:176780527-176780562
  hypo

SEQ ID NO: 45472 - DNA, 31 bp, Homo sapiens; identical to SEQ ID NO: 13408
  chr5:176912593-176912624
  hypo

SEQ ID NO: 45473 - DNA, 31 bp, Homo sapiens; identical to SEQ ID NO: 13409
  chr5:176918897-176918928
  hypo

SEQ ID NO: 45474 - DNA, 42 bp, Homo sapiens; identical to SEQ ID NO: 13410
  chr5:176919050-176919092
  hypo

SEQ ID NO: 45475 - DNA, 31 bp, Homo sapiens; identical to SEQ ID NO: 13411
  chr5:176919217-176919248
  hypo

SEQ ID NO: 45476 - DNA, 46 bp, Homo sapiens; identical to SEQ ID NO: 13412
  chr5:176919339-176919385
  hypo

SEQ ID NO: 45477 - DNA, 31 bp, Homo sapiens; identical to SEQ ID NO: 13413
  chr5:176926732-176926763
  hypo

SEQ ID NO: 45478 - DNA, 80 bp, Homo sapiens; identical to SEQ ID NO: 13414
  chr5:176965941-176966021
  hypo

SEQ ID NO: 45479 - DNA, 31 bp, Homo sapiens; identical to SEQ ID NO: 13415
  chr5:176966073-176966104
  hypo

SEQ ID NO: 45480 - DNA, 62 bp, Homo sapiens; identical to SEQ ID NO: 13418
  chr5:177310251-177310313
  hypo

SEQ ID NO: 45481 - DNA, 31 bp, Homo sapiens; identical to SEQ ID NO: 13419
  chr5:177310340-177310371
  hypo

SEQ ID NO: 45482 - DNA, 31 bp, Homo sapiens; identical to SEQ ID NO: 13420
  chr5:177310407-177310438
  hypo

SEQ ID NO: 45483 - DNA, 31 bp, Homo sapiens; identical to SEQ ID NO: 13421
  chr5:177675598-177675629
  hypo

SEQ ID NO: 45484 - DNA, 40 bp, Homo sapiens; identical to SEQ ID NO: 13422
  chr5:177718240-177718280
  hypo

SEQ ID NO: 45485 - DNA, 37 bp, Homo sapiens; identical to SEQ ID NO: 13423
  chr5:177964384-177964421
  hypo

SEQ ID NO: 45486 - DNA, 31 bp, Homo sapiens; identical to SEQ ID NO: 13424
  chr5:178006763-178006794
  hypo

SEQ ID NO: 45487 - DNA, 31 bp, Homo sapiens; identical to SEQ ID NO: 13425
  chr5:178012189-178012220
  hypo

SEQ ID NO: 45488 - DNA, 31 bp, Homo sapiens; identical to SEQ ID NO: 13426
  chr5:178224674-178224705
  hypo

SEQ ID NO: 45489 - DNA, 152 bp, Homo sapiens; identical to SEQ ID NO: 2464
  chr5:178287096-178287248
  hypo

SEQ ID NO: 45490 - DNA, 31 bp, Homo sapiens; identical to SEQ ID NO: 2465
  chr5:178287336-178287367
  hypo

SEQ ID NO: 45491 - DNA, 199 bp, Homo sapiens; identical to SEQ ID NO: 2466
  chr5:178287401-178287600
  hypo

SEQ ID NO: 45492 - DNA, 31 bp, Homo sapiens; identical to SEQ ID NO: 13430
  chr5:178289145-178289176
  hypo

SEQ ID NO: 45493 - DNA, 60 bp, Homo sapiens; identical to SEQ ID NO: 13431
  chr5:178289252-178289312
  hypo

SEQ ID NO: 45494 - DNA, 31 bp, Homo sapiens; identical to SEQ ID NO: 13432
  chr5:178291936-178291967
  hypo

SEQ ID NO: 45495 - DNA, 31 bp, Homo sapiens; identical to SEQ ID NO: 13433
  chr5:178292217-178292248
  hypo

SEQ ID NO: 45496 - DNA, 31 bp, Homo sapiens; identical to SEQ ID NO: 13434
  chr5:178292250-178292281
  hypo

SEQ ID NO: 45497 - DNA, 31 bp, Homo sapiens; identical to SEQ ID NO: 13435
  chr5:178293312-178293343
  hypo

SEQ ID NO: 45498 - DNA, 46 bp, Homo sapiens; identical to SEQ ID NO: 13436
  chr5:178295549-178295595
  hypo

SEQ ID NO: 45499 - DNA, 31 bp, Homo sapiens; identical to SEQ ID NO: 13437
  chr5:178295982-178296013
  hypo

SEQ ID NO: 45500 - DNA, 42 bp, Homo sapiens; identical to SEQ ID NO: 13438
  chr5:178296033-178296075
  hypo

SEQ ID NO: 45501 - DNA, 31 bp, Homo sapiens; identical to SEQ ID NO: 13439
  chr5:178296168-178296199
  hypo

SEQ ID NO: 45502 - DNA, 52 bp, Homo sapiens; identical to SEQ ID NO: 13440
  chr5:178296224-178296276
  hypo

SEQ ID NO: 45503 - DNA, 31 bp, Homo sapiens; identical to SEQ ID NO: 13441
  chr5:178296294-178296325
  hypo

SEQ ID NO: 45504 - DNA, 44 bp, Homo sapiens; identical to SEQ ID NO: 13442
  chr5:178298334-178298378
  hypo

SEQ ID NO: 45505 - DNA, 31 bp, Homo sapiens; identical to SEQ ID NO: 2467
  chr5:178423618-178423649
  hypo

SEQ ID NO: 45506 - DNA, 31 bp, Homo sapiens; identical to SEQ ID NO: 2468
  chr5:178423673-178423704
  hypo

SEQ ID NO: 45507 - DNA, 31 bp, Homo sapiens; identical to SEQ ID NO: 2469
  chr5:178423764-178423795
  hypo

SEQ ID NO: 45508 - DNA, 34 bp, Homo sapiens; identical to SEQ ID NO: 2470
  chr5:178423799-178423833
  hypo

SEQ ID NO: 45509 - DNA, 31 bp, Homo sapiens; identical to SEQ ID NO: 13448
  chr5:178451595-178451626
  hypo

SEQ ID NO: 45510 - DNA, 31 bp, Homo sapiens; identical to SEQ ID NO: 13449
  chr5:178551593-178551624
  hypo

SEQ ID NO: 45511 - DNA, 31 bp, Homo sapiens; identical to SEQ ID NO: 13450
  chr5:178589359-178589390
  hypo

SEQ ID NO: 45512 - DNA, 31 bp, Homo sapiens; identical to SEQ ID NO: 13451
  chr5:178589425-178589456
  hypo

SEQ ID NO: 45513 - DNA, 37 bp, Homo sapiens; identical to SEQ ID NO: 13452
  chr5:178589466-178589503
  hypo

SEQ ID NO: 45514 - DNA, 34 bp, Homo sapiens; identical to SEQ ID NO: 13453
  chr5:178589504-178589538
  hypo

SEQ ID NO: 45515 - DNA, 31 bp, Homo sapiens; identical to SEQ ID NO: 13454
  chr5:178652178-178652209
  hypo

SEQ ID NO: 45516 - DNA, 31 bp, Homo sapiens; identical to SEQ ID NO: 13455
  chr5:178744775-178744806
  hypo

SEQ ID NO: 45517 - DNA, 55 bp, Homo sapiens; identical to SEQ ID NO: 2471
  chr5:179234472-179234527
  hypo

SEQ ID NO: 45518 - DNA, 95 bp, Homo sapiens; identical to SEQ ID NO: 2472
  chr5:179246494-179246589
  hypo

SEQ ID NO: 45519 - DNA, 31 bp, Homo sapiens; identical to SEQ ID NO: 13459
  chr5:179293875-179293906
  hypo

SEQ ID NO: 45520 - DNA, 31 bp, Homo sapiens; identical to SEQ ID NO: 13460
  chr5:179383617-179383648
  hypo

SEQ ID NO: 45521 - DNA, 99 bp, Homo sapiens; identical to SEQ ID NO: 13461
  chr5:179473084-179473183
  hypo

SEQ ID NO: 45522 - DNA, 66 bp, Homo sapiens; identical to SEQ ID NO: 13462
  chr5:179473189-179473255
  hypo

SEQ ID NO: 45523 - DNA, 31 bp, Homo sapiens; identical to SEQ ID NO: 13463
  chr5:179503668-179503699
  hypo

SEQ ID NO: 45524 - DNA, 31 bp, Homo sapiens; identical to SEQ ID NO: 13464
  chr5:179503704-179503735
  hypo

SEQ ID NO: 45525 - DNA, 49 bp, Homo sapiens; identical to SEQ ID NO: 13465
  chr5:179503741-179503790
  hypo

SEQ ID NO: 45526 - DNA, 31 bp, Homo sapiens; identical to SEQ ID NO: 13466
  chr5:179503826-179503857
  hypo

SEQ ID NO: 45527 - DNA, 42 bp, Homo sapiens; identical to SEQ ID NO: 13467
  chr5:179545454-179545496
  hypo

SEQ ID NO: 45528 - DNA, 31 bp, Homo sapiens; identical to SEQ ID NO: 13468
  chr5:179547026-179547057
  hypo

SEQ ID NO: 45529 - DNA, 70 bp, Homo sapiens; identical to SEQ ID NO: 13469
  chr5:179547318-179547388
  hypo

SEQ ID NO: 45530 - DNA, 74 bp, Homo sapiens; identical to SEQ ID NO: 13471
  chr5:179726330-179726404
  hypo

SEQ ID NO: 45531 - DNA, 34 bp, Homo sapiens; identical to SEQ ID NO: 13472
  chr5:179726461-179726495
  hypo

SEQ ID NO: 45532 - DNA, 36 bp, Homo sapiens; identical to SEQ ID NO: 13473
  chr5:179731618-179731654
  hypo

SEQ ID NO: 45533 - DNA, 53 bp, Homo sapiens; identical to SEQ ID NO: 13474
  chr5:179731759-179731812
  hypo

SEQ ID NO: 45534 - DNA, 31 bp, Homo sapiens; identical to SEQ ID NO: 13475
  chr5:179773468-179773499
  hypo

SEQ ID NO: 45535 - DNA, 31 bp, Homo sapiens; identical to SEQ ID NO: 13477
  chr5:179903411-179903442
  hypo

SEQ ID NO: 45536 - DNA, 37 bp, Homo sapiens; identical to SEQ ID NO: 13479
  chr5:180036854-180036891
  hypo

SEQ ID NO: 45537 - DNA, 58 bp, Homo sapiens; identical to SEQ ID NO: 13480
  chr5:180047268-180047326
  hypo

SEQ ID NO: 45538 - DNA, 75 bp, Homo sapiens; identical to SEQ ID NO: 13481
  chr5:180502177-180502252
  hypo

SEQ ID NO: 45539 - DNA, 31 bp, Homo sapiens; identical to SEQ ID NO: 13483
  chr5:180657109-180657140
  hypo

SEQ ID NO: 45540 - DNA, 31 bp, Homo sapiens; identical to SEQ ID NO: 13484
  chr5:180657141-180657172
  hypo

SEQ ID NO: 45541 - DNA, 42 bp, Homo sapiens; identical to SEQ ID NO: 2476
  chr5:180673931-180673973
  hypo

SEQ ID NO: 45542 - DNA, 83 bp, Homo sapiens; identical to SEQ ID NO: 2477
  chr5:180674032-180674115
  hypo

SEQ ID NO: 45543 - DNA, 47 bp, Homo sapiens; identical to SEQ ID NO: 2478
  chr5:180674116-180674163
  hypo

SEQ ID NO: 45544 - DNA, 31 bp, Homo sapiens; identical to SEQ ID NO: 2479
  chr5:180674175-180674206
  hypo

SEQ ID NO: 45545 - DNA, 44 bp, Homo sapiens; identical to SEQ ID NO: 2480
  chr5:180674226-180674270
  hypo

SEQ ID NO: 45546 - DNA, 31 bp, Homo sapiens; identical to SEQ ID NO: 13498
  chr6:623146-623177
  hypo

SEQ ID NO: 45547 - DNA, 25 bp, Homo sapiens
  chr6:711029-711054
  hypo
cggcctggtgcagggacgctcactt

SEQ ID NO: 45548 - DNA, 31 bp, Homo sapiens; identical to SEQ ID NO: 13501
  chr6:1001881-1001912
  hypo

SEQ ID NO: 45549 - DNA, 2 bp, Homo sapiens
  chr6:1317676-1317678
  hypo
tg

SEQ ID NO: 45550 - DNA, 74 bp, Homo sapiens; identical to SEQ ID NO: 13503
  chr6:1666396-1666470
  hypo

SEQ ID NO: 45551 - DNA, 37 bp, Homo sapiens; identical to SEQ ID NO: 13504
  chr6:1679634-1679671
  hypo

SEQ ID NO: 45552 - DNA, 31 bp, Homo sapiens; identical to SEQ ID NO: 13505
  chr6:1679719-1679750
  hypo

SEQ ID NO: 45553 - DNA, 31 bp, Homo sapiens; identical to SEQ ID NO: 13506
  chr6:1679758-1679789
  hypo

SEQ ID NO: 45554 - DNA, 31 bp, Homo sapiens; identical to SEQ ID NO: 13507
  chr6:1679793-1679824
  hypo

SEQ ID NO: 45555 - DNA, 2 bp, Homo sapiens
  chr6:1708612-1708614
  hypo
gt

SEQ ID NO: 45556 - DNA, 18 bp, Homo sapiens
  chr6:1708643-1708661
  hypo
aggcgttgtcaatacagc

SEQ ID NO: 45557 - DNA, 58 bp, Homo sapiens; identical to SEQ ID NO: 13509
  chr6:2127866-2127924
  hypo

SEQ ID NO: 45558 - DNA, 39 bp, Homo sapiens; identical to SEQ ID NO: 13510
  chr6:2127932-2127971
  hypo

SEQ ID NO: 45559 - DNA, 52 bp, Homo sapiens; identical to SEQ ID NO: 13511
  chr6:2127978-2128030
  hypo

SEQ ID NO: 45560 - DNA, 31 bp, Homo sapiens; identical to SEQ ID NO: 13512
  chr6:2803700-2803731
  hypo

SEQ ID NO: 45561 - DNA, 64 bp, Homo sapiens; identical to SEQ ID NO: 13513
  chr6:2907532-2907596
  hypo

SEQ ID NO: 45562 - DNA, 31 bp, Homo sapiens; identical to SEQ ID NO: 2502
  chr6:2999296-2999327
  hypo

SEQ ID NO: 45563 - DNA, 38 bp, Homo sapiens
  chr6:3065513-3065551
  hypo
aaaaaaaaaaaagacacggctttctgaggtgccgtgcg

SEQ ID NO: 45564 - DNA, 28 bp, Homo sapiens
  chr6:3065634-3065662
  hypo
agatgaggtgtcccgacagtggggagtg

SEQ ID NO: 45565 - DNA, 76 bp, Homo sapiens; identical to SEQ ID NO: 13517
  chr6:3115742-3115818
  hypo

SEQ ID NO: 45566 - DNA, 31 bp, Homo sapiens; identical to SEQ ID NO: 13518
  chr6:3115825-3115856
  hypo

SEQ ID NO: 45567 - DNA, 31 bp, Homo sapiens; identical to SEQ ID NO: 13519
  chr6:3115911-3115942
  hypo

SEQ ID NO: 45568 - DNA, 31 bp, Homo sapiens; identical to SEQ ID NO: 13520
  chr6:3132219-3132250
  hypo

SEQ ID NO: 45569 - DNA, 58 bp, Homo sapiens; identical to SEQ ID NO: 13521
  chr6:3132290-3132348
  hypo

SEQ ID NO: 45570 - DNA, 31 bp, Homo sapiens; identical to SEQ ID NO: 13522
  chr6:3143423-3143454
  hypo

SEQ ID NO: 45571 - DNA, 58 bp, Homo sapiens; identical to SEQ ID NO: 2503
  chr6:3162904-3162962
  hypo

SEQ ID NO: 45572 - DNA, 41 bp, Homo sapiens; identical to SEQ ID NO: 13525
  chr6:3177386-3177427
  hypo

SEQ ID NO: 45573 - DNA, 31 bp, Homo sapiens; identical to SEQ ID NO: 13526
  chr6:3281276-3281307
  hypo

SEQ ID NO: 45574 - DNA, 31 bp, Homo sapiens; identical to SEQ ID NO: 13527
  chr6:3281342-3281373
  hypo

SEQ ID NO: 45575 - DNA, 37 bp, Homo sapiens; identical to SEQ ID NO: 13528
  chr6:3289594-3289631
  hypo

SEQ ID NO: 45576 - DNA, 31 bp, Homo sapiens; identical to SEQ ID NO: 13529
  chr6:3289980-3290011
  hypo

SEQ ID NO: 45577 - DNA, 43 bp, Homo sapiens; identical to SEQ ID NO: 13530
  chr6:3290702-3290745
  hypo

SEQ ID NO: 45578 - DNA, 40 bp, Homo sapiens; identical to SEQ ID NO: 13531
  chr6:3290815-3290855
  hypo

SEQ ID NO: 45579 - DNA, 31 bp, Homo sapiens; identical to SEQ ID NO: 13532
  chr6:3292642-3292673
  hypo

SEQ ID NO: 45580 - DNA, 31 bp, Homo sapiens; identical to SEQ ID NO: 13533
  chr6:3302109-3302140
  hypo

SEQ ID NO: 45581 - DNA, 56 bp, Homo sapiens; identical to SEQ ID NO: 13534
  chr6:3302174-3302230
  hypo

SEQ ID NO: 45582 - DNA, 31 bp, Homo sapiens; identical to SEQ ID NO: 13535
  chr6:3316814-3316845
  hypo

SEQ ID NO: 45583 - DNA, 37 bp, Homo sapiens; identical to SEQ ID NO: 13536
  chr6:3316854-3316891
  hypo

SEQ ID NO: 45584 - DNA, 31 bp, Homo sapiens; identical to SEQ ID NO: 13537
  chr6:3317655-3317686
  hypo

SEQ ID NO: 45585 - DNA, 31 bp, Homo sapiens; identical to SEQ ID NO: 13539
  chr6:3368646-3368677
  hypo

SEQ ID NO: 45586 - DNA, 31 bp, Homo sapiens; identical to SEQ ID NO: 13540
  chr6:3441918-3441949
  hypo

SEQ ID NO: 45587 - DNA, 31 bp, Homo sapiens; identical to SEQ ID NO: 13541
  chr6:3441955-3441986
  hypo

SEQ ID NO: 45588 - DNA, 277 bp, Homo sapiens; identical to SEQ ID NO: 2508
  chr6:3456740-3457017
  hypo

SEQ ID NO: 45589 - DNA, 188 bp, Homo sapiens; identical to SEQ ID NO: 2509
  chr6:3457076-3457264
  hypo

SEQ ID NO: 45590 - DNA, 67 bp, Homo sapiens; identical to SEQ ID NO: 2510
  chr6:3457536-3457603
  hypo

SEQ ID NO: 45591 - DNA, 31 bp, Homo sapiens; identical to SEQ ID NO: 2511
  chr6:3457811-3457842
  hypo

SEQ ID NO: 45592 - DNA, 31 bp, Homo sapiens; identical to SEQ ID NO: 13546
  chr6:3466107-3466138
  hypo

SEQ ID NO: 45593 - DNA, 51 bp, Homo sapiens; identical to SEQ ID NO: 13547
  chr6:3580030-3580081
  hypo

SEQ ID NO: 45594 - DNA, 36 bp, Homo sapiens; identical to SEQ ID NO: 13548
  chr6:3618240-3618276
  hypo

SEQ ID NO: 45595 - DNA, 31 bp, Homo sapiens; identical to SEQ ID NO: 13549
  chr6:3618581-3618612
  hypo

SEQ ID NO: 45596 - DNA, 72 bp, Homo sapiens; identical to SEQ ID NO: 13550
  chr6:3725376-3725448
  hypo

SEQ ID NO: 45597 - DNA, 31 bp, Homo sapiens; identical to SEQ ID NO: 13551
  chr6:3725747-3725778
  hypo

SEQ ID NO: 45598 - DNA, 31 bp, Homo sapiens; identical to SEQ ID NO: 13552
  chr6:3738058-3738089
  hypo

SEQ ID NO: 45599 - DNA, 69 bp, Homo sapiens; identical to SEQ ID NO: 13553
  chr6:3738119-3738188
  hypo

SEQ ID NO: 45600 - DNA, 31 bp, Homo sapiens; identical to SEQ ID NO: 13555
  chr6:3810823-3810854
  hypo

SEQ ID NO: 45601 - DNA, 53 bp, Homo sapiens; identical to SEQ ID NO: 13556
  chr6:3821399-3821452
  hypo

SEQ ID NO: 45602 - DNA, 31 bp, Homo sapiens; identical to SEQ ID NO: 13557
  chr6:3895146-3895177
  hypo

SEQ ID NO: 45603 - DNA, 31 bp, Homo sapiens; identical to SEQ ID NO: 13558
  chr6:3931975-3932006
  hypo

SEQ ID NO: 45604 - DNA, 31 bp, Homo sapiens; identical to SEQ ID NO: 13560
  chr6:4160622-4160653
  hypo

SEQ ID NO: 45605 - DNA, 31 bp, Homo sapiens; identical to SEQ ID NO: 13561
  chr6:4165190-4165221
  hypo

SEQ ID NO: 45606 - DNA, 40 bp, Homo sapiens; identical to SEQ ID NO: 13563
  chr6:4254743-4254783
  hypo

SEQ ID NO: 45607 - DNA, 42 bp, Homo sapiens; identical to SEQ ID NO: 13564
  chr6:4254840-4254882
  hypo

SEQ ID NO: 45608 - DNA, 42 bp, Homo sapiens; identical to SEQ ID NO: 13564
  chr6:4254889-4254931
  hypo

SEQ ID NO: 45609 - DNA, 77 bp, Homo sapiens; identical to SEQ ID NO: 2512
  chr6:4776193-4776270
  hypo

SEQ ID NO: 45610 - DNA, 31 bp, Homo sapiens; identical to SEQ ID NO: 13568
  chr6:4836551-4836582
  hypo

SEQ ID NO: 45611 - DNA, 2 bp, Homo sapiens
  chr6:4874126-4874128
  hypo
tg

SEQ ID NO: 45612 - DNA, 83 bp, Homo sapiens; identical to SEQ ID NO: 13573
  chr6:5507944-5508027
  hypo

SEQ ID NO: 45613 - DNA, 31 bp, Homo sapiens; identical to SEQ ID NO: 13574
  chr6:5508096-5508127
  hypo

SEQ ID NO: 45614 - DNA, 31 bp, Homo sapiens; identical to SEQ ID NO: 13575
  chr6:5508132-5508163
  hypo

SEQ ID NO: 45615 - DNA, 69 bp, Homo sapiens; identical to SEQ ID NO: 13576
  chr6:6045509-6045578
  hypo

SEQ ID NO: 45616 - DNA, 31 bp, Homo sapiens; identical to SEQ ID NO: 13577
  chr6:6045601-6045632
  hypo

SEQ ID NO: 45617 - DNA, 2 bp, Homo sapiens
  chr6:6045656-6045658
  hypo
ct

SEQ ID NO: 45618 - DNA, 31 bp, Homo sapiens; identical to SEQ ID NO: 13579
  chr6:6558351-6558382
  hypo

SEQ ID NO: 45619 - DNA, 31 bp, Homo sapiens; identical to SEQ ID NO: 13580
  chr6:6668387-6668418
  hypo

SEQ ID NO: 45620 - DNA, 31 bp, Homo sapiens; identical to SEQ ID NO: 13581
  chr6:6753684-6753715
  hypo

SEQ ID NO: 45621 - DNA, 31 bp, Homo sapiens; identical to SEQ ID NO: 13582
  chr6:6824563-6824594
  hypo

SEQ ID NO: 45622 - DNA, 41 bp, Homo sapiens; identical to SEQ ID NO: 13583
  chr6:6824666-6824707
  hypo

SEQ ID NO: 45623 - DNA, 44 bp, Homo sapiens; identical to SEQ ID NO: 13584
  chr6:6824713-6824757
  hypo

SEQ ID NO: 45624 - DNA, 31 bp, Homo sapiens; identical to SEQ ID NO: 13586
  chr6:6898398-6898429
  hypo

SEQ ID NO: 45625 - DNA, 31 bp, Homo sapiens; identical to SEQ ID NO: 13587
  chr6:6982818-6982849
  hypo

SEQ ID NO: 45626 - DNA, 31 bp, Homo sapiens; identical to SEQ ID NO: 13588
  chr6:6982881-6982912
  hypo

SEQ ID NO: 45627 - DNA, 31 bp, Homo sapiens; identical to SEQ ID NO: 13589
  chr6:6984973-6985004
  hypo

SEQ ID NO: 45628 - DNA, 31 bp, Homo sapiens; identical to SEQ ID NO: 13590
  chr6:7040003-7040034
  hypo

SEQ ID NO: 45629 - DNA, 83 bp, Homo sapiens; identical to SEQ ID NO: 13591
  chr6:7230352-7230435
  hypo

SEQ ID NO: 45630 - DNA, 31 bp, Homo sapiens; identical to SEQ ID NO: 13592
  chr6:7268059-7268090
  hypo

SEQ ID NO: 45631 - DNA, 56 bp, Homo sapiens; identical to SEQ ID NO: 13593
  chr6:7271970-7272026
  hypo

SEQ ID NO: 45632 - DNA, 69 bp, Homo sapiens; identical to SEQ ID NO: 13594
  chr6:7415146-7415215
  hypo

SEQ ID NO: 45633 - DNA, 31 bp, Homo sapiens; identical to SEQ ID NO: 13595
  chr6:7415279-7415310
  hypo

SEQ ID NO: 45634 - DNA, 232 bp, Homo sapiens; identical to SEQ ID NO: 2513
  chr6:7541474-7541706
  hypo

SEQ ID NO: 45635 - DNA, 90 bp, Homo sapiens; identical to SEQ ID NO: 2514
  chr6:7541771-7541861
  hypo

SEQ ID NO: 45636 - DNA, 31 bp, Homo sapiens; identical to SEQ ID NO: 13598
  chr6:7583974-7584005
  hypo

SEQ ID NO: 45637 - DNA, 31 bp, Homo sapiens; identical to SEQ ID NO: 13599
  chr6:7692045-7692076
  hypo

SEQ ID NO: 45638 - DNA, 31 bp, Homo sapiens; identical to SEQ ID NO: 13600
  chr6:7884118-7884149
  hypo

SEQ ID NO: 45639 - DNA, 36 bp, Homo sapiens; identical to SEQ ID NO: 13601
  chr6:7884219-7884255
  hypo

SEQ ID NO: 45640 - DNA, 31 bp, Homo sapiens; identical to SEQ ID NO: 13602
  chr6:7884273-7884304
  hypo

SEQ ID NO: 45641 - DNA, 31 bp, Homo sapiens; identical to SEQ ID NO: 13603
  chr6:7884500-7884531
  hypo

SEQ ID NO: 45642 - DNA, 31 bp, Homo sapiens; identical to SEQ ID NO: 13604
  chr6:7885607-7885638
  hypo

SEQ ID NO: 45643 - DNA, 56 bp, Homo sapiens; identical to SEQ ID NO: 13605
  chr6:7885682-7885738
  hypo

SEQ ID NO: 45644 - DNA, 48 bp, Homo sapiens; identical to SEQ ID NO: 13606
  chr6:7885763-7885811
  hypo

SEQ ID NO: 45645 - DNA, 31 bp, Homo sapiens; identical to SEQ ID NO: 13607
  chr6:7887586-7887617
  hypo

SEQ ID NO: 45646 - DNA, 44 bp, Homo sapiens; identical to SEQ ID NO: 13608
  chr6:7887635-7887679
  hypo

SEQ ID NO: 45647 - DNA, 80 bp, Homo sapiens; identical to SEQ ID NO: 13609
  chr6:7887684-7887764
  hypo

SEQ ID NO: 45648 - DNA, 66 bp, Homo sapiens; identical to SEQ ID NO: 13610
  chr6:7887766-7887832
  hypo

SEQ ID NO: 45649 - DNA, 40 bp, Homo sapiens; identical to SEQ ID NO: 13611
  chr6:7887849-7887889
  hypo

SEQ ID NO: 45650 - DNA, 36 bp, Homo sapiens; identical to SEQ ID NO: 13612
  chr6:7888465-7888501
  hypo

SEQ ID NO: 45651 - DNA, 80 bp, Homo sapiens; identical to SEQ ID NO: 13613
  chr6:7888512-7888592
  hypo

SEQ ID NO: 45652 - DNA, 54 bp, Homo sapiens; identical to SEQ ID NO: 13614
  chr6:7888731-7888785
  hypo

SEQ ID NO: 45653 - DNA, 175 bp, Homo sapiens; identical to SEQ ID NO: 13615
  chr6:7888872-7889047
  hypo

SEQ ID NO: 45654 - DNA, 38 bp, Homo sapiens; identical to SEQ ID NO: 13616
  chr6:7889077-7889115
  hypo

SEQ ID NO: 45655 - DNA, 57 bp, Homo sapiens; identical to SEQ ID NO: 13617
  chr6:7889148-7889205
  hypo

SEQ ID NO: 45656 - DNA, 61 bp, Homo sapiens; identical to SEQ ID NO: 13618
  chr6:7889207-7889268
  hypo

SEQ ID NO: 45657 - DNA, 31 bp, Homo sapiens; identical to SEQ ID NO: 13619
  chr6:7889278-7889309
  hypo

SEQ ID NO: 45658 - DNA, 31 bp, Homo sapiens; identical to SEQ ID NO: 13620
  chr6:7889325-7889356
  hypo

SEQ ID NO: 45659 - DNA, 31 bp, Homo sapiens; identical to SEQ ID NO: 13621
  chr6:7890516-7890547
  hypo

SEQ ID NO: 45660 - DNA, 52 bp, Homo sapiens; identical to SEQ ID NO: 13622
  chr6:7890550-7890602
  hypo

SEQ ID NO: 45661 - DNA, 31 bp, Homo sapiens; identical to SEQ ID NO: 13623
  chr6:7890605-7890636
  hypo

SEQ ID NO: 45662 - DNA, 59 bp, Homo sapiens; identical to SEQ ID NO: 13624
  chr6:7890675-7890734
  hypo

SEQ ID NO: 45663 - DNA, 31 bp, Homo sapiens; identical to SEQ ID NO: 13625
  chr6:7893705-7893736
  hypo

SEQ ID NO: 45664 - DNA, 77 bp, Homo sapiens; identical to SEQ ID NO: 13626
  chr6:7893741-7893818
  hypo

SEQ ID NO: 45665 - DNA, 67 bp, Homo sapiens; identical to SEQ ID NO: 13627
  chr6:7893855-7893922
  hypo

SEQ ID NO: 45666 - DNA, 31 bp, Homo sapiens; identical to SEQ ID NO: 13628
  chr6:7893946-7893977
  hypo

SEQ ID NO: 45667 - DNA, 31 bp, Homo sapiens; identical to SEQ ID NO: 13629
  chr6:7898571-7898602
  hypo

SEQ ID NO: 45668 - DNA, 40 bp, Homo sapiens; identical to SEQ ID NO: 13630
  chr6:7898661-7898701
  hypo

SEQ ID NO: 45669 - DNA, 31 bp, Homo sapiens; identical to SEQ ID NO: 13631
  chr6:7898703-7898734
  hypo

SEQ ID NO: 45670 - DNA, 31 bp, Homo sapiens; identical to SEQ ID NO: 13632
  chr6:7898751-7898782
  hypo

SEQ ID NO: 45671 - DNA, 46 bp, Homo sapiens; identical to SEQ ID NO: 13633
  chr6:7976901-7976947
  hypo

SEQ ID NO: 45672 - DNA, 41 bp, Homo sapiens; identical to SEQ ID NO: 13634
  chr6:10539696-10539737
  hypo

SEQ ID NO: 45673 - DNA, 31 bp, Homo sapiens; identical to SEQ ID NO: 13635
  chr6:10551605-10551636
  hypo

SEQ ID NO: 45674 - DNA, 78 bp, Homo sapiens; identical to SEQ ID NO: 13637
  chr6:10693317-10693395
  hypo

SEQ ID NO: 45675 - DNA, 31 bp, Homo sapiens; identical to SEQ ID NO: 13640
  chr6:11052369-11052400
  hypo

SEQ ID NO: 45676 - DNA, 31 bp, Homo sapiens; identical to SEQ ID NO: 13641
  chr6:11052401-11052432
  hypo

SEQ ID NO: 45677 - DNA, 2 bp, Homo sapiens
  chr6:11288374-11288376
  hypo
gg

SEQ ID NO: 45678 - DNA, 30 bp, Homo sapiens
  chr6:11288405-11288435
  hypo
ctgcagttcaagtggcgtatggcgtgtggc

SEQ ID NO: 45679 - DNA, 31 bp, Homo sapiens; identical to SEQ ID NO: 13643
  chr6:12287831-12287862
  hypo

SEQ ID NO: 45680 - DNA, 14 bp, Homo sapiens
  chr6:12287986-12288000
  hypo
aggcgcgcgcgcgc

SEQ ID NO: 45681 - DNA, 2 bp, Homo sapiens
  chr6:13293171-13293173
  hypo
tt

SEQ ID NO: 45682 - DNA, 31 bp, Homo sapiens; identical to SEQ ID NO: 13647
  chr6:13456799-13456830
  hypo

SEQ ID NO: 45683 - DNA, 58 bp, Homo sapiens; identical to SEQ ID NO: 13648
  chr6:13456947-13457005
  hypo

SEQ ID NO: 45684 - DNA, 66 bp, Homo sapiens; identical to SEQ ID NO: 13649
  chr6:13510252-13510318
  hypo

SEQ ID NO: 45685 - DNA, 31 bp, Homo sapiens; identical to SEQ ID NO: 13650
  chr6:13510351-13510382
  hypo

SEQ ID NO: 45686 - DNA, 113 bp, Homo sapiens; identical to SEQ ID NO: 2524
  chr6:13574017-13574130
  hypo

SEQ ID NO: 45687 - DNA, 31 bp, Homo sapiens; identical to SEQ ID NO: 2525
  chr6:13574133-13574164
  hypo

SEQ ID NO: 45688 - DNA, 45 bp, Homo sapiens; identical to SEQ ID NO: 2528
  chr6:14117633-14117678
  hypo

SEQ ID NO: 45689 - DNA, 58 bp, Homo sapiens; identical to SEQ ID NO: 13654
  chr6:14139161-14139219
  hypo

SEQ ID NO: 45690 - DNA, 31 bp, Homo sapiens; identical to SEQ ID NO: 13655
  chr6:14139225-14139256
  hypo

SEQ ID NO: 45691 - DNA, 74 bp, Homo sapiens; identical to SEQ ID NO: 2529
  chr6:14211102-14211176
  hypo

SEQ ID NO: 45692 - DNA, 53 bp, Homo sapiens; identical to SEQ ID NO: 2530
  chr6:14211178-14211231
  hypo

SEQ ID NO: 45693 - DNA, 31 bp, Homo sapiens; identical to SEQ ID NO: 13658
  chr6:14273200-14273231
  hypo

SEQ ID NO: 45694 - DNA, 59 bp, Homo sapiens; identical to SEQ ID NO: 13659
  chr6:14273314-14273373
  hypo

SEQ ID NO: 45695 - DNA, 31 bp, Homo sapiens; identical to SEQ ID NO: 13661
  chr6:14744737-14744768
  hypo

SEQ ID NO: 45696 - DNA, 31 bp, Homo sapiens; identical to SEQ ID NO: 13663
  chr6:14813397-14813428
  hypo

SEQ ID NO: 45697 - DNA, 31 bp, Homo sapiens; identical to SEQ ID NO: 13664
  chr6:14847049-14847080
  hypo

SEQ ID NO: 45698 - DNA, 37 bp, Homo sapiens; identical to SEQ ID NO: 13665
  chr6:14916086-14916123
  hypo

SEQ ID NO: 45699 - DNA, 31 bp, Homo sapiens; identical to SEQ ID NO: 13666
  chr6:14940112-14940143
  hypo

SEQ ID NO: 45700 - DNA, 31 bp, Homo sapiens; identical to SEQ ID NO: 13667
  chr6:14963355-14963386
  hypo

SEQ ID NO: 45701 - DNA, 70 bp, Homo sapiens; identical to SEQ ID NO: 13669
  chr6:14966837-14966907
  hypo

SEQ ID NO: 45702 - DNA, 31 bp, Homo sapiens; identical to SEQ ID NO: 13671
  chr6:15083857-15083888
  hypo

SEQ ID NO: 45703 - DNA, 31 bp, Homo sapiens; identical to SEQ ID NO: 13672
  chr6:15282317-15282348
  hypo

SEQ ID NO: 45704 - DNA, 31 bp, Homo sapiens; identical to SEQ ID NO: 13673
  chr6:15282493-15282524
  hypo

SEQ ID NO: 45705 - DNA, 31 bp, Homo sapiens; identical to SEQ ID NO: 13674
  chr6:15283515-15283546
  hypo

SEQ ID NO: 45706 - DNA, 39 bp, Homo sapiens; identical to SEQ ID NO: 13675
  chr6:15469669-15469708
  hypo

SEQ ID NO: 45707 - DNA, 31 bp, Homo sapiens; identical to SEQ ID NO: 13677
  chr6:17508424-17508455
  hypo

SEQ ID NO: 45708 - DNA, 50 bp, Homo sapiens; identical to SEQ ID NO: 13678
  chr6:17508514-17508564
  hypo

SEQ ID NO: 45709 - DNA, 31 bp, Homo sapiens; identical to SEQ ID NO: 13679
  chr6:17508598-17508629
  hypo

SEQ ID NO: 45710 - DNA, 31 bp, Homo sapiens; identical to SEQ ID NO: 13682
  chr6:17756958-17756989
  hypo

SEQ ID NO: 45711 - DNA, 49 bp, Homo sapiens; identical to SEQ ID NO: 13683
  chr6:17757010-17757059
  hypo

SEQ ID NO: 45712 - DNA, 36 bp, Homo sapiens; identical to SEQ ID NO: 13684
  chr6:17761888-17761924
  hypo

SEQ ID NO: 45713 - DNA, 31 bp, Homo sapiens; identical to SEQ ID NO: 13685
  chr6:17779890-17779921
  hypo

SEQ ID NO: 45714 - DNA, 31 bp, Homo sapiens; identical to SEQ ID NO: 13686
  chr6:17788885-17788916
  hypo

SEQ ID NO: 45715 - DNA, 31 bp, Homo sapiens; identical to SEQ ID NO: 13687
  chr6:17795509-17795540
  hypo

SEQ ID NO: 45716 - DNA, 31 bp, Homo sapiens; identical to SEQ ID NO: 13688
  chr6:17797154-17797185
  hypo

SEQ ID NO: 45717 - DNA, 68 bp, Homo sapiens; identical to SEQ ID NO: 13690
  chr6:17800167-17800235
  hypo

SEQ ID NO: 45718 - DNA, 37 bp, Homo sapiens; identical to SEQ ID NO: 13691
  chr6:17934557-17934594
  hypo

SEQ ID NO: 45719 - DNA, 81 bp, Homo sapiens; identical to SEQ ID NO: 13692
  chr6:17940481-17940562
  hypo

SEQ ID NO: 45720 - DNA, 31 bp, Homo sapiens; identical to SEQ ID NO: 13693
  chr6:17940605-17940636
  hypo

SEQ ID NO: 45721 - DNA, 31 bp, Homo sapiens; identical to SEQ ID NO: 13694
  chr6:17940667-17940698
  hypo

SEQ ID NO: 45722 - DNA, 31 bp, Homo sapiens; identical to SEQ ID NO: 2542
  chr6:17987686-17987717
  hypo

SEQ ID NO: 45723 - DNA, 39 bp, Homo sapiens; identical to SEQ ID NO: 13696
  chr6:18024630-18024669
  hypo

SEQ ID NO: 45724 - DNA, 37 bp, Homo sapiens; identical to SEQ ID NO: 13697
  chr6:18030873-18030910
  hypo

SEQ ID NO: 45725 - DNA, 31 bp, Homo sapiens; identical to SEQ ID NO: 13698
  chr6:18044394-18044425
  hypo

SEQ ID NO: 45726 - DNA, 52 bp, Homo sapiens; identical to SEQ ID NO: 13700
  chr6:18129338-18129390
  hypo

SEQ ID NO: 45727 - DNA, 31 bp, Homo sapiens; identical to SEQ ID NO: 13702
  chr6:18239433-18239464
  hypo

SEQ ID NO: 45728 - DNA, 77 bp, Homo sapiens; identical to SEQ ID NO: 13703
  chr6:18247861-18247938
  hypo

SEQ ID NO: 45729 - DNA, 31 bp, Homo sapiens; identical to SEQ ID NO: 13704
  chr6:18250344-18250375
  hypo

SEQ ID NO: 45730 - DNA, 155 bp, Homo sapiens; identical to SEQ ID NO: 2543
  chr6:18263770-18263925
  hypo

SEQ ID NO: 45731 - DNA, 59 bp, Homo sapiens; identical to SEQ ID NO: 2545
  chr6:18264016-18264075
  hypo

SEQ ID NO: 45732 - DNA, 249 bp, Homo sapiens; identical to SEQ ID NO: 2546
  chr6:18264081-18264330
  hypo

SEQ ID NO: 45733 - DNA, 418 bp, Homo sapiens; identical to SEQ ID NO: 2547
  chr6:18264337-18264755
  hypo

SEQ ID NO: 45734 - DNA, 482 bp, Homo sapiens; identical to SEQ ID NO: 2548
  chr6:18264758-18265240
  hypo

SEQ ID NO: 45735 - DNA, 31 bp, Homo sapiens; identical to SEQ ID NO: 13710
  chr6:18275932-18275963
  hypo

SEQ ID NO: 45736 - DNA, 52 bp, Homo sapiens; identical to SEQ ID NO: 13712
  chr6:19677097-19677149
  hypo

SEQ ID NO: 45737 - DNA, 35 bp, Homo sapiens; identical to SEQ ID NO: 13714
  chr6:19677244-19677279
  hypo

SEQ ID NO: 45738 - DNA, 31 bp, Homo sapiens; identical to SEQ ID NO: 13715
  chr6:20057722-20057753
  hypo

SEQ ID NO: 45739 - DNA, 31 bp, Homo sapiens; identical to SEQ ID NO: 13716
  chr6:20105679-20105710
  hypo

SEQ ID NO: 45740 - DNA, 31 bp, Homo sapiens; identical to SEQ ID NO: 13717
  chr6:20124516-20124547
  hypo

SEQ ID NO: 45741 - DNA, 34 bp, Homo sapiens; identical to SEQ ID NO: 13718
  chr6:20124549-20124583
  hypo

SEQ ID NO: 45742 - DNA, 484 bp, Homo sapiens; identical to SEQ ID NO: 2550
  chr6:20212303-20212787
  hypo

SEQ ID NO: 45743 - DNA, 89 bp, Homo sapiens; identical to SEQ ID NO: 2551
  chr6:20212792-20212881
  hypo

SEQ ID NO: 45744 - DNA, 37 bp, Homo sapiens; identical to SEQ ID NO: 13721
  chr6:20228882-20228919
  hypo

SEQ ID NO: 45745 - DNA, 31 bp, Homo sapiens; identical to SEQ ID NO: 13724
  chr6:20294237-20294268
  hypo

SEQ ID NO: 45746 - DNA, 31 bp, Homo sapiens; identical to SEQ ID NO: 13725
  chr6:21459015-21459046
  hypo

SEQ ID NO: 45747 - DNA, 31 bp, Homo sapiens; identical to SEQ ID NO: 13727
  chr6:21494921-21494952
  hypo

SEQ ID NO: 45748 - DNA, 31 bp, Homo sapiens; identical to SEQ ID NO: 13728
  chr6:21570591-21570622
  hypo

SEQ ID NO: 45749 - DNA, 31 bp, Homo sapiens; identical to SEQ ID NO: 2558
  chr6:21588775-21588806
  hypo

SEQ ID NO: 45750 - DNA, 31 bp, Homo sapiens; identical to SEQ ID NO: 2559
  chr6:21594474-21594505
  hypo

SEQ ID NO: 45751 - DNA, 38 bp, Homo sapiens; identical to SEQ ID NO: 2560
  chr6:21594537-21594575
  hypo

SEQ ID NO: 45752 - DNA, 567 bp, Homo sapiens; identical to SEQ ID NO: 2561
  chr6:21594597-21595164
  hypo

SEQ ID NO: 45753 - DNA, 31 bp, Homo sapiens; identical to SEQ ID NO: 2562
  chr6:21595200-21595231
  hypo

SEQ ID NO: 45754 - DNA, 372 bp, Homo sapiens; identical to SEQ ID NO: 2563
  chr6:21595234-21595606
  hypo

SEQ ID NO: 45755 - DNA, 31 bp, Homo sapiens; identical to SEQ ID NO: 13735
  chr6:21596585-21596616
  hypo

SEQ ID NO: 45756 - DNA, 31 bp, Homo sapiens; identical to SEQ ID NO: 13736
  chr6:21602480-21602511
  hypo

SEQ ID NO: 45757 - DNA, 31 bp, Homo sapiens; identical to SEQ ID NO: 13738
  chr6:21622792-21622823
  hypo

SEQ ID NO: 45758 - DNA, 31 bp, Homo sapiens; identical to SEQ ID NO: 13739
  chr6:21636069-21636100
  hypo

SEQ ID NO: 45759 - DNA, 31 bp, Homo sapiens; identical to SEQ ID NO: 13741
  chr6:21730829-21730860
  hypo

SEQ ID NO: 45760 - DNA, 31 bp, Homo sapiens; identical to SEQ ID NO: 13742
  chr6:21919459-21919490
  hypo

SEQ ID NO: 45761 - DNA, 31 bp, Homo sapiens; identical to SEQ ID NO: 13743
  chr6:21959458-21959489
  hypo

SEQ ID NO: 45762 - DNA, 31 bp, Homo sapiens; identical to SEQ ID NO: 2566
  chr6:22146871-22146902
  hypo

SEQ ID NO: 45763 - DNA, 38 bp, Homo sapiens; identical to SEQ ID NO: 2567
  chr6:22146906-22146944
  hypo

SEQ ID NO: 45764 - DNA, 100 bp, Homo sapiens; identical to SEQ ID NO: 2568
  chr6:22146954-22147054
  hypo

SEQ ID NO: 45765 - DNA, 31 bp, Homo sapiens; identical to SEQ ID NO: 13747
  chr6:24433177-24433208
  hypo

SEQ ID NO: 45766 - DNA, 45 bp, Homo sapiens; identical to SEQ ID NO: 13749
  chr6:24662790-24662835
  hypo

SEQ ID NO: 45767 - DNA, 31 bp, Homo sapiens; identical to SEQ ID NO: 13750
  chr6:24895642-24895673
  hypo

SEQ ID NO: 45768 - DNA, 42 bp, Homo sapiens; identical to SEQ ID NO: 13751
  chr6:25023689-25023731
  hypo

SEQ ID NO: 45769 - DNA, 7 bp, Homo sapiens
  chr6:26047694-26047701
  hypo
caccgcg

SEQ ID NO: 45770 - DNA, 18 bp, Homo sapiens
  chr6:26047741-26047759
  hypo
caacgaatgaagtacaca

SEQ ID NO: 45771 - DNA, 31 bp, Homo sapiens; identical to SEQ ID NO: 13753
  chr6:26047762-26047793
  hypo

SEQ ID NO: 45772 - DNA, 37 bp, Homo sapiens; identical to SEQ ID NO: 13754
  chr6:26095302-26095339
  hypo

SEQ ID NO: 45773 - DNA, 1 bp, Homo sapiens
  chr6:26214611-26214612
  hypo
a

SEQ ID NO: 45774 - DNA, 31 bp, Homo sapiens; identical to SEQ ID NO: 13757
  chr6:26423338-26423369
  hypo

SEQ ID NO: 45775 - DNA, 70 bp, Homo sapiens; identical to SEQ ID NO: 13758
  chr6:26423379-26423449
  hypo

SEQ ID NO: 45776 - DNA, 31 bp, Homo sapiens; identical to SEQ ID NO: 13759
  chr6:27428732-27428763
  hypo

SEQ ID NO: 45777 - DNA, 46 bp, Homo sapiens; identical to SEQ ID NO: 2609
  chr6:27440465-27440511
  hypo

SEQ ID NO: 45778 - DNA, 31 bp, Homo sapiens; identical to SEQ ID NO: 13761
  chr6:27442013-27442044
  hypo

SEQ ID NO: 45779 - DNA, 30 bp, Homo sapiens; identical to SEQ ID NO: 13762
  chr6:27770798-27770828
  hypo

SEQ ID NO: 45780 - DNA, 31 bp, Homo sapiens; identical to SEQ ID NO: 13764
  chr6:27846867-27846898
  hypo

SEQ ID NO: 45781 - DNA, 31 bp, Homo sapiens; identical to SEQ ID NO: 13765
  chr6:33549226-33549257
  hypo

SEQ ID NO: 45782 - DNA, 38 bp, Homo sapiens; identical to SEQ ID NO: 13766
  chr6:33645951-33645989
  hypo

SEQ ID NO: 45783 - DNA, 34 bp, Homo sapiens; identical to SEQ ID NO: 13767
  chr6:33694717-33694751
  hypo

SEQ ID NO: 45784 - DNA, 31 bp, Homo sapiens; identical to SEQ ID NO: 13768
  chr6:33698515-33698546
  hypo

SEQ ID NO: 45785 - DNA, 66 bp, Homo sapiens; identical to SEQ ID NO: 13770
  chr6:33702048-33702114
  hypo

SEQ ID NO: 45786 - DNA, 31 bp, Homo sapiens; identical to SEQ ID NO: 13771
  chr6:33771000-33771031
  hypo

SEQ ID NO: 45787 - DNA, 31 bp, Homo sapiens; identical to SEQ ID NO: 13772
  chr6:33771033-33771064
  hypo

SEQ ID NO: 45788 - DNA, 41 bp, Homo sapiens; identical to SEQ ID NO: 13773
  chr6:33962223-33962264
  hypo

SEQ ID NO: 45789 - DNA, 36 bp, Homo sapiens; identical to SEQ ID NO: 13774
  chr6:33985260-33985296
  hypo

SEQ ID NO: 45790 - DNA, 49 bp, Homo sapiens
  chr6:34170820-34170869
  hypo
tccgcagccacagtttgggtggctgtagccccgcccaagagggcggggc

SEQ ID NO: 45791 - DNA, 12 bp, Homo sapiens
  chr6:34170988-34171000
  hypo
ggctcccactgg

SEQ ID NO: 45792 - DNA, 31 bp, Homo sapiens; identical to SEQ ID NO: 13780
  chr6:34191861-34191892
  hypo

SEQ ID NO: 45793 - DNA, 31 bp, Homo sapiens; identical to SEQ ID NO: 13781
  chr6:34484387-34484418
  hypo

SEQ ID NO: 45794 - DNA, 31 bp, Homo sapiens; identical to SEQ ID NO: 13783
  chr6:34683386-34683417
  hypo

SEQ ID NO: 45795 - DNA, 18 bp, Homo sapiens
  chr6:34723873-34723891
  hypo
aataattattacctgccg

SEQ ID NO: 45796 - DNA, 1 bp, Homo sapiens
  chr6:34723909-34723910
  hypo
t

SEQ ID NO: 45797 - DNA, 38 bp, Homo sapiens; identical to SEQ ID NO: 13785
  chr6:34726097-34726135
  hypo

SEQ ID NO: 45798 - DNA, 30 bp, Homo sapiens; identical to SEQ ID NO: 13786
  chr6:34854518-34854548
  hypo

SEQ ID NO: 45799 - DNA, 31 bp, Homo sapiens; identical to SEQ ID NO: 13787
  chr6:34953049-34953080
  hypo

SEQ ID NO: 45800 - DNA, 31 bp, Homo sapiens; identical to SEQ ID NO: 13788
  chr6:34953107-34953138
  hypo

SEQ ID NO: 45801 - DNA, 31 bp, Homo sapiens; identical to SEQ ID NO: 13789
  chr6:35027635-35027666
  hypo

SEQ ID NO: 45802 - DNA, 31 bp, Homo sapiens; identical to SEQ ID NO: 13790
  chr6:35109281-35109312
  hypo

SEQ ID NO: 45803 - DNA, 2 bp, Homo sapiens
  chr6:35149809-35149811
  hypo
gc

SEQ ID NO: 45804 - DNA, 31 bp, Homo sapiens; identical to SEQ ID NO: 13793
  chr6:35260503-35260534
  hypo

SEQ ID NO: 45805 - DNA, 31 bp, Homo sapiens; identical to SEQ ID NO: 13795
  chr6:35454663-35454694
  hypo

SEQ ID NO: 45806 - DNA, 31 bp, Homo sapiens; identical to SEQ ID NO: 13796
  chr6:35454700-35454731
  hypo

SEQ ID NO: 45807 - DNA, 31 bp, Homo sapiens; identical to SEQ ID NO: 13797
  chr6:35490043-35490074
  hypo

SEQ ID NO: 45808 - DNA, 31 bp, Homo sapiens; identical to SEQ ID NO: 2618
  chr6:35523457-35523488
  hypo

SEQ ID NO: 45809 - DNA, 31 bp, Homo sapiens; identical to SEQ ID NO: 13802
  chr6:35763035-35763066
  hypo

SEQ ID NO: 45810 - DNA, 55 bp, Homo sapiens; identical to SEQ ID NO: 13803
  chr6:35911712-35911767
  hypo

SEQ ID NO: 45811 - DNA, 31 bp, Homo sapiens; identical to SEQ ID NO: 13804
  chr6:35989517-35989548
  hypo

SEQ ID NO: 45812 - DNA, 145 bp, Homo sapiens; identical to SEQ ID NO: 13805
  chr6:36198234-36198379
  hypo

SEQ ID NO: 45813 - DNA, 31 bp, Homo sapiens; identical to SEQ ID NO: 13807
  chr6:36339125-36339156
  hypo

SEQ ID NO: 45814 - DNA, 31 bp, Homo sapiens; identical to SEQ ID NO: 13808
  chr6:36339159-36339190
  hypo

SEQ ID NO: 45815 - DNA, 31 bp, Homo sapiens; identical to SEQ ID NO: 13809
  chr6:36339240-36339271
  hypo

SEQ ID NO: 45816 - DNA, 31 bp, Homo sapiens; identical to SEQ ID NO: 13810
  chr6:36343599-36343630
  hypo

SEQ ID NO: 45817 - DNA, 31 bp, Homo sapiens; identical to SEQ ID NO: 13813
  chr6:37023890-37023921
  hypo

SEQ ID NO: 45818 - DNA, 31 bp, Homo sapiens; identical to SEQ ID NO: 13817
  chr6:37033785-37033816
  hypo

SEQ ID NO: 45819 - DNA, 31 bp, Homo sapiens; identical to SEQ ID NO: 13818
  chr6:37033829-37033860
  hypo

SEQ ID NO: 45820 - DNA, 2 bp, Homo sapiens
  chr6:37053275-37053277
  hypo
at

SEQ ID NO: 45821 - DNA, 81 bp, Homo sapiens; identical to SEQ ID NO: 13821
  chr6:37358727-37358808
  hypo

SEQ ID NO: 45822 - DNA, 43 bp, Homo sapiens; identical to SEQ ID NO: 13822
  chr6:37358845-37358888
  hypo

SEQ ID NO: 45823 - DNA, 100 bp, Homo sapiens; identical to SEQ ID NO: 13823
  chr6:37450274-37450374
  hypo

SEQ ID NO: 45824 - DNA, 64 bp, Homo sapiens; identical to SEQ ID NO: 13824
  chr6:37605016-37605080
  hypo

SEQ ID NO: 45825 - DNA, 31 bp, Homo sapiens; identical to SEQ ID NO: 13825
  chr6:37605090-37605121
  hypo

SEQ ID NO: 45826 - DNA, 31 bp, Homo sapiens; identical to SEQ ID NO: 13826
  chr6:37605139-37605170
  hypo

SEQ ID NO: 45827 - DNA, 36 bp, Homo sapiens; identical to SEQ ID NO: 13827
  chr6:37608134-37608170
  hypo

SEQ ID NO: 45828 - DNA, 43 bp, Homo sapiens; identical to SEQ ID NO: 13828
  chr6:37642011-37642054
  hypo

SEQ ID NO: 45829 - DNA, 39 bp, Homo sapiens; identical to SEQ ID NO: 13829
  chr6:37642076-37642115
  hypo

SEQ ID NO: 45830 - DNA, 10 bp, Homo sapiens
  chr6:37791848-37791858
  hypo
gccggtatat

SEQ ID NO: 45831 - DNA, 83 bp, Homo sapiens; identical to SEQ ID NO: 13832
  chr6:38122001-38122084
  hypo

SEQ ID NO: 45832 - DNA, 46 bp, Homo sapiens; identical to SEQ ID NO: 13833
  chr6:38646376-38646422
  hypo

SEQ ID NO: 45833 - DNA, 84 bp, Homo sapiens; identical to SEQ ID NO: 13834
  chr6:38646474-38646558
  hypo

SEQ ID NO: 45834 - DNA, 31 bp, Homo sapiens; identical to SEQ ID NO: 13835
  chr6:38852630-38852661
  hypo

SEQ ID NO: 45835 - DNA, 31 bp, Homo sapiens; identical to SEQ ID NO: 13836
  chr6:39127058-39127089
  hypo

SEQ ID NO: 45836 - DNA, 31 bp, Homo sapiens; identical to SEQ ID NO: 13838
  chr6:39158699-39158730
  hypo

SEQ ID NO: 45837 - DNA, 65 bp, Homo sapiens; identical to SEQ ID NO: 13839
  chr6:39158744-39158809
  hypo

SEQ ID NO: 45838 - DNA, 31 bp, Homo sapiens; identical to SEQ ID NO: 13840
  chr6:39162095-39162126
  hypo

SEQ ID NO: 45839 - DNA, 74 bp, Homo sapiens; identical to SEQ ID NO: 13841
  chr6:41001833-41001907
  hypo

SEQ ID NO: 45840 - DNA, 31 bp, Homo sapiens; identical to SEQ ID NO: 13842
  chr6:41619005-41619036
  hypo

SEQ ID NO: 45841 - DNA, 31 bp, Homo sapiens; identical to SEQ ID NO: 13844
  chr6:41956753-41956784
  hypo

SEQ ID NO: 45842 - DNA, 2 bp, Homo sapiens
  chr6:42110869-42110871
  hypo
ag

SEQ ID NO: 45843 - DNA, 31 bp, Homo sapiens; identical to SEQ ID NO: 13847
  chr6:42141343-42141374
  hypo

SEQ ID NO: 45844 - DNA, 39 bp, Homo sapiens; identical to SEQ ID NO: 13848
  chr6:42762763-42762802
  hypo

SEQ ID NO: 45845 - DNA, 2 bp, Homo sapiens
  chr6:42773439-42773441
  hypo
ta

SEQ ID NO: 45846 - DNA, 31 bp, Homo sapiens; identical to SEQ ID NO: 13851
  chr6:42777803-42777834
  hypo

SEQ ID NO: 45847 - DNA, 1 bp, Homo sapiens
  chr6:42951450-42951451
  hypo
g

SEQ ID NO: 45848 - DNA, 10 bp, Homo sapiens
  chr6:42951476-42951486
  hypo
ctgcctggtt

SEQ ID NO: 45849 - DNA, 31 bp, Homo sapiens; identical to SEQ ID NO: 2624
  chr6:43081635-43081666
  hypo

SEQ ID NO: 45850 - DNA, 44 bp, Homo sapiens; identical to SEQ ID NO: 2625
  chr6:43081717-43081761
  hypo

SEQ ID NO: 45851 - DNA, 35 bp, Homo sapiens; identical to SEQ ID NO: 13860
  chr6:43104147-43104182
  hypo

SEQ ID NO: 45852 - DNA, 31 bp, Homo sapiens; identical to SEQ ID NO: 13861
  chr6:43113235-43113266
  hypo

SEQ ID NO: 45853 - DNA, 31 bp, Homo sapiens; identical to SEQ ID NO: 13862
  chr6:43181064-43181095
  hypo

SEQ ID NO: 45854 - DNA, 31 bp, Homo sapiens; identical to SEQ ID NO: 13863
  chr6:43222389-43222420
  hypo

SEQ ID NO: 45855 - DNA, 31 bp, Homo sapiens; identical to SEQ ID NO: 13864
  chr6:43249394-43249425
  hypo

SEQ ID NO: 45856 - DNA, 2 bp, Homo sapiens
  chr6:43748462-43748464
  hypo
tt

SEQ ID NO: 45857 - DNA, 31 bp, Homo sapiens; identical to SEQ ID NO: 13870
  chr6:43819544-43819575
  hypo

SEQ ID NO: 45858 - DNA, 31 bp, Homo sapiens; identical to SEQ ID NO: 13871
  chr6:43890965-43890996
  hypo

SEQ ID NO: 45859 - DNA, 43 bp, Homo sapiens; identical to SEQ ID NO: 13872
  chr6:43893357-43893400
  hypo

SEQ ID NO: 45860 - DNA, 31 bp, Homo sapiens; identical to SEQ ID NO: 13873
  chr6:43917991-43918022
  hypo

SEQ ID NO: 45861 - DNA, 59 bp, Homo sapiens; identical to SEQ ID NO: 13874
  chr6:43990913-43990972
  hypo

SEQ ID NO: 45862 - DNA, 31 bp, Homo sapiens; identical to SEQ ID NO: 13875
  chr6:43991075-43991106
  hypo

SEQ ID NO: 45863 - DNA, 58 bp, Homo sapiens; identical to SEQ ID NO: 2632
  chr6:44095870-44095928
  hypo

SEQ ID NO: 45864 - DNA, 41 bp, Homo sapiens; identical to SEQ ID NO: 2633
  chr6:44096003-44096044
  hypo

SEQ ID NO: 45865 - DNA, 39 bp, Homo sapiens; identical to SEQ ID NO: 13878
  chr6:44120363-44120402
  hypo

SEQ ID NO: 45866 - DNA, 76 bp, Homo sapiens; identical to SEQ ID NO: 13879
  chr6:44120408-44120484
  hypo

SEQ ID NO: 45867 - DNA, 79 bp, Homo sapiens; identical to SEQ ID NO: 13880
  chr6:44120503-44120582
  hypo

SEQ ID NO: 45868 - DNA, 31 bp, Homo sapiens; identical to SEQ ID NO: 13881
  chr6:44121129-44121160
  hypo

SEQ ID NO: 45869 - DNA, 80 bp, Homo sapiens; identical to SEQ ID NO: 13882
  chr6:44121217-44121297
  hypo

SEQ ID NO: 45870 - DNA, 37 bp, Homo sapiens; identical to SEQ ID NO: 13883
  chr6:44166168-44166205
  hypo

SEQ ID NO: 45871 - DNA, 31 bp, Homo sapiens; identical to SEQ ID NO: 13884
  chr6:44200718-44200749
  hypo

SEQ ID NO: 45872 - DNA, 31 bp, Homo sapiens; identical to SEQ ID NO: 13885
  chr6:44376364-44376395
  hypo

SEQ ID NO: 45873 - DNA, 31 bp, Homo sapiens; identical to SEQ ID NO: 13886
  chr6:44429408-44429439
  hypo

SEQ ID NO: 45874 - DNA, 61 bp, Homo sapiens; identical to SEQ ID NO: 2634
  chr6:46816791-46816852
  hypo

SEQ ID NO: 45875 - DNA, 42 bp, Homo sapiens; identical to SEQ ID NO: 13889
  chr6:49453724-49453766
  hypo

SEQ ID NO: 45876 - DNA, 31 bp, Homo sapiens; identical to SEQ ID NO: 13890
  chr6:49453803-49453834
  hypo

SEQ ID NO: 45877 - DNA, 31 bp, Homo sapiens; identical to SEQ ID NO: 13891
  chr6:49453838-49453869
  hypo

SEQ ID NO: 45878 - DNA, 31 bp, Homo sapiens; identical to SEQ ID NO: 13892
  chr6:49527737-49527768
  hypo

SEQ ID NO: 45879 - DNA, 31 bp, Homo sapiens; identical to SEQ ID NO: 13894
  chr6:52141054-52141085
  hypo

SEQ ID NO: 45880 - DNA, 43 bp, Homo sapiens; identical to SEQ ID NO: 13895
  chr6:52141089-52141132
  hypo

SEQ ID NO: 45881 - DNA, 31 bp, Homo sapiens; identical to SEQ ID NO: 13896
  chr6:52141134-52141165
  hypo

SEQ ID NO: 45882 - DNA, 31 bp, Homo sapiens; identical to SEQ ID NO: 13897
  chr6:52141167-52141198
  hypo

SEQ ID NO: 45883 - DNA, 31 bp, Homo sapiens; identical to SEQ ID NO: 13898
  chr6:52161689-52161720
  hypo

SEQ ID NO: 45884 - DNA, 2 bp, Homo sapiens
  chr6:52344374-52344376
  hypo
at

SEQ ID NO: 45885 - DNA, 53 bp, Homo sapiens; identical to SEQ ID NO: 13901
  chr6:52769076-52769129
  hypo

SEQ ID NO: 45886 - DNA, 31 bp, Homo sapiens; identical to SEQ ID NO: 13902
  chr6:52769131-52769162
  hypo

SEQ ID NO: 45887 - DNA, 31 bp, Homo sapiens; identical to SEQ ID NO: 13903
  chr6:53024100-53024131
  hypo

SEQ ID NO: 45888 - DNA, 63 bp, Homo sapiens; identical to SEQ ID NO: 13904
  chr6:53111000-53111063
  hypo

SEQ ID NO: 45889 - DNA, 31 bp, Homo sapiens; identical to SEQ ID NO: 13905
  chr6:53111138-53111169
  hypo

SEQ ID NO: 45890 - DNA, 31 bp, Homo sapiens; identical to SEQ ID NO: 13906
  chr6:53111176-53111207
  hypo

SEQ ID NO: 45891 - DNA, 31 bp, Homo sapiens; identical to SEQ ID NO: 13912
  chr6:53290504-53290535
  hypo

SEQ ID NO: 45892 - DNA, 31 bp, Homo sapiens; identical to SEQ ID NO: 13913
  chr6:53519303-53519334
  hypo

SEQ ID NO: 45893 - DNA, 31 bp, Homo sapiens; identical to SEQ ID NO: 13914
  chr6:53725818-53725849
  hypo

SEQ ID NO: 45894 - DNA, 75 bp, Homo sapiens; identical to SEQ ID NO: 13915
  chr6:56297180-56297255
  hypo

SEQ ID NO: 45895 - DNA, 36 bp, Homo sapiens; identical to SEQ ID NO: 13917
  chr6:57111927-57111963
  hypo

SEQ ID NO: 45896 - DNA, 42 bp, Homo sapiens; identical to SEQ ID NO: 13918
  chr6:57111977-57112019
  hypo

SEQ ID NO: 45897 - DNA, 31 bp, Homo sapiens; identical to SEQ ID NO: 2651
  chr6:64283109-64283140
  hypo

SEQ ID NO: 45898 - DNA, 22 bp, Homo sapiens
  chr6:73333099-73333121
  hypo
ttgtggcgcggagtcaaagagt

SEQ ID NO: 45899 - DNA, 60 bp, Homo sapiens; identical to SEQ ID NO: 2680
  chr6:74020105-74020165
  hypo

SEQ ID NO: 45900 - DNA, 37 bp, Homo sapiens; identical to SEQ ID NO: 2682
  chr6:74161339-74161376
  hypo

SEQ ID NO: 45901 - DNA, 111 bp, Homo sapiens; identical to SEQ ID NO: 2683
  chr6:74161387-74161498
  hypo

SEQ ID NO: 45902 - DNA, 1 bp, Homo sapiens
  chr6:74234226-74234227
  hypo
a

SEQ ID NO: 45903 - DNA, 87 bp, Homo sapiens; identical to SEQ ID NO: 2687
  chr6:76458863-76458950
  hypo

SEQ ID NO: 45904 - DNA, 42 bp, Homo sapiens; identical to SEQ ID NO: 13955
  chr6:82588583-82588625
  hypo

SEQ ID NO: 45905 - DNA, 41 bp, Homo sapiens; identical to SEQ ID NO: 13956
  chr6:83901418-83901459
  hypo

SEQ ID NO: 45906 - DNA, 2 bp, Homo sapiens
  chr6:86302344-86302346
  hypo
at

SEQ ID NO: 45907 - DNA, 31 bp, Homo sapiens; identical to SEQ ID NO: 13961
  chr6:88137642-88137673
  hypo

SEQ ID NO: 45908 - DNA, 31 bp, Homo sapiens; identical to SEQ ID NO: 13969
  chr6:90052740-90052771
  hypo

SEQ ID NO: 45909 - DNA, 31 bp, Homo sapiens; identical to SEQ ID NO: 13970
  chr6:90052773-90052804
  hypo

SEQ ID NO: 45910 - DNA, 42 bp, Homo sapiens; identical to SEQ ID NO: 36881
  chr6:90121293-90121335
  hypo

SEQ ID NO: 45911 - DNA, 42 bp, Homo sapiens; identical to SEQ ID NO: 2724
  chr6:90121390-90121432
  hypo

SEQ ID NO: 45912 - DNA, 31 bp, Homo sapiens; identical to SEQ ID NO: 13973
  chr6:90522089-90522120
  hypo

SEQ ID NO: 45913 - DNA, 2 bp, Homo sapiens
  chr6:91004760-91004762
  hypo
ct

SEQ ID NO: 45914 - DNA, 34 bp, Homo sapiens; identical to SEQ ID NO: 2731
  chr6:99962858-99962892
  hypo

SEQ ID NO: 45915 - DNA, 31 bp, Homo sapiens; identical to SEQ ID NO: 2732
  chr6:99962894-99962925
  hypo

SEQ ID NO: 45916 - DNA, 31 bp, Homo sapiens; identical to SEQ ID NO: 13986
  chr6:100841321-100841352
  hypo

SEQ ID NO: 45917 - DNA, 31 bp, Homo sapiens; identical to SEQ ID NO: 13987
  chr6:100841367-100841398
  hypo

SEQ ID NO: 45918 - DNA, 31 bp, Homo sapiens; identical to SEQ ID NO: 13988
  chr6:100841437-100841468
  hypo

SEQ ID NO: 45919 - DNA, 42 bp, Homo sapiens; identical to SEQ ID NO: 13990
  chr6:105750651-105750693
  hypo

SEQ ID NO: 45920 - DNA, 31 bp, Homo sapiens; identical to SEQ ID NO: 13991
  chr6:105750694-105750725
  hypo

SEQ ID NO: 45921 - DNA, 31 bp, Homo sapiens; identical to SEQ ID NO: 13992
  chr6:106908237-106908268
  hypo

SEQ ID NO: 45922 - DNA, 2 bp, Homo sapiens
  chr6:108274498-108274500
  hypo
cc

SEQ ID NO: 45923 - DNA, 96 bp, Homo sapiens; identical to SEQ ID NO: 2740
  chr6:108882163-108882259
  hypo

SEQ ID NO: 45924 - DNA, 74 bp, Homo sapiens; identical to SEQ ID NO: 2741
  chr6:108882273-108882347
  hypo

SEQ ID NO: 45925 - DNA, 2 bp, Homo sapiens
  chr6:109057735-109057737
  hypo
ct

SEQ ID NO: 45926 - DNA, 13 bp, Homo sapiens
  chr6:109057760-109057773
  hypo
gccgtggctcacg

SEQ ID NO: 45927 - DNA, 2 bp, Homo sapiens
  chr6:109059834-109059836
  hypo
ag

SEQ ID NO: 45928 - DNA, 112 bp, Homo sapiens; identical to SEQ ID NO: 2742
  chr6:109777315-109777427
  hypo

SEQ ID NO: 45929 - DNA, 40 bp, Homo sapiens; identical to SEQ ID NO: 2743
  chr6:109777566-109777606
  hypo

SEQ ID NO: 45930 - DNA, 49 bp, Homo sapiens; identical to SEQ ID NO: 14009
  chr6:110843340-110843389
  hypo

SEQ ID NO: 45931 - DNA, 47 bp, Homo sapiens; identical to SEQ ID NO: 14010
  chr6:110872231-110872278
  hypo

SEQ ID NO: 45932 - DNA, 64 bp, Homo sapiens; identical to SEQ ID NO: 14011
  chr6:110872316-110872380
  hypo

SEQ ID NO: 45933 - DNA, 31 bp, Homo sapiens; identical to SEQ ID NO: 14012
  chr6:110872388-110872419
  hypo

SEQ ID NO: 45934 - DNA, 31 bp, Homo sapiens; identical to SEQ ID NO: 14013
  chr6:110967154-110967185
  hypo

SEQ ID NO: 45935 - DNA, 73 bp, Homo sapiens; identical to SEQ ID NO: 14015
  chr6:111244971-111245044
  hypo

SEQ ID NO: 45936 - DNA, 31 bp, Homo sapiens; identical to SEQ ID NO: 14016
  chr6:111245085-111245116
  hypo

SEQ ID NO: 45937 - DNA, 31 bp, Homo sapiens; identical to SEQ ID NO: 14017
  chr6:111245118-111245149
  hypo

SEQ ID NO: 45938 - DNA, 33 bp, Homo sapiens; identical to SEQ ID NO: 14018
  chr6:111581422-111581455
  hypo

SEQ ID NO: 45939 - DNA, 72 bp, Homo sapiens; identical to SEQ ID NO: 14019
  chr6:111673960-111674032
  hypo

SEQ ID NO: 45940 - DNA, 57 bp, Homo sapiens; identical to SEQ ID NO: 14020
  chr6:111674099-111674156
  hypo

SEQ ID NO: 45941 - DNA, 84 bp, Homo sapiens; identical to SEQ ID NO: 14021
  chr6:111751950-111752034
  hypo

SEQ ID NO: 45942 - DNA, 31 bp, Homo sapiens; identical to SEQ ID NO: 14022
  chr6:111752047-111752078
  hypo

SEQ ID NO: 45943 - DNA, 31 bp, Homo sapiens; identical to SEQ ID NO: 14023
  chr6:111766136-111766167
  hypo

SEQ ID NO: 45944 - DNA, 104 bp, Homo sapiens; identical to SEQ ID NO: 14024
  chr6:111766197-111766301
  hypo

SEQ ID NO: 45945 - DNA, 31 bp, Homo sapiens; identical to SEQ ID NO: 14025
  chr6:111872273-111872304
  hypo

SEQ ID NO: 45946 - DNA, 31 bp, Homo sapiens; identical to SEQ ID NO: 14026
  chr6:111955505-111955536
  hypo

SEQ ID NO: 45947 - DNA, 31 bp, Homo sapiens; identical to SEQ ID NO: 14028
  chr6:111960202-111960233
  hypo

SEQ ID NO: 45948 - DNA, 31 bp, Homo sapiens; identical to SEQ ID NO: 14029
  chr6:111993234-111993265
  hypo

SEQ ID NO: 45949 - DNA, 41 bp, Homo sapiens; identical to SEQ ID NO: 14030
  chr6:111993273-111993314
  hypo

SEQ ID NO: 45950 - DNA, 31 bp, Homo sapiens; identical to SEQ ID NO: 14031
  chr6:111993390-111993421
  hypo

SEQ ID NO: 45951 - DNA, 31 bp, Homo sapiens; identical to SEQ ID NO: 14033
  chr6:114153367-114153398
  hypo

SEQ ID NO: 45952 - DNA, 31 bp, Homo sapiens; identical to SEQ ID NO: 2744
  chr6:114180217-114180248
  hypo

SEQ ID NO: 45953 - DNA, 2 bp, Homo sapiens
  chr6:116574056-116574058
  hypo
at

SEQ ID NO: 45954 - DNA, 151 bp, Homo sapiens; identical to SEQ ID NO: 2746
  chr6:117803612-117803763
  hypo

SEQ ID NO: 45955 - DNA, 31 bp, Homo sapiens; identical to SEQ ID NO: 2747
  chr6:117803795-117803826
  hypo

SEQ ID NO: 45956 - DNA, 108 bp, Homo sapiens; identical to SEQ ID NO: 2748
  chr6:117804001-117804109
  hypo

SEQ ID NO: 45957 - DNA, 113 bp, Homo sapiens; identical to SEQ ID NO: 2749
  chr6:117804130-117804243
  hypo

SEQ ID NO: 45958 - DNA, 31 bp, Homo sapiens; identical to SEQ ID NO: 2750
  chr6:117804250-117804281
  hypo

SEQ ID NO: 45959 - DNA, 68 bp, Homo sapiens; identical to SEQ ID NO: 2753
  chr6:123110666-123110734
  hypo

SEQ ID NO: 45960 - DNA, 31 bp, Homo sapiens; identical to SEQ ID NO: 14044
  chr6:127739718-127739749
  hypo

SEQ ID NO: 45961 - DNA, 31 bp, Homo sapiens; identical to SEQ ID NO: 14045
  chr6:128830108-128830139
  hypo

SEQ ID NO: 45962 - DNA, 31 bp, Homo sapiens; identical to SEQ ID NO: 14046
  chr6:128830160-128830191
  hypo

SEQ ID NO: 45963 - DNA, 31 bp, Homo sapiens; identical to SEQ ID NO: 2765
  chr6:130342613-130342644
  hypo

SEQ ID NO: 45964 - DNA, 42 bp, Homo sapiens; identical to SEQ ID NO: 14049
  chr6:133118417-133118459
  hypo

SEQ ID NO: 45965 - DNA, 31 bp, Homo sapiens; identical to SEQ ID NO: 2769
  chr6:133146627-133146658
  hypo

SEQ ID NO: 45966 - DNA, 31 bp, Homo sapiens; identical to SEQ ID NO: 2770
  chr6:133146679-133146710
  hypo

SEQ ID NO: 45967 - DNA, 31 bp, Homo sapiens; identical to SEQ ID NO: 2771
  chr6:133146717-133146748
  hypo

SEQ ID NO: 45968 - DNA, 49 bp, Homo sapiens; identical to SEQ ID NO: 2772
  chr6:133146772-133146821
  hypo

SEQ ID NO: 45969 - DNA, 2 bp, Homo sapiens
  chr6:134589499-134589501
  hypo
ac

SEQ ID NO: 45970 - DNA, 31 bp, Homo sapiens; identical to SEQ ID NO: 14056
  chr6:136681876-136681907
  hypo

SEQ ID NO: 45971 - DNA, 43 bp, Homo sapiens; identical to SEQ ID NO: 14057
  chr6:136682165-136682208
  hypo

SEQ ID NO: 45972 - DNA, 31 bp, Homo sapiens; identical to SEQ ID NO: 2775
  chr6:136870741-136870772
  hypo

SEQ ID NO: 45973 - DNA, 204 bp, Homo sapiens; identical to SEQ ID NO: 2776
  chr6:136870810-136871014
  hypo

SEQ ID NO: 45974 - DNA, 56 bp, Homo sapiens; identical to SEQ ID NO: 2777
  chr6:136871047-136871103
  hypo

SEQ ID NO: 45975 - DNA, 199 bp, Homo sapiens; identical to SEQ ID NO: 2778
  chr6:136871106-136871305
  hypo

SEQ ID NO: 45976 - DNA, 44 bp, Homo sapiens; identical to SEQ ID NO: 2781
  chr6:138428546-138428590
  hypo

SEQ ID NO: 45977 - DNA, 26 bp, Homo sapiens
  chr6:138790576-138790602
  hypo
aaggctgagcgcgatgactcacgcct

SEQ ID NO: 45978 - DNA, 175 bp, Homo sapiens; identical to SEQ ID NO: 2792
  chr6:139013360-139013535
  hypo

SEQ ID NO: 45979 - DNA, 71 bp, Homo sapiens; identical to SEQ ID NO: 2793
  chr6:139013607-139013678
  hypo

SEQ ID NO: 45980 - DNA, 122 bp, Homo sapiens; identical to SEQ ID NO: 2794
  chr6:139013722-139013844
  hypo

SEQ ID NO: 45981 - DNA, 31 bp, Homo sapiens; identical to SEQ ID NO: 14072
  chr6:139908685-139908716
  hypo

SEQ ID NO: 45982 - DNA, 31 bp, Homo sapiens; identical to SEQ ID NO: 14073
  chr6:140012887-140012918
  hypo

SEQ ID NO: 45983 - DNA, 31 bp, Homo sapiens; identical to SEQ ID NO: 2795
  chr6:143266116-143266147
  hypo

SEQ ID NO: 45984 - DNA, 86 bp, Homo sapiens; identical to SEQ ID NO: 2796
  chr6:143999273-143999359
  hypo

SEQ ID NO: 45985 - DNA, 31 bp, Homo sapiens; identical to SEQ ID NO: 14076
  chr6:144271405-144271436
  hypo

SEQ ID NO: 45986 - DNA, 31 bp, Homo sapiens; identical to SEQ ID NO: 14077
  chr6:144330174-144330205
  hypo

SEQ ID NO: 45987 - DNA, 31 bp, Homo sapiens; identical to SEQ ID NO: 14078
  chr6:144330216-144330247
  hypo

SEQ ID NO: 45988 - DNA, 69 bp, Homo sapiens; identical to SEQ ID NO: 2797
  chr6:144606892-144606961
  hypo

SEQ ID NO: 45989 - DNA, 31 bp, Homo sapiens; identical to SEQ ID NO: 2798
  chr6:144606966-144606997
  hypo

SEQ ID NO: 45990 - DNA, 38 bp, Homo sapiens; identical to SEQ ID NO: 2799
  chr6:144607005-144607043
  hypo

SEQ ID NO: 45991 - DNA, 106 bp, Homo sapiens; identical to SEQ ID NO: 14082
  chr6:144608086-144608192
  hypo

SEQ ID NO: 45992 - DNA, 32 bp, Homo sapiens; identical to SEQ ID NO: 14083
  chr6:146011351-146011383
  hypo

SEQ ID NO: 45993 - DNA, 31 bp, Homo sapiens; identical to SEQ ID NO: 2802
  chr6:146136665-146136696
  hypo

SEQ ID NO: 45994 - DNA, 224 bp, Homo sapiens; identical to SEQ ID NO: 36949
  chr6:146864539-146864763
  hypo

SEQ ID NO: 45995 - DNA, 56 bp, Homo sapiens; identical to SEQ ID NO: 36950
  chr6:146864878-146864934
  hypo

SEQ ID NO: 45996 - DNA, 31 bp, Homo sapiens; identical to SEQ ID NO: 14086
  chr6:147177766-147177797
  hypo

SEQ ID NO: 45997 - DNA, 70 bp, Homo sapiens; identical to SEQ ID NO: 14087
  chr6:147519321-147519391
  hypo

SEQ ID NO: 45998 - DNA, 40 bp, Homo sapiens; identical to SEQ ID NO: 14088
  chr6:148648688-148648728
  hypo

SEQ ID NO: 45999 - DNA, 31 bp, Homo sapiens; identical to SEQ ID NO: 14089
  chr6:148699760-148699791
  hypo

SEQ ID NO: 46000 - DNA, 31 bp, Homo sapiens; identical to SEQ ID NO: 14090
  chr6:148819896-148819927
  hypo

SEQ ID NO: 46001 - DNA, 34 bp, Homo sapiens; identical to SEQ ID NO: 14091
  chr6:148819989-148820023
  hypo

SEQ ID NO: 46002 - DNA, 51 bp, Homo sapiens; identical to SEQ ID NO: 14092
  chr6:148820044-148820095
  hypo

SEQ ID NO: 46003 - DNA, 31 bp, Homo sapiens; identical to SEQ ID NO: 14093
  chr6:148854572-148854603
  hypo

SEQ ID NO: 46004 - DNA, 31 bp, Homo sapiens; identical to SEQ ID NO: 14094
  chr6:148857378-148857409
  hypo

SEQ ID NO: 46005 - DNA, 31 bp, Homo sapiens; identical to SEQ ID NO: 14095
  chr6:148865873-148865904
  hypo

SEQ ID NO: 46006 - DNA, 54 bp, Homo sapiens; identical to SEQ ID NO: 14096
  chr6:149177571-149177625
  hypo

SEQ ID NO: 46007 - DNA, 31 bp, Homo sapiens; identical to SEQ ID NO: 14097
  chr6:149177695-149177726
  hypo

SEQ ID NO: 46008 - DNA, 36 bp, Homo sapiens; identical to SEQ ID NO: 14098
  chr6:149177731-149177767
  hypo

SEQ ID NO: 46009 - DNA, 50 bp, Homo sapiens; identical to SEQ ID NO: 14099
  chr6:149198423-149198473
  hypo

SEQ ID NO: 46010 - DNA, 35 bp, Homo sapiens; identical to SEQ ID NO: 14100
  chr6:149198481-149198516
  hypo

SEQ ID NO: 46011 - DNA, 33 bp, Homo sapiens; identical to SEQ ID NO: 14101
  chr6:149198575-149198608
  hypo

SEQ ID NO: 46012 - DNA, 2 bp, Homo sapiens
  chr6:149772981-149772983
  hypo
gg

SEQ ID NO: 46013 - DNA, 88 bp, Homo sapiens; identical to SEQ ID NO: 2810
  chr6:150185521-150185609
  hypo

SEQ ID NO: 46014 - DNA, 31 bp, Homo sapiens; identical to SEQ ID NO: 2811
  chr6:150185610-150185641
  hypo

SEQ ID NO: 46015 - DNA, 94 bp, Homo sapiens; identical to SEQ ID NO: 14106
  chr6:150420026-150420120
  hypo

SEQ ID NO: 46016 - DNA, 31 bp, Homo sapiens; identical to SEQ ID NO: 14107
  chr6:150420194-150420225
  hypo

SEQ ID NO: 46017 - DNA, 31 bp, Homo sapiens; identical to SEQ ID NO: 14108
  chr6:150746914-150746945
  hypo

SEQ ID NO: 46018 - DNA, 36 bp, Homo sapiens; identical to SEQ ID NO: 14109
  chr6:151346387-151346423
  hypo

SEQ ID NO: 46019 - DNA, 35 bp, Homo sapiens; identical to SEQ ID NO: 14110
  chr6:151546981-151547016
  hypo

SEQ ID NO: 46020 - DNA, 30 bp, Homo sapiens; identical to SEQ ID NO: 36961
  chr6:152623493-152623523
  hypo

SEQ ID NO: 46021 - DNA, 31 bp, Homo sapiens; identical to SEQ ID NO: 14114
  chr6:153990668-153990699
  hypo

SEQ ID NO: 46022 - DNA, 31 bp, Homo sapiens; identical to SEQ ID NO: 14115
  chr6:154709414-154709445
  hypo

SEQ ID NO: 46023 - DNA, 31 bp, Homo sapiens; identical to SEQ ID NO: 14116
  chr6:154727733-154727764
  hypo

SEQ ID NO: 46024 - DNA, 31 bp, Homo sapiens; identical to SEQ ID NO: 14117
  chr6:154739332-154739363
  hypo

SEQ ID NO: 46025 - DNA, 31 bp, Homo sapiens; identical to SEQ ID NO: 14119
  chr6:154764439-154764470
  hypo

SEQ ID NO: 46026 - DNA, 31 bp, Homo sapiens; identical to SEQ ID NO: 14122
  chr6:154827051-154827082
  hypo

SEQ ID NO: 46027 - DNA, 48 bp, Homo sapiens; identical to SEQ ID NO: 2824
  chr6:154831462-154831510
  hypo

SEQ ID NO: 46028 - DNA, 91 bp, Homo sapiens; identical to SEQ ID NO: 2825
  chr6:154831530-154831621
  hypo

SEQ ID NO: 46029 - DNA, 163 bp, Homo sapiens; identical to SEQ ID NO: 2826
  chr6:154831742-154831905
  hypo

SEQ ID NO: 46030 - DNA, 43 bp, Homo sapiens; identical to SEQ ID NO: 2827
  chr6:154831918-154831961
  hypo

SEQ ID NO: 46031 - DNA, 31 bp, Homo sapiens; identical to SEQ ID NO: 14127
  chr6:154842781-154842812
  hypo

SEQ ID NO: 46032 - DNA, 48 bp, Homo sapiens; identical to SEQ ID NO: 14128
  chr6:154894707-154894755
  hypo

SEQ ID NO: 46033 - DNA, 31 bp, Homo sapiens; identical to SEQ ID NO: 14129
  chr6:154894829-154894860
  hypo

SEQ ID NO: 46034 - DNA, 29 bp, Homo sapiens
  chr6:155568744-155568773
  hypo
agccaccgcacctggccacgcttcatggc

SEQ ID NO: 46035 - DNA, 31 bp, Homo sapiens; identical to SEQ ID NO: 14133
  chr6:155838704-155838735
  hypo

SEQ ID NO: 46036 - DNA, 31 bp, Homo sapiens; identical to SEQ ID NO: 14134
  chr6:155838740-155838771
  hypo

SEQ ID NO: 46037 - DNA, 31 bp, Homo sapiens; identical to SEQ ID NO: 14136
  chr6:157319352-157319383
  hypo

SEQ ID NO: 46038 - DNA, 2 bp, Homo sapiens
  chr6:157478284-157478286
  hypo
gg

SEQ ID NO: 46039 - DNA, 14 bp, Homo sapiens
  chr6:157502561-157502575
  hypo
gggccagactagat

SEQ ID NO: 46040 - DNA, 2 bp, Homo sapiens
  chr6:157505816-157505818
  hypo
aa

SEQ ID NO: 46041 - DNA, 2 bp, Homo sapiens
  chr6:157506081-157506083
  hypo
ga

SEQ ID NO: 46042 - DNA, 17 bp, Homo sapiens
  chr6:157506112-157506129
  hypo
cacggccttgttttgga

SEQ ID NO: 46043 - DNA, 31 bp, Homo sapiens; identical to SEQ ID NO: 14143
  chr6:157540519-157540550
  hypo

SEQ ID NO: 46044 - DNA, 31 bp, Homo sapiens; identical to SEQ ID NO: 14144
  chr6:157632955-157632986
  hypo

SEQ ID NO: 46045 - DNA, 2 bp, Homo sapiens
  chr6:157638361-157638363
  hypo
ag

SEQ ID NO: 46046 - DNA, 59 bp, Homo sapiens; identical to SEQ ID NO: 2828
  chr6:157802883-157802942
  hypo

SEQ ID NO: 46047 - DNA, 31 bp, Homo sapiens; identical to SEQ ID NO: 14148
  chr6:158018131-158018162
  hypo

SEQ ID NO: 46048 - DNA, 36 bp, Homo sapiens; identical to SEQ ID NO: 2829
  chr6:158244129-158244165
  hypo

SEQ ID NO: 46049 - DNA, 71 bp, Homo sapiens; identical to SEQ ID NO: 2830
  chr6:158244316-158244387
  hypo

SEQ ID NO: 46050 - DNA, 31 bp, Homo sapiens; identical to SEQ ID NO: 2831
  chr6:158244423-158244454
  hypo

SEQ ID NO: 46051 - DNA, 51 bp, Homo sapiens; identical to SEQ ID NO: 2832
  chr6:158244503-158244554
  hypo

SEQ ID NO: 46052 - DNA, 31 bp, Homo sapiens; identical to SEQ ID NO: 14154
  chr6:159135763-159135794
  hypo

SEQ ID NO: 46053 - DNA, 31 bp, Homo sapiens; identical to SEQ ID NO: 14155
  chr6:159135801-159135832
  hypo

SEQ ID NO: 46054 - DNA, 31 bp, Homo sapiens; identical to SEQ ID NO: 14156
  chr6:159135865-159135896
  hypo

SEQ ID NO: 46055 - DNA, 31 bp, Homo sapiens; identical to SEQ ID NO: 14157
  chr6:159135899-159135930
  hypo

SEQ ID NO: 46056 - DNA, 31 bp, Homo sapiens; identical to SEQ ID NO: 14158
  chr6:159135948-159135979
  hypo

SEQ ID NO: 46057 - DNA, 2 bp, Homo sapiens
  chr6:159151891-159151893
  hypo
aa

SEQ ID NO: 46058 - DNA, 31 bp, Homo sapiens; identical to SEQ ID NO: 14160
  chr6:159177015-159177046
  hypo

SEQ ID NO: 46059 - DNA, 49 bp, Homo sapiens; identical to SEQ ID NO: 14161
  chr6:159203060-159203109
  hypo

SEQ ID NO: 46060 - DNA, 31 bp, Homo sapiens; identical to SEQ ID NO: 14162
  chr6:159345137-159345168
  hypo

SEQ ID NO: 46061 - DNA, 31 bp, Homo sapiens; identical to SEQ ID NO: 14164
  chr6:159419588-159419619
  hypo

SEQ ID NO: 46062 - DNA, 58 bp, Homo sapiens; identical to SEQ ID NO: 14165
  chr6:160328045-160328103
  hypo

SEQ ID NO: 46063 - DNA, 31 bp, Homo sapiens; identical to SEQ ID NO: 14166
  chr6:160328148-160328179
  hypo

SEQ ID NO: 46064 - DNA, 31 bp, Homo sapiens; identical to SEQ ID NO: 14167
  chr6:160328195-160328226
  hypo

SEQ ID NO: 46065 - DNA, 45 bp, Homo sapiens; identical to SEQ ID NO: 2835
  chr6:160389821-160389866
  hypo

SEQ ID NO: 46066 - DNA, 83 bp, Homo sapiens; identical to SEQ ID NO: 14169
  chr6:160491753-160491836
  hypo

SEQ ID NO: 46067 - DNA, 31 bp, Homo sapiens; identical to SEQ ID NO: 14170
  chr6:160491878-160491909
  hypo

SEQ ID NO: 46068 - DNA, 19 bp, Homo sapiens
  chr6:160512209-160512228
  hypo
gctccgtgccctggtgctg

SEQ ID NO: 46069 - DNA, 31 bp, Homo sapiens; identical to SEQ ID NO: 14173
  chr6:161460048-161460079
  hypo

SEQ ID NO: 46070 - DNA, 31 bp, Homo sapiens; identical to SEQ ID NO: 14174
  chr6:161559687-161559718
  hypo

SEQ ID NO: 46071 - DNA, 31 bp, Homo sapiens; identical to SEQ ID NO: 14175
  chr6:161577268-161577299
  hypo

SEQ ID NO: 46072 - DNA, 31 bp, Homo sapiens; identical to SEQ ID NO: 14176
  chr6:161767101-161767132
  hypo

SEQ ID NO: 46073 - DNA, 31 bp, Homo sapiens; identical to SEQ ID NO: 2841
  chr6:163837419-163837450
  hypo

SEQ ID NO: 46074 - DNA, 53 bp, Homo sapiens; identical to SEQ ID NO: 14181
  chr6:165747831-165747884
  hypo

SEQ ID NO: 46075 - DNA, 49 bp, Homo sapiens; identical to SEQ ID NO: 14182
  chr6:166748325-166748374
  hypo

SEQ ID NO: 46076 - DNA, 31 bp, Homo sapiens; identical to SEQ ID NO: 2842
  chr6:166822698-166822729
  hypo

SEQ ID NO: 46077 - DNA, 31 bp, Homo sapiens; identical to SEQ ID NO: 14184
  chr6:167065180-167065211
  hypo

SEQ ID NO: 46078 - DNA, 31 bp, Homo sapiens; identical to SEQ ID NO: 14185
  chr6:167511714-167511745
  hypo

SEQ ID NO: 46079 - DNA, 31 bp, Homo sapiens; identical to SEQ ID NO: 14186
  chr6:167511787-167511818
  hypo

SEQ ID NO: 46080 - DNA, 58 bp, Homo sapiens; identical to SEQ ID NO: 14187
  chr6:167511853-167511911
  hypo

SEQ ID NO: 46081 - DNA, 31 bp, Homo sapiens; identical to SEQ ID NO: 14188
  chr6:167570837-167570868
  hypo

SEQ ID NO: 46082 - DNA, 31 bp, Homo sapiens; identical to SEQ ID NO: 14189
  chr6:167592732-167592763
  hypo

SEQ ID NO: 46083 - DNA, 31 bp, Homo sapiens; identical to SEQ ID NO: 14190
  chr6:167651139-167651170
  hypo

SEQ ID NO: 46084 - DNA, 31 bp, Homo sapiens; identical to SEQ ID NO: 14191
  chr6:167808332-167808363
  hypo

SEQ ID NO: 46085 - DNA, 31 bp, Homo sapiens; identical to SEQ ID NO: 14194
  chr6:167859495-167859526
  hypo

SEQ ID NO: 46086 - DNA, 52 bp, Homo sapiens; identical to SEQ ID NO: 14196
  chr6:168054235-168054287
  hypo

SEQ ID NO: 46087 - DNA, 31 bp, Homo sapiens; identical to SEQ ID NO: 14197
  chr6:168098917-168098948
  hypo

SEQ ID NO: 46088 - DNA, 37 bp, Homo sapiens; identical to SEQ ID NO: 14198
  chr6:168131200-168131237
  hypo

SEQ ID NO: 46089 - DNA, 48 bp, Homo sapiens; identical to SEQ ID NO: 14199
  chr6:168156340-168156388
  hypo

SEQ ID NO: 46090 - DNA, 70 bp, Homo sapiens; identical to SEQ ID NO: 2850
  chr6:168227398-168227468
  hypo

SEQ ID NO: 46091 - DNA, 34 bp, Homo sapiens; identical to SEQ ID NO: 2851
  chr6:168227909-168227943
  hypo

SEQ ID NO: 46092 - DNA, 85 bp, Homo sapiens; identical to SEQ ID NO: 2852
  chr6:168228221-168228306
  hypo

SEQ ID NO: 46093 - DNA, 29 bp, Homo sapiens
  chr6:168377608-168377637
  hypo
tgctccccaacgcccgctcctgtgctggt

SEQ ID NO: 46094 - DNA, 40 bp, Homo sapiens; identical to SEQ ID NO: 14204
  chr6:168377656-168377696
  hypo

SEQ ID NO: 46095 - DNA, 41 bp, Homo sapiens; identical to SEQ ID NO: 14205
  chr6:168387061-168387102
  hypo

SEQ ID NO: 46096 - DNA, 87 bp, Homo sapiens; identical to SEQ ID NO: 14206
  chr6:168387332-168387419
  hypo

SEQ ID NO: 46097 - DNA, 31 bp, Homo sapiens; identical to SEQ ID NO: 14207
  chr6:168389683-168389714
  hypo

SEQ ID NO: 46098 - DNA, 31 bp, Homo sapiens; identical to SEQ ID NO: 14208
  chr6:168389767-168389798
  hypo

SEQ ID NO: 46099 - DNA, 31 bp, Homo sapiens; identical to SEQ ID NO: 14209
  chr6:168389799-168389830
  hypo

SEQ ID NO: 46100 - DNA, 37 bp, Homo sapiens; identical to SEQ ID NO: 14210
  chr6:168389835-168389872
  hypo

SEQ ID NO: 46101 - DNA, 92 bp, Homo sapiens; identical to SEQ ID NO: 14211
  chr6:168390654-168390746
  hypo

SEQ ID NO: 46102 - DNA, 31 bp, Homo sapiens; identical to SEQ ID NO: 14212
  chr6:168390943-168390974
  hypo

SEQ ID NO: 46103 - DNA, 31 bp, Homo sapiens; identical to SEQ ID NO: 14213
  chr6:168391270-168391301
  hypo

SEQ ID NO: 46104 - DNA, 73 bp, Homo sapiens; identical to SEQ ID NO: 14214
  chr6:168391441-168391514
  hypo

SEQ ID NO: 46105 - DNA, 58 bp, Homo sapiens; identical to SEQ ID NO: 14215
  chr6:168391518-168391576
  hypo

SEQ ID NO: 46106 - DNA, 70 bp, Homo sapiens; identical to SEQ ID NO: 14216
  chr6:168420279-168420349
  hypo

SEQ ID NO: 46107 - DNA, 31 bp, Homo sapiens; identical to SEQ ID NO: 14217
  chr6:168420404-168420435
  hypo

SEQ ID NO: 46108 - DNA, 31 bp, Homo sapiens; identical to SEQ ID NO: 14218
  chr6:168420449-168420480
  hypo

SEQ ID NO: 46109 - DNA, 46 bp, Homo sapiens; identical to SEQ ID NO: 14219
  chr6:168428431-168428477
  hypo

SEQ ID NO: 46110 - DNA, 59 bp, Homo sapiens; identical to SEQ ID NO: 14220
  chr6:168434609-168434668
  hypo

SEQ ID NO: 46111 - DNA, 31 bp, Homo sapiens; identical to SEQ ID NO: 14221
  chr6:168434702-168434733
  hypo

SEQ ID NO: 46112 - DNA, 31 bp, Homo sapiens; identical to SEQ ID NO: 14222
  chr6:168434746-168434777
  hypo

SEQ ID NO: 46113 - DNA, 71 bp, Homo sapiens; identical to SEQ ID NO: 14223
  chr6:168450727-168450798
  hypo

SEQ ID NO: 46114 - DNA, 36 bp, Homo sapiens; identical to SEQ ID NO: 14224
  chr6:168450835-168450871
  hypo

SEQ ID NO: 46115 - DNA, 70 bp, Homo sapiens; identical to SEQ ID NO: 14225
  chr6:168450874-168450944
  hypo

SEQ ID NO: 46116 - DNA, 37 bp, Homo sapiens; identical to SEQ ID NO: 14226
  chr6:168458056-168458093
  hypo

SEQ ID NO: 46117 - DNA, 47 bp, Homo sapiens; identical to SEQ ID NO: 14227
  chr6:168458118-168458165
  hypo

SEQ ID NO: 46118 - DNA, 31 bp, Homo sapiens; identical to SEQ ID NO: 14228
  chr6:168458284-168458315
  hypo

SEQ ID NO: 46119 - DNA, 48 bp, Homo sapiens; identical to SEQ ID NO: 14229
  chr6:168458360-168458408
  hypo

SEQ ID NO: 46120 - DNA, 31 bp, Homo sapiens; identical to SEQ ID NO: 14230
  chr6:168461479-168461510
  hypo

SEQ ID NO: 46121 - DNA, 67 bp, Homo sapiens; identical to SEQ ID NO: 14231
  chr6:168461831-168461898
  hypo

SEQ ID NO: 46122 - DNA, 63 bp, Homo sapiens; identical to SEQ ID NO: 14232
  chr6:168463426-168463489
  hypo

SEQ ID NO: 46123 - DNA, 60 bp, Homo sapiens; identical to SEQ ID NO: 14233
  chr6:168463521-168463581
  hypo

SEQ ID NO: 46124 - DNA, 31 bp, Homo sapiens; identical to SEQ ID NO: 14234
  chr6:168463598-168463629
  hypo

SEQ ID NO: 46125 - DNA, 31 bp, Homo sapiens; identical to SEQ ID NO: 14235
  chr6:168464976-168465007
  hypo

SEQ ID NO: 46126 - DNA, 42 bp, Homo sapiens; identical to SEQ ID NO: 14236
  chr6:168467712-168467754
  hypo

SEQ ID NO: 46127 - DNA, 31 bp, Homo sapiens; identical to SEQ ID NO: 14237
  chr6:168481549-168481580
  hypo

SEQ ID NO: 46128 - DNA, 31 bp, Homo sapiens; identical to SEQ ID NO: 14238
  chr6:168482064-168482095
  hypo

SEQ ID NO: 46129 - DNA, 31 bp, Homo sapiens; identical to SEQ ID NO: 14239
  chr6:168529145-168529176
  hypo

SEQ ID NO: 46130 - DNA, 56 bp, Homo sapiens; identical to SEQ ID NO: 14240
  chr6:168530047-168530103
  hypo

SEQ ID NO: 46131 - DNA, 39 bp, Homo sapiens; identical to SEQ ID NO: 14241
  chr6:168561522-168561561
  hypo

SEQ ID NO: 46132 - DNA, 76 bp, Homo sapiens; identical to SEQ ID NO: 14242
  chr6:168591252-168591328
  hypo

SEQ ID NO: 46133 - DNA, 31 bp, Homo sapiens; identical to SEQ ID NO: 14243
  chr6:168643920-168643951
  hypo

SEQ ID NO: 46134 - DNA, 31 bp, Homo sapiens; identical to SEQ ID NO: 14244
  chr6:168708313-168708344
  hypo

SEQ ID NO: 46135 - DNA, 31 bp, Homo sapiens; identical to SEQ ID NO: 14245
  chr6:168710885-168710916
  hypo

SEQ ID NO: 46136 - DNA, 37 bp, Homo sapiens; identical to SEQ ID NO: 14246
  chr6:168813948-168813985
  hypo

SEQ ID NO: 46137 - DNA, 84 bp, Homo sapiens; identical to SEQ ID NO: 14247
  chr6:168813998-168814082
  hypo

SEQ ID NO: 46138 - DNA, 31 bp, Homo sapiens; identical to SEQ ID NO: 14248
  chr6:169567363-169567394
  hypo

SEQ ID NO: 46139 - DNA, 31 bp, Homo sapiens; identical to SEQ ID NO: 14249
  chr6:169614048-169614079
  hypo

SEQ ID NO: 46140 - DNA, 31 bp, Homo sapiens; identical to SEQ ID NO: 14250
  chr6:169639660-169639691
  hypo

SEQ ID NO: 46141 - DNA, 31 bp, Homo sapiens; identical to SEQ ID NO: 14251
  chr6:169803234-169803265
  hypo

SEQ ID NO: 46142 - DNA, 48 bp, Homo sapiens; identical to SEQ ID NO: 14252
  chr6:169803283-169803331
  hypo

SEQ ID NO: 46143 - DNA, 31 bp, Homo sapiens; identical to SEQ ID NO: 14253
  chr6:169803364-169803395
  hypo

SEQ ID NO: 46144 - DNA, 31 bp, Homo sapiens; identical to SEQ ID NO: 14254
  chr6:169803397-169803428
  hypo

SEQ ID NO: 46145 - DNA, 37 bp, Homo sapiens; identical to SEQ ID NO: 14255
  chr6:170061017-170061054
  hypo

SEQ ID NO: 46146 - DNA, 126 bp, Homo sapiens; identical to SEQ ID NO: 14256
  chr6:170339547-170339673
  hypo

SEQ ID NO: 46147 - DNA, 31 bp, Homo sapiens; identical to SEQ ID NO: 14257
  chr6:170344373-170344404
  hypo

SEQ ID NO: 46148 - DNA, 2 bp, Homo sapiens
  chr6:170474842-170474844
  hypo
gt

SEQ ID NO: 46149 - DNA, 31 bp, Homo sapiens; identical to SEQ ID NO: 14264
  chr6:170491588-170491619
  hypo

SEQ ID NO: 46150 - DNA, 31 bp, Homo sapiens; identical to SEQ ID NO: 14265
  chr6:170561025-170561056
  hypo

SEQ ID NO: 46151 - DNA, 34 bp, Homo sapiens; identical to SEQ ID NO: 14266
  chr7:62936-62970
  hypo

SEQ ID NO: 46152 - DNA, 90 bp, Homo sapiens; identical to SEQ ID NO: 14267
  chr7:88326-88416
  hypo

SEQ ID NO: 46153 - DNA, 31 bp, Homo sapiens; identical to SEQ ID NO: 14268
  chr7:156973-157004
  hypo

SEQ ID NO: 46154 - DNA, 31 bp, Homo sapiens; identical to SEQ ID NO: 14269
  chr7:181307-181338
  hypo

SEQ ID NO: 46155 - DNA, 66 bp, Homo sapiens; identical to SEQ ID NO: 14270
  chr7:204778-204844
  hypo

SEQ ID NO: 46156 - DNA, 40 bp, Homo sapiens; identical to SEQ ID NO: 14271
  chr7:204884-204924
  hypo

SEQ ID NO: 46157 - DNA, 31 bp, Homo sapiens; identical to SEQ ID NO: 14272
  chr7:211563-211594
  hypo

SEQ ID NO: 46158 - DNA, 39 bp, Homo sapiens; identical to SEQ ID NO: 14273
  chr7:299616-299655
  hypo

SEQ ID NO: 46159 - DNA, 31 bp, Homo sapiens; identical to SEQ ID NO: 14274
  chr7:302539-302570
  hypo

SEQ ID NO: 46160 - DNA, 31 bp, Homo sapiens; identical to SEQ ID NO: 14275
  chr7:307125-307156
  hypo

SEQ ID NO: 46161 - DNA, 35 bp, Homo sapiens; identical to SEQ ID NO: 14276
  chr7:339203-339238
  hypo

SEQ ID NO: 46162 - DNA, 31 bp, Homo sapiens; identical to SEQ ID NO: 14277
  chr7:396925-396956
  hypo

SEQ ID NO: 46163 - DNA, 31 bp, Homo sapiens; identical to SEQ ID NO: 14278
  chr7:416864-416895
  hypo

SEQ ID NO: 46164 - DNA, 31 bp, Homo sapiens; identical to SEQ ID NO: 14279
  chr7:418814-418845
  hypo

SEQ ID NO: 46165 - DNA, 31 bp, Homo sapiens; identical to SEQ ID NO: 14280
  chr7:425949-425980
  hypo

SEQ ID NO: 46166 - DNA, 31 bp, Homo sapiens; identical to SEQ ID NO: 14281
  chr7:429736-429767
  hypo

SEQ ID NO: 46167 - DNA, 31 bp, Homo sapiens; identical to SEQ ID NO: 14282
  chr7:429778-429809
  hypo

SEQ ID NO: 46168 - DNA, 42 bp, Homo sapiens; identical to SEQ ID NO: 14283
  chr7:429841-429883
  hypo

SEQ ID NO: 46169 - DNA, 31 bp, Homo sapiens; identical to SEQ ID NO: 14284
  chr7:469230-469261
  hypo

SEQ ID NO: 46170 - DNA, 76 bp, Homo sapiens; identical to SEQ ID NO: 14285
  chr7:480949-481025
  hypo

SEQ ID NO: 46171 - DNA, 85 bp, Homo sapiens; identical to SEQ ID NO: 14286
  chr7:481032-481117
  hypo

SEQ ID NO: 46172 - DNA, 36 bp, Homo sapiens; identical to SEQ ID NO: 14287
  chr7:485247-485283
  hypo

SEQ ID NO: 46173 - DNA, 47 bp, Homo sapiens; identical to SEQ ID NO: 14288
  chr7:534691-534738
  hypo

SEQ ID NO: 46174 - DNA, 31 bp, Homo sapiens; identical to SEQ ID NO: 14289
  chr7:534782-534813
  hypo

SEQ ID NO: 46175 - DNA, 63 bp, Homo sapiens; identical to SEQ ID NO: 14290
  chr7:534817-534880
  hypo

SEQ ID NO: 46176 - DNA, 31 bp, Homo sapiens; identical to SEQ ID NO: 14291
  chr7:545345-545376
  hypo

SEQ ID NO: 46177 - DNA, 31 bp, Homo sapiens; identical to SEQ ID NO: 14292
  chr7:545390-545421
  hypo

SEQ ID NO: 46178 - DNA, 55 bp, Homo sapiens; identical to SEQ ID NO: 2857
  chr7:557848-557903
  hypo

SEQ ID NO: 46179 - DNA, 31 bp, Homo sapiens; identical to SEQ ID NO: 2858
  chr7:557943-557974
  hypo

SEQ ID NO: 46180 - DNA, 37 bp, Homo sapiens; identical to SEQ ID NO: 2860
  chr7:558726-558763
  hypo

SEQ ID NO: 46181 - DNA, 43 bp, Homo sapiens; identical to SEQ ID NO: 2861
  chr7:559053-559096
  hypo

SEQ ID NO: 46182 - DNA, 31 bp, Homo sapiens; identical to SEQ ID NO: 2862
  chr7:559250-559281
  hypo

SEQ ID NO: 46183 - DNA, 57 bp, Homo sapiens; identical to SEQ ID NO: 2863
  chr7:559287-559344
  hypo

SEQ ID NO: 46184 - DNA, 73 bp, Homo sapiens; identical to SEQ ID NO: 2864
  chr7:559418-559491
  hypo

SEQ ID NO: 46185 - DNA, 31 bp, Homo sapiens; identical to SEQ ID NO: 14301
  chr7:576730-576761
  hypo

SEQ ID NO: 46186 - DNA, 31 bp, Homo sapiens; identical to SEQ ID NO: 14302
  chr7:576773-576804
  hypo

SEQ ID NO: 46187 - DNA, 40 bp, Homo sapiens; identical to SEQ ID NO: 14303
  chr7:635125-635165
  hypo

SEQ ID NO: 46188 - DNA, 35 bp, Homo sapiens; identical to SEQ ID NO: 14304
  chr7:667313-667348
  hypo

SEQ ID NO: 46189 - DNA, 58 bp, Homo sapiens; identical to SEQ ID NO: 14305
  chr7:667362-667420
  hypo

SEQ ID NO: 46190 - DNA, 31 bp, Homo sapiens; identical to SEQ ID NO: 14306
  chr7:711711-711742
  hypo

SEQ ID NO: 46191 - DNA, 31 bp, Homo sapiens; identical to SEQ ID NO: 14307
  chr7:711750-711781
  hypo

SEQ ID NO: 46192 - DNA, 31 bp, Homo sapiens; identical to SEQ ID NO: 14308
  chr7:718852-718883
  hypo

SEQ ID NO: 46193 - DNA, 37 bp, Homo sapiens; identical to SEQ ID NO: 2865
  chr7:822391-822428
  hypo

SEQ ID NO: 46194 - DNA, 54 bp, Homo sapiens; identical to SEQ ID NO: 14315
  chr7:899730-899784
  hypo

SEQ ID NO: 46195 - DNA, 31 bp, Homo sapiens; identical to SEQ ID NO: 14316
  chr7:900163-900194
  hypo

SEQ ID NO: 46196 - DNA, 55 bp, Homo sapiens; identical to SEQ ID NO: 14317
  chr7:925699-925754
  hypo

SEQ ID NO: 46197 - DNA, 31 bp, Homo sapiens; identical to SEQ ID NO: 2866
  chr7:932818-932849
  hypo

SEQ ID NO: 46198 - DNA, 37 bp, Homo sapiens; identical to SEQ ID NO: 2867
  chr7:932916-932953
  hypo

SEQ ID NO: 46199 - DNA, 57 bp, Homo sapiens; identical to SEQ ID NO: 2868
  chr7:932991-933048
  hypo

SEQ ID NO: 46200 - DNA, 2 bp, Homo sapiens
  chr7:959575-959577
  hypo
ga

SEQ ID NO: 46201 - DNA, 62 bp, Homo sapiens; identical to SEQ ID NO: 2869
  chr7:1007912-1007974
  hypo

SEQ ID NO: 46202 - DNA, 65 bp, Homo sapiens; identical to SEQ ID NO: 2870
  chr7:1007997-1008062
  hypo

SEQ ID NO: 46203 - DNA, 46 bp, Homo sapiens; identical to SEQ ID NO: 14324
  chr7:1024994-1025040
  hypo

SEQ ID NO: 46204 - DNA, 30 bp, Homo sapiens; identical to SEQ ID NO: 14325
  chr7:1029386-1029416
  hypo

SEQ ID NO: 46205 - DNA, 31 bp, Homo sapiens; identical to SEQ ID NO: 14326
  chr7:1029419-1029450
  hypo

SEQ ID NO: 46206 - DNA, 90 bp, Homo sapiens
  chr7:1029911-1030001
  hypo
gcagtgtgacagtggcgcgtgtgctgggggtggtgtggtcggcagtgtgacagtggcgcgtgtgctgggggcggtgtggtcggcagtgtg

SEQ ID NO: 46207 - DNA, 46 bp, Homo sapiens; identical to SEQ ID NO: 14330
  chr7:1060058-1060104
  hypo

SEQ ID NO: 46208 - DNA, 31 bp, Homo sapiens; identical to SEQ ID NO: 14331
  chr7:1069636-1069667
  hypo

SEQ ID NO: 46209 - DNA, 31 bp, Homo sapiens; identical to SEQ ID NO: 2871
  chr7:1069676-1069707
  hypo

SEQ ID NO: 46210 - DNA, 61 bp, Homo sapiens; identical to SEQ ID NO: 14333
  chr7:1075881-1075942
  hypo

SEQ ID NO: 46211 - DNA, 37 bp, Homo sapiens; identical to SEQ ID NO: 2872
  chr7:1083967-1084004
  hypo

SEQ ID NO: 46212 - DNA, 71 bp, Homo sapiens; identical to SEQ ID NO: 2873
  chr7:1084018-1084089
  hypo

SEQ ID NO: 46213 - DNA, 47 bp, Homo sapiens; identical to SEQ ID NO: 2874
  chr7:1084187-1084234
  hypo

SEQ ID NO: 46214 - DNA, 2 bp, Homo sapiens
  chr7:1086198-1086200
  hypo
ct

SEQ ID NO: 46215 - DNA, 25 bp, Homo sapiens
  chr7:1115698-1115723
  hypo
gattcacagtggagctcggaaagac

SEQ ID NO: 46216 - DNA, 43 bp, Homo sapiens; identical to SEQ ID NO: 14340
  chr7:1124307-1124350
  hypo

SEQ ID NO: 46217 - DNA, 119 bp, Homo sapiens; identical to SEQ ID NO: 14341
  chr7:1124367-1124486
  hypo

SEQ ID NO: 46218 - DNA, 31 bp, Homo sapiens; identical to SEQ ID NO: 14342
  chr7:1142682-1142713
  hypo

SEQ ID NO: 46219 - DNA, 40 bp, Homo sapiens; identical to SEQ ID NO: 14343
  chr7:1475089-1475129
  hypo

SEQ ID NO: 46220 - DNA, 31 bp, Homo sapiens; identical to SEQ ID NO: 14344
  chr7:1475297-1475328
  hypo

SEQ ID NO: 46221 - DNA, 31 bp, Homo sapiens; identical to SEQ ID NO: 14345
  chr7:1476257-1476288
  hypo

SEQ ID NO: 46222 - DNA, 93 bp, Homo sapiens; identical to SEQ ID NO: 14346
  chr7:1476389-1476482
  hypo

SEQ ID NO: 46223 - DNA, 164 bp, Homo sapiens; identical to SEQ ID NO: 14347
  chr7:1477243-1477407
  hypo

SEQ ID NO: 46224 - DNA, 39 bp, Homo sapiens; identical to SEQ ID NO: 14348
  chr7:1477847-1477886
  hypo

SEQ ID NO: 46225 - DNA, 31 bp, Homo sapiens; identical to SEQ ID NO: 14349
  chr7:1478022-1478053
  hypo

SEQ ID NO: 46226 - DNA, 66 bp, Homo sapiens; identical to SEQ ID NO: 14350
  chr7:1478558-1478624
  hypo

SEQ ID NO: 46227 - DNA, 44 bp, Homo sapiens; identical to SEQ ID NO: 14351
  chr7:1479426-1479470
  hypo

SEQ ID NO: 46228 - DNA, 31 bp, Homo sapiens; identical to SEQ ID NO: 14352
  chr7:1480105-1480136
  hypo

SEQ ID NO: 46229 - DNA, 31 bp, Homo sapiens; identical to SEQ ID NO: 14353
  chr7:1483466-1483497
  hypo

SEQ ID NO: 46230 - DNA, 31 bp, Homo sapiens; identical to SEQ ID NO: 14354
  chr7:1484816-1484847
  hypo

SEQ ID NO: 46231 - DNA, 38 bp, Homo sapiens; identical to SEQ ID NO: 2876
  chr7:1498584-1498622
  hypo

SEQ ID NO: 46232 - DNA, 269 bp, Homo sapiens; identical to SEQ ID NO: 2877
  chr7:1498624-1498893
  hypo

SEQ ID NO: 46233 - DNA, 329 bp, Homo sapiens; identical to SEQ ID NO: 2878
  chr7:1498940-1499269
  hypo

SEQ ID NO: 46234 - DNA, 31 bp, Homo sapiens; identical to SEQ ID NO: 14359
  chr7:1514387-1514418
  hypo

SEQ ID NO: 46235 - DNA, 2 bp, Homo sapiens
  chr7:1532978-1532980
  hypo
gg

SEQ ID NO: 46236 - DNA, 69 bp, Homo sapiens; identical to SEQ ID NO: 14361
  chr7:1537960-1538029
  hypo

SEQ ID NO: 46237 - DNA, 31 bp, Homo sapiens; identical to SEQ ID NO: 14362
  chr7:1554244-1554275
  hypo

SEQ ID NO: 46238 - DNA, 36 bp, Homo sapiens; identical to SEQ ID NO: 14363
  chr7:1554277-1554313
  hypo

SEQ ID NO: 46239 - DNA, 31 bp, Homo sapiens; identical to SEQ ID NO: 14364
  chr7:1575821-1575852
  hypo

SEQ ID NO: 46240 - DNA, 58 bp, Homo sapiens; identical to SEQ ID NO: 14365
  chr7:1590460-1590518
  hypo

SEQ ID NO: 46241 - DNA, 31 bp, Homo sapiens; identical to SEQ ID NO: 14366
  chr7:1597683-1597714
  hypo

SEQ ID NO: 46242 - DNA, 31 bp, Homo sapiens; identical to SEQ ID NO: 14367
  chr7:1601633-1601664
  hypo

SEQ ID NO: 46243 - DNA, 2 bp, Homo sapiens
  chr7:1607230-1607232
  hypo
aa

SEQ ID NO: 46244 - DNA, 31 bp, Homo sapiens; identical to SEQ ID NO: 14376
  chr7:1642382-1642413
  hypo

SEQ ID NO: 46245 - DNA, 31 bp, Homo sapiens; identical to SEQ ID NO: 14378
  chr7:1794934-1794965
  hypo

SEQ ID NO: 46246 - DNA, 31 bp, Homo sapiens; identical to SEQ ID NO: 14379
  chr7:1855555-1855586
  hypo

SEQ ID NO: 46247 - DNA, 31 bp, Homo sapiens; identical to SEQ ID NO: 14380
  chr7:1855602-1855633
  hypo

SEQ ID NO: 46248 - DNA, 86 bp, Homo sapiens; identical to SEQ ID NO: 14381
  chr7:1855833-1855919
  hypo

SEQ ID NO: 46249 - DNA, 31 bp, Homo sapiens; identical to SEQ ID NO: 14382
  chr7:1867561-1867592
  hypo

SEQ ID NO: 46250 - DNA, 31 bp, Homo sapiens; identical to SEQ ID NO: 14383
  chr7:1906135-1906166
  hypo

SEQ ID NO: 46251 - DNA, 56 bp, Homo sapiens; identical to SEQ ID NO: 14384
  chr7:1906782-1906838
  hypo

SEQ ID NO: 46252 - DNA, 31 bp, Homo sapiens; identical to SEQ ID NO: 14385
  chr7:1924361-1924392
  hypo

SEQ ID NO: 46253 - DNA, 31 bp, Homo sapiens; identical to SEQ ID NO: 14386
  chr7:1932250-1932281
  hypo

SEQ ID NO: 46254 - DNA, 54 bp, Homo sapiens; identical to SEQ ID NO: 14388
  chr7:1995852-1995906
  hypo

SEQ ID NO: 46255 - DNA, 31 bp, Homo sapiens; identical to SEQ ID NO: 14389
  chr7:1995940-1995971
  hypo

SEQ ID NO: 46256 - DNA, 40 bp, Homo sapiens; identical to SEQ ID NO: 14390
  chr7:2041551-2041591
  hypo

SEQ ID NO: 46257 - DNA, 31 bp, Homo sapiens; identical to SEQ ID NO: 14391
  chr7:2051726-2051757
  hypo

SEQ ID NO: 46258 - DNA, 31 bp, Homo sapiens; identical to SEQ ID NO: 14392
  chr7:2053459-2053490
  hypo

SEQ ID NO: 46259 - DNA, 41 bp, Homo sapiens; identical to SEQ ID NO: 14393
  chr7:2053520-2053561
  hypo

SEQ ID NO: 46260 - DNA, 31 bp, Homo sapiens; identical to SEQ ID NO: 14394
  chr7:2069774-2069805
  hypo

SEQ ID NO: 46261 - DNA, 31 bp, Homo sapiens; identical to SEQ ID NO: 14395
  chr7:2138294-2138325
  hypo

SEQ ID NO: 46262 - DNA, 45 bp, Homo sapiens; identical to SEQ ID NO: 14396
  chr7:2138329-2138374
  hypo

SEQ ID NO: 46263 - DNA, 31 bp, Homo sapiens; identical to SEQ ID NO: 14397
  chr7:2172532-2172563
  hypo

SEQ ID NO: 46264 - DNA, 109 bp, Homo sapiens; identical to SEQ ID NO: 2880
  chr7:2195817-2195926
  hypo

SEQ ID NO: 46265 - DNA, 31 bp, Homo sapiens; identical to SEQ ID NO: 14399
  chr7:2197117-2197148
  hypo

SEQ ID NO: 46266 - DNA, 2 bp, Homo sapiens
  chr7:2197209-2197211
  hypo
ga

SEQ ID NO: 46267 - DNA, 31 bp, Homo sapiens; identical to SEQ ID NO: 14402
  chr7:2208344-2208375
  hypo

SEQ ID NO: 46268 - DNA, 28 bp, Homo sapiens
  chr7:2208844-2208872
  hypo
accttttaaagtccgcatgtagacagtg

SEQ ID NO: 46269 - DNA, 31 bp, Homo sapiens; identical to SEQ ID NO: 14404
  chr7:2208875-2208906
  hypo

SEQ ID NO: 46270 - DNA, 31 bp, Homo sapiens; identical to SEQ ID NO: 14405
  chr7:2212651-2212682
  hypo

SEQ ID NO: 46271 - DNA, 35 bp, Homo sapiens; identical to SEQ ID NO: 14408
  chr7:2233069-2233104
  hypo

SEQ ID NO: 46272 - DNA, 2 bp, Homo sapiens
  chr7:2233291-2233293
  hypo
tt

SEQ ID NO: 46273 - DNA, 31 bp, Homo sapiens; identical to SEQ ID NO: 14412
  chr7:2241773-2241804
  hypo

SEQ ID NO: 46274 - DNA, 31 bp, Homo sapiens; identical to SEQ ID NO: 14413
  chr7:2255762-2255793
  hypo

SEQ ID NO: 46275 - DNA, 31 bp, Homo sapiens; identical to SEQ ID NO: 14414
  chr7:2255864-2255895
  hypo

SEQ ID NO: 46276 - DNA, 89 bp, Homo sapiens; identical to SEQ ID NO: 14415
  chr7:2255948-2256037
  hypo

SEQ ID NO: 46277 - DNA, 31 bp, Homo sapiens; identical to SEQ ID NO: 14416
  chr7:2256930-2256961
  hypo

SEQ ID NO: 46278 - DNA, 58 bp, Homo sapiens; identical to SEQ ID NO: 14417
  chr7:2256973-2257031
  hypo

SEQ ID NO: 46279 - DNA, 40 bp, Homo sapiens; identical to SEQ ID NO: 14419
  chr7:2265269-2265309
  hypo

SEQ ID NO: 46280 - DNA, 31 bp, Homo sapiens; identical to SEQ ID NO: 14420
  chr7:2265376-2265407
  hypo

SEQ ID NO: 46281 - DNA, 45 bp, Homo sapiens; identical to SEQ ID NO: 14421
  chr7:2293742-2293787
  hypo

SEQ ID NO: 46282 - DNA, 41 bp, Homo sapiens; identical to SEQ ID NO: 14422
  chr7:2293851-2293892
  hypo

SEQ ID NO: 46283 - DNA, 31 bp, Homo sapiens; identical to SEQ ID NO: 14423
  chr7:2293906-2293937
  hypo

SEQ ID NO: 46284 - DNA, 31 bp, Homo sapiens; identical to SEQ ID NO: 14425
  chr7:2324509-2324540
  hypo

SEQ ID NO: 46285 - DNA, 17 bp, Homo sapiens
  chr7:2420297-2420314
  hypo
tgccttgtacccccacc

SEQ ID NO: 46286 - DNA, 31 bp, Homo sapiens; identical to SEQ ID NO: 14428
  chr7:2477465-2477496
  hypo

SEQ ID NO: 46287 - DNA, 31 bp, Homo sapiens; identical to SEQ ID NO: 14429
  chr7:2539249-2539280
  hypo

SEQ ID NO: 46288 - DNA, 31 bp, Homo sapiens; identical to SEQ ID NO: 14430
  chr7:2540087-2540118
  hypo

SEQ ID NO: 46289 - DNA, 31 bp, Homo sapiens; identical to SEQ ID NO: 14431
  chr7:2546548-2546579
  hypo

SEQ ID NO: 46290 - DNA, 31 bp, Homo sapiens; identical to SEQ ID NO: 2886
  chr7:2555343-2555374
  hypo

SEQ ID NO: 46291 - DNA, 31 bp, Homo sapiens; identical to SEQ ID NO: 2887
  chr7:2555390-2555421
  hypo

SEQ ID NO: 46292 - DNA, 31 bp, Homo sapiens; identical to SEQ ID NO: 2888
  chr7:2671600-2671631
  hypo

SEQ ID NO: 46293 - DNA, 31 bp, Homo sapiens; identical to SEQ ID NO: 14436
  chr7:2674427-2674458
  hypo

SEQ ID NO: 46294 - DNA, 51 bp, Homo sapiens; identical to SEQ ID NO: 14437
  chr7:2680030-2680081
  hypo

SEQ ID NO: 46295 - DNA, 31 bp, Homo sapiens; identical to SEQ ID NO: 14438
  chr7:2683829-2683860
  hypo

SEQ ID NO: 46296 - DNA, 1 bp, Homo sapiens
  chr7:2686911-2686912
  hypo
a

SEQ ID NO: 46297 - DNA, 31 bp, Homo sapiens; identical to SEQ ID NO: 14441
  chr7:2690601-2690632
  hypo

SEQ ID NO: 46298 - DNA, 74 bp, Homo sapiens; identical to SEQ ID NO: 14442
  chr7:2690668-2690742
  hypo

SEQ ID NO: 46299 - DNA, 31 bp, Homo sapiens; identical to SEQ ID NO: 14443
  chr7:2691941-2691972
  hypo

SEQ ID NO: 46300 - DNA, 90 bp, Homo sapiens; identical to SEQ ID NO: 14444
  chr7:2692036-2692126
  hypo

SEQ ID NO: 46301 - DNA, 56 bp, Homo sapiens; identical to SEQ ID NO: 14445
  chr7:2695697-2695753
  hypo

SEQ ID NO: 46302 - DNA, 31 bp, Homo sapiens; identical to SEQ ID NO: 14446
  chr7:2697945-2697976
  hypo

SEQ ID NO: 46303 - DNA, 170 bp, Homo sapiens; identical to SEQ ID NO: 14447
  chr7:2698047-2698217
  hypo

SEQ ID NO: 46304 - DNA, 52 bp, Homo sapiens; identical to SEQ ID NO: 14448
  chr7:2698473-2698525
  hypo

SEQ ID NO: 46305 - DNA, 90 bp, Homo sapiens; identical to SEQ ID NO: 14449
  chr7:2698566-2698656
  hypo

SEQ ID NO: 46306 - DNA, 43 bp, Homo sapiens; identical to SEQ ID NO: 14450
  chr7:2699683-2699726
  hypo

SEQ ID NO: 46307 - DNA, 35 bp, Homo sapiens; identical to SEQ ID NO: 14451
  chr7:2705239-2705274
  hypo

SEQ ID NO: 46308 - DNA, 31 bp, Homo sapiens; identical to SEQ ID NO: 2889
  chr7:2728271-2728302
  hypo

SEQ ID NO: 46309 - DNA, 36 bp, Homo sapiens; identical to SEQ ID NO: 14453
  chr7:2740394-2740430
  hypo

SEQ ID NO: 46310 - DNA, 53 bp, Homo sapiens; identical to SEQ ID NO: 14454
  chr7:2752092-2752145
  hypo

SEQ ID NO: 46311 - DNA, 31 bp, Homo sapiens; identical to SEQ ID NO: 14455
  chr7:2764249-2764280
  hypo

SEQ ID NO: 46312 - DNA, 31 bp, Homo sapiens; identical to SEQ ID NO: 14456
  chr7:2797033-2797064
  hypo

SEQ ID NO: 46313 - DNA, 2 bp, Homo sapiens
  chr7:2864021-2864023
  hypo
gg

SEQ ID NO: 46314 - DNA, 15 bp, Homo sapiens
  chr7:2972384-2972399
  hypo
tctcccgcggccggg

SEQ ID NO: 46315 - DNA, 46 bp, Homo sapiens; identical to SEQ ID NO: 14459
  chr7:3033383-3033429
  hypo

SEQ ID NO: 46316 - DNA, 31 bp, Homo sapiens; identical to SEQ ID NO: 14460
  chr7:3033434-3033465
  hypo

SEQ ID NO: 46317 - DNA, 2 bp, Homo sapiens
  chr7:3033476-3033478
  hypo
tg

SEQ ID NO: 46318 - DNA, 37 bp, Homo sapiens; identical to SEQ ID NO: 2894
  chr7:3083609-3083646
  hypo

SEQ ID NO: 46319 - DNA, 31 bp, Homo sapiens; identical to SEQ ID NO: 14468
  chr7:3239134-3239165
  hypo

SEQ ID NO: 46320 - DNA, 31 bp, Homo sapiens; identical to SEQ ID NO: 14469
  chr7:3949423-3949454
  hypo

SEQ ID NO: 46321 - DNA, 31 bp, Homo sapiens; identical to SEQ ID NO: 14470
  chr7:4015316-4015347
  hypo

SEQ ID NO: 46322 - DNA, 31 bp, Homo sapiens; identical to SEQ ID NO: 14471
  chr7:4027689-4027720
  hypo

SEQ ID NO: 46323 - DNA, 51 bp, Homo sapiens; identical to SEQ ID NO: 2895
  chr7:4770078-4770129
  hypo

SEQ ID NO: 46324 - DNA, 31 bp, Homo sapiens; identical to SEQ ID NO: 14473
  chr7:4801992-4802023
  hypo

SEQ ID NO: 46325 - DNA, 31 bp, Homo sapiens; identical to SEQ ID NO: 14474
  chr7:4802124-4802155
  hypo

SEQ ID NO: 46326 - DNA, 31 bp, Homo sapiens; identical to SEQ ID NO: 14476
  chr7:4813890-4813921
  hypo

SEQ ID NO: 46327 - DNA, 31 bp, Homo sapiens; identical to SEQ ID NO: 14477
  chr7:4825297-4825328
  hypo

SEQ ID NO: 46328 - DNA, 31 bp, Homo sapiens; identical to SEQ ID NO: 14479
  chr7:5272773-5272804
  hypo

SEQ ID NO: 46329 - DNA, 45 bp, Homo sapiens; identical to SEQ ID NO: 14480
  chr7:5272829-5272874
  hypo

SEQ ID NO: 46330 - DNA, 132 bp, Homo sapiens; identical to SEQ ID NO: 14481
  chr7:5272883-5273015
  hypo

SEQ ID NO: 46331 - DNA, 46 bp, Homo sapiens; identical to SEQ ID NO: 14482
  chr7:5273026-5273072
  hypo

SEQ ID NO: 46332 - DNA, 67 bp, Homo sapiens; identical to SEQ ID NO: 14483
  chr7:5273104-5273171
  hypo

SEQ ID NO: 46333 - DNA, 31 bp, Homo sapiens; identical to SEQ ID NO: 14484
  chr7:5331444-5331475
  hypo

SEQ ID NO: 46334 - DNA, 2 bp, Homo sapiens
  chr7:5342788-5342790
  hypo
cc

SEQ ID NO: 46335 - DNA, 42 bp, Homo sapiens; identical to SEQ ID NO: 14487
  chr7:5384804-5384846
  hypo

SEQ ID NO: 46336 - DNA, 31 bp, Homo sapiens; identical to SEQ ID NO: 14488
  chr7:5384892-5384923
  hypo

SEQ ID NO: 46337 - DNA, 109 bp, Homo sapiens; identical to SEQ ID NO: 14490
  chr7:5446784-5446893
  hypo

SEQ ID NO: 46338 - DNA, 31 bp, Homo sapiens; identical to SEQ ID NO: 14491
  chr7:5446941-5446972
  hypo

SEQ ID NO: 46339 - DNA, 31 bp, Homo sapiens; identical to SEQ ID NO: 14492
  chr7:5449225-5449256
  hypo

SEQ ID NO: 46340 - DNA, 36 bp, Homo sapiens; identical to SEQ ID NO: 14493
  chr7:5453844-5453880
  hypo

SEQ ID NO: 46341 - DNA, 31 bp, Homo sapiens; identical to SEQ ID NO: 14494
  chr7:5453896-5453927
  hypo

SEQ ID NO: 46342 - DNA, 31 bp, Homo sapiens; identical to SEQ ID NO: 14495
  chr7:5453974-5454005
  hypo

SEQ ID NO: 46343 - DNA, 74 bp, Homo sapiens; identical to SEQ ID NO: 2900
  chr7:5462237-5462311
  hypo

SEQ ID NO: 46344 - DNA, 31 bp, Homo sapiens; identical to SEQ ID NO: 14498
  chr7:5473942-5473973
  hypo

SEQ ID NO: 46345 - DNA, 31 bp, Homo sapiens; identical to SEQ ID NO: 14499
  chr7:5480613-5480644
  hypo

SEQ ID NO: 46346 - DNA, 48 bp, Homo sapiens; identical to SEQ ID NO: 14500
  chr7:5491668-5491716
  hypo

SEQ ID NO: 46347 - DNA, 31 bp, Homo sapiens; identical to SEQ ID NO: 14501
  chr7:5491721-5491752
  hypo

SEQ ID NO: 46348 - DNA, 62 bp, Homo sapiens; identical to SEQ ID NO: 14502
  chr7:5491797-5491859
  hypo

SEQ ID NO: 46349 - DNA, 71 bp, Homo sapiens; identical to SEQ ID NO: 2913
  chr7:5594637-5594708
  hypo

SEQ ID NO: 46350 - DNA, 35 bp, Homo sapiens; identical to SEQ ID NO: 2914
  chr7:5594774-5594809
  hypo

SEQ ID NO: 46351 - DNA, 45 bp, Homo sapiens; identical to SEQ ID NO: 2915
  chr7:5594849-5594894
  hypo

SEQ ID NO: 46352 - DNA, 2 bp, Homo sapiens
  chr7:5647837-5647839
  hypo
aa

SEQ ID NO: 46353 - DNA, 52 bp, Homo sapiens; identical to SEQ ID NO: 14515
  chr7:5920561-5920613
  hypo

SEQ ID NO: 46354 - DNA, 31 bp, Homo sapiens; identical to SEQ ID NO: 14516
  chr7:5920618-5920649
  hypo

SEQ ID NO: 46355 - DNA, 31 bp, Homo sapiens; identical to SEQ ID NO: 14518
  chr7:6034994-6035025
  hypo

SEQ ID NO: 46356 - DNA, 40 bp, Homo sapiens; identical to SEQ ID NO: 14519
  chr7:6035054-6035094
  hypo

SEQ ID NO: 46357 - DNA, 31 bp, Homo sapiens; identical to SEQ ID NO: 14520
  chr7:6058646-6058677
  hypo

SEQ ID NO: 46358 - DNA, 31 bp, Homo sapiens; identical to SEQ ID NO: 14522
  chr7:6059668-6059699
  hypo

SEQ ID NO: 46359 - DNA, 2 bp, Homo sapiens
  chr7:6060715-6060717
  hypo
gg

SEQ ID NO: 46360 - DNA, 31 bp, Homo sapiens; identical to SEQ ID NO: 14528
  chr7:6217462-6217493
  hypo

SEQ ID NO: 46361 - DNA, 31 bp, Homo sapiens; identical to SEQ ID NO: 14529
  chr7:6229695-6229726
  hypo

SEQ ID NO: 46362 - DNA, 31 bp, Homo sapiens; identical to SEQ ID NO: 14530
  chr7:6260173-6260204
  hypo

SEQ ID NO: 46363 - DNA, 2 bp, Homo sapiens
  chr7:6438068-6438070
  hypo
cc

SEQ ID NO: 46364 - DNA, 21 bp, Homo sapiens
  chr7:6438111-6438132
  hypo
aggtagcgtggagtgtttcag

SEQ ID NO: 46365 - DNA, 2 bp, Homo sapiens
  chr7:6443278-6443280
  hypo
tg

SEQ ID NO: 46366 - DNA, 2 bp, Homo sapiens
  chr7:6443688-6443690
  hypo
ac

SEQ ID NO: 46367 - DNA, 31 bp, Homo sapiens; identical to SEQ ID NO: 14536
  chr7:6443752-6443783
  hypo

SEQ ID NO: 46368 - DNA, 38 bp, Homo sapiens
  chr7:6443789-6443827
  hypo
tcatgtttggacctgtcgaacagtggcgaagctctgag

SEQ ID NO: 46369 - DNA, 2 bp, Homo sapiens
  chr7:6524572-6524574
  hypo
ta

SEQ ID NO: 46370 - DNA, 1 bp, Homo sapiens
  chr7:6524611-6524612
  hypo
a

SEQ ID NO: 46371 - DNA, 1 bp, Homo sapiens
  chr7:6524911-6524912
  hypo
t

SEQ ID NO: 46372 - DNA, 1 bp, Homo sapiens
  chr7:6525091-6525092
  hypo
t

SEQ ID NO: 46373 - DNA, 22 bp, Homo sapiens
  chr7:6560401-6560423
  hypo
ccacaggcgggagaggcatgag

SEQ ID NO: 46374 - DNA, 31 bp, Homo sapiens; identical to SEQ ID NO: 14543
  chr7:6641614-6641645
  hypo

SEQ ID NO: 46375 - DNA, 31 bp, Homo sapiens; identical to SEQ ID NO: 14545
  chr7:6644209-6644240
  hypo

SEQ ID NO: 46376 - DNA, 31 bp, Homo sapiens; identical to SEQ ID NO: 14546
  chr7:6644253-6644284
  hypo

SEQ ID NO: 46377 - DNA, 31 bp, Homo sapiens; identical to SEQ ID NO: 14547
  chr7:6644365-6644396
  hypo

SEQ ID NO: 46378 - DNA, 31 bp, Homo sapiens; identical to SEQ ID NO: 14548
  chr7:6644398-6644429
  hypo

SEQ ID NO: 46379 - DNA, 31 bp, Homo sapiens; identical to SEQ ID NO: 14549
  chr7:6644438-6644469
  hypo

SEQ ID NO: 46380 - DNA, 31 bp, Homo sapiens; identical to SEQ ID NO: 14550
  chr7:6644476-6644507
  hypo

SEQ ID NO: 46381 - DNA, 31 bp, Homo sapiens; identical to SEQ ID NO: 14551
  chr7:6644511-6644542
  hypo

SEQ ID NO: 46382 - DNA, 31 bp, Homo sapiens; identical to SEQ ID NO: 14552
  chr7:6645604-6645635
  hypo

SEQ ID NO: 46383 - DNA, 31 bp, Homo sapiens; identical to SEQ ID NO: 14553
  chr7:6645647-6645678
  hypo

SEQ ID NO: 46384 - DNA, 31 bp, Homo sapiens; identical to SEQ ID NO: 14554
  chr7:6645693-6645724
  hypo

SEQ ID NO: 46385 - DNA, 31 bp, Homo sapiens; identical to SEQ ID NO: 14555
  chr7:6645729-6645760
  hypo

SEQ ID NO: 46386 - DNA, 31 bp, Homo sapiens; identical to SEQ ID NO: 14556
  chr7:6645775-6645806
  hypo

SEQ ID NO: 46387 - DNA, 53 bp, Homo sapiens; identical to SEQ ID NO: 14557
  chr7:6646145-6646198
  hypo

SEQ ID NO: 46388 - DNA, 39 bp, Homo sapiens; identical to SEQ ID NO: 14558
  chr7:6647385-6647424
  hypo

SEQ ID NO: 46389 - DNA, 425 bp, Homo sapiens; identical to SEQ ID NO: 14559
  chr7:6647427-6647852
  hypo

SEQ ID NO: 46390 - DNA, 71 bp, Homo sapiens; identical to SEQ ID NO: 14560
  chr7:6647872-6647943
  hypo

SEQ ID NO: 46391 - DNA, 31 bp, Homo sapiens; identical to SEQ ID NO: 14561
  chr7:6648200-6648231
  hypo

SEQ ID NO: 46392 - DNA, 31 bp, Homo sapiens; identical to SEQ ID NO: 14562
  chr7:6648395-6648426
  hypo

SEQ ID NO: 46393 - DNA, 68 bp, Homo sapiens; identical to SEQ ID NO: 2918
  chr7:6966987-6967055
  hypo

SEQ ID NO: 46394 - DNA, 3 bp, Homo sapiens
  chr7:7605424-7605427
  hypo
ctc

SEQ ID NO: 46395 - DNA, 31 bp, Homo sapiens; identical to SEQ ID NO: 14571
  chr7:7621496-7621527
  hypo

SEQ ID NO: 46396 - DNA, 31 bp, Homo sapiens; identical to SEQ ID NO: 14572
  chr7:7752548-7752579
  hypo

SEQ ID NO: 46397 - DNA, 31 bp, Homo sapiens; identical to SEQ ID NO: 14574
  chr7:12740190-12740221
  hypo

SEQ ID NO: 46398 - DNA, 33 bp, Homo sapiens; identical to SEQ ID NO: 14575
  chr7:12763982-12764015
  hypo

SEQ ID NO: 46399 - DNA, 45 bp, Homo sapiens; identical to SEQ ID NO: 14577
  chr7:12795791-12795836
  hypo

SEQ ID NO: 46400 - DNA, 31 bp, Homo sapiens; identical to SEQ ID NO: 14578
  chr7:12802525-12802556
  hypo

SEQ ID NO: 46401 - DNA, 79 bp, Homo sapiens; identical to SEQ ID NO: 14579
  chr7:16436344-16436423
  hypo

SEQ ID NO: 46402 - DNA, 38 bp, Homo sapiens; identical to SEQ ID NO: 14580
  chr7:16436438-16436476
  hypo

SEQ ID NO: 46403 - DNA, 31 bp, Homo sapiens; identical to SEQ ID NO: 14581
  chr7:16440254-16440285
  hypo

SEQ ID NO: 46404 - DNA, 31 bp, Homo sapiens; identical to SEQ ID NO: 14582
  chr7:16542229-16542260
  hypo

SEQ ID NO: 46405 - DNA, 31 bp, Homo sapiens; identical to SEQ ID NO: 14583
  chr7:17324454-17324485
  hypo

SEQ ID NO: 46406 - DNA, 94 bp, Homo sapiens; identical to SEQ ID NO: 2936
  chr7:17338150-17338244
  hypo

SEQ ID NO: 46407 - DNA, 136 bp, Homo sapiens; identical to SEQ ID NO: 2937
  chr7:17338602-17338738
  hypo

SEQ ID NO: 46408 - DNA, 31 bp, Homo sapiens; identical to SEQ ID NO: 2938
  chr7:17339051-17339082
  hypo

SEQ ID NO: 46409 - DNA, 31 bp, Homo sapiens; identical to SEQ ID NO: 14587
  chr7:17705052-17705083
  hypo

SEQ ID NO: 46410 - DNA, 34 bp, Homo sapiens; identical to SEQ ID NO: 14588
  chr7:18041862-18041896
  hypo

SEQ ID NO: 46411 - DNA, 70 bp, Homo sapiens; identical to SEQ ID NO: 2939
  chr7:20837556-20837626
  hypo

SEQ ID NO: 46412 - DNA, 101 bp, Homo sapiens; identical to SEQ ID NO: 2940
  chr7:20837650-20837751
  hypo

SEQ ID NO: 46413 - DNA, 31 bp, Homo sapiens; identical to SEQ ID NO: 2941
  chr7:20837801-20837832
  hypo

SEQ ID NO: 46414 - DNA, 31 bp, Homo sapiens; identical to SEQ ID NO: 14592
  chr7:20852609-20852640
  hypo

SEQ ID NO: 46415 - DNA, 38 bp, Homo sapiens; identical to SEQ ID NO: 14593
  chr7:21409420-21409458
  hypo

SEQ ID NO: 46416 - DNA, 31 bp, Homo sapiens; identical to SEQ ID NO: 2943
  chr7:22396516-22396547
  hypo

SEQ ID NO: 46417 - DNA, 31 bp, Homo sapiens; identical to SEQ ID NO: 2944
  chr7:22894198-22894229
  hypo

SEQ ID NO: 46418 - DNA, 57 bp, Homo sapiens; identical to SEQ ID NO: 2945
  chr7:22894264-22894321
  hypo

SEQ ID NO: 46419 - DNA, 95 bp, Homo sapiens; identical to SEQ ID NO: 37071
  chr7:23052933-23053028
  hypo

SEQ ID NO: 46420 - DNA, 13 bp, Homo sapiens
  chr7:23053080-23053093
  hypo
gagtgggagagga

SEQ ID NO: 46421 - DNA, 210 bp, Homo sapiens; identical to SEQ ID NO: 2947
  chr7:23053095-23053305
  hypo

SEQ ID NO: 46422 - DNA, 31 bp, Homo sapiens; identical to SEQ ID NO: 2948
  chr7:23053448-23053479
  hypo

SEQ ID NO: 46423 - DNA, 72 bp, Homo sapiens; identical to SEQ ID NO: 2949
  chr7:23053720-23053792
  hypo

SEQ ID NO: 46424 - DNA, 81 bp, Homo sapiens; identical to SEQ ID NO: 2951
  chr7:23053957-23054038
  hypo

SEQ ID NO: 46425 - DNA, 31 bp, Homo sapiens; identical to SEQ ID NO: 2952
  chr7:23054048-23054079
  hypo

SEQ ID NO: 46426 - DNA, 2 bp, Homo sapiens
  chr7:23749705-23749707
  hypo
gg

SEQ ID NO: 46427 - DNA, 18 bp, Homo sapiens
  chr7:25100241-25100259
  hypo
cttaactgtcactcaccg

SEQ ID NO: 46428 - DNA, 31 bp, Homo sapiens; identical to SEQ ID NO: 14619
  chr7:25158786-25158817
  hypo

SEQ ID NO: 46429 - DNA, 31 bp, Homo sapiens; identical to SEQ ID NO: 14620
  chr7:25158834-25158865
  hypo

SEQ ID NO: 46430 - DNA, 31 bp, Homo sapiens; identical to SEQ ID NO: 14621
  chr7:25936760-25936791
  hypo

SEQ ID NO: 46431 - DNA, 32 bp, Homo sapiens; identical to SEQ ID NO: 14622
  chr7:26217155-26217187
  hypo

SEQ ID NO: 46432 - DNA, 31 bp, Homo sapiens; identical to SEQ ID NO: 2982
  chr7:27136834-27136865
  hypo

SEQ ID NO: 46433 - DNA, 39 bp, Homo sapiens; identical to SEQ ID NO: 14638
  chr7:27514342-27514381
  hypo

SEQ ID NO: 46434 - DNA, 31 bp, Homo sapiens; identical to SEQ ID NO: 14639
  chr7:27831638-27831669
  hypo

SEQ ID NO: 46435 - DNA, 31 bp, Homo sapiens; identical to SEQ ID NO: 14640
  chr7:27831763-27831794
  hypo

SEQ ID NO: 46436 - DNA, 31 bp, Homo sapiens; identical to SEQ ID NO: 14641
  chr7:27882727-27882758
  hypo

SEQ ID NO: 46437 - DNA, 1 bp, Homo sapiens
  chr7:27903816-27903817
  hypo
c

SEQ ID NO: 46438 - DNA, 80 bp, Homo sapiens; identical to SEQ ID NO: 14643
  chr7:27984538-27984618
  hypo

SEQ ID NO: 46439 - DNA, 31 bp, Homo sapiens; identical to SEQ ID NO: 14644
  chr7:27984692-27984723
  hypo

SEQ ID NO: 46440 - DNA, 66 bp, Homo sapiens; identical to SEQ ID NO: 14645
  chr7:28012335-28012401
  hypo

SEQ ID NO: 46441 - DNA, 31 bp, Homo sapiens; identical to SEQ ID NO: 14646
  chr7:28012410-28012441
  hypo

SEQ ID NO: 46442 - DNA, 31 bp, Homo sapiens; identical to SEQ ID NO: 14647
  chr7:28811873-28811904
  hypo

SEQ ID NO: 46443 - DNA, 31 bp, Homo sapiens; identical to SEQ ID NO: 14648
  chr7:28811992-28812023
  hypo

SEQ ID NO: 46444 - DNA, 38 bp, Homo sapiens; identical to SEQ ID NO: 14649
  chr7:28812031-28812069
  hypo

SEQ ID NO: 46445 - DNA, 51 bp, Homo sapiens; identical to SEQ ID NO: 2988
  chr7:29234146-29234197
  hypo

SEQ ID NO: 46446 - DNA, 60 bp, Homo sapiens; identical to SEQ ID NO: 14651
  chr7:29362349-29362409
  hypo

SEQ ID NO: 46447 - DNA, 31 bp, Homo sapiens; identical to SEQ ID NO: 14652
  chr7:29362430-29362461
  hypo

SEQ ID NO: 46448 - DNA, 31 bp, Homo sapiens; identical to SEQ ID NO: 14654
  chr7:29516192-29516223
  hypo

SEQ ID NO: 46449 - DNA, 31 bp, Homo sapiens; identical to SEQ ID NO: 2989
  chr7:29724331-29724362
  hypo

SEQ ID NO: 46450 - DNA, 115 bp, Homo sapiens; identical to SEQ ID NO: 2990
  chr7:29724384-29724499
  hypo

SEQ ID NO: 46451 - DNA, 120 bp, Homo sapiens; identical to SEQ ID NO: 2991
  chr7:29724581-29724701
  hypo

SEQ ID NO: 46452 - DNA, 55 bp, Homo sapiens; identical to SEQ ID NO: 2992
  chr7:29725076-29725131
  hypo

SEQ ID NO: 46453 - DNA, 40 bp, Homo sapiens; identical to SEQ ID NO: 2993
  chr7:30067984-30068024
  hypo

SEQ ID NO: 46454 - DNA, 31 bp, Homo sapiens; identical to SEQ ID NO: 14660
  chr7:30495017-30495048
  hypo

SEQ ID NO: 46455 - DNA, 31 bp, Homo sapiens; identical to SEQ ID NO: 14661
  chr7:30603330-30603361
  hypo

SEQ ID NO: 46456 - DNA, 24 bp, Homo sapiens
  chr7:30603368-30603392
  hypo
agatcaaagtgttggccgagccat

SEQ ID NO: 46457 - DNA, 31 bp, Homo sapiens; identical to SEQ ID NO: 14663
  chr7:30899815-30899846
  hypo

SEQ ID NO: 46458 - DNA, 31 bp, Homo sapiens; identical to SEQ ID NO: 14664
  chr7:30902137-30902168
  hypo

SEQ ID NO: 46459 - DNA, 41 bp, Homo sapiens; identical to SEQ ID NO: 14665
  chr7:30902192-30902233
  hypo

SEQ ID NO: 46460 - DNA, 51 bp, Homo sapiens; identical to SEQ ID NO: 14666
  chr7:30921726-30921777
  hypo

SEQ ID NO: 46461 - DNA, 40 bp, Homo sapiens; identical to SEQ ID NO: 14667
  chr7:30922907-30922947
  hypo

SEQ ID NO: 46462 - DNA, 56 bp, Homo sapiens; identical to SEQ ID NO: 14668
  chr7:30923025-30923081
  hypo

SEQ ID NO: 46463 - DNA, 31 bp, Homo sapiens; identical to SEQ ID NO: 14669
  chr7:30938647-30938678
  hypo

SEQ ID NO: 46464 - DNA, 31 bp, Homo sapiens; identical to SEQ ID NO: 14670
  chr7:30944105-30944136
  hypo

SEQ ID NO: 46465 - DNA, 82 bp, Homo sapiens; identical to SEQ ID NO: 14671
  chr7:30944163-30944245
  hypo

SEQ ID NO: 46466 - DNA, 31 bp, Homo sapiens; identical to SEQ ID NO: 14672
  chr7:30946538-30946569
  hypo

SEQ ID NO: 46467 - DNA, 35 bp, Homo sapiens; identical to SEQ ID NO: 14673
  chr7:32631008-32631043
  hypo

SEQ ID NO: 46468 - DNA, 31 bp, Homo sapiens; identical to SEQ ID NO: 14674
  chr7:32631090-32631121
  hypo

SEQ ID NO: 46469 - DNA, 31 bp, Homo sapiens; identical to SEQ ID NO: 14675
  chr7:32648439-32648470
  hypo

SEQ ID NO: 46470 - DNA, 109 bp, Homo sapiens; identical to SEQ ID NO: 2996
  chr7:32768219-32768328
  hypo

SEQ ID NO: 46471 - DNA, 46 bp, Homo sapiens; identical to SEQ ID NO: 2997
  chr7:32768342-32768388
  hypo

SEQ ID NO: 46472 - DNA, 31 bp, Homo sapiens; identical to SEQ ID NO: 14678
  chr7:32963858-32963889
  hypo

SEQ ID NO: 46473 - DNA, 60 bp, Homo sapiens; identical to SEQ ID NO: 2999
  chr7:32982309-32982369
  hypo

SEQ ID NO: 46474 - DNA, 107 bp, Homo sapiens; identical to SEQ ID NO: 3000
  chr7:32982429-32982536
  hypo

SEQ ID NO: 46475 - DNA, 93 bp, Homo sapiens; identical to SEQ ID NO: 3004
  chr7:32996716-32996809
  hypo

SEQ ID NO: 46476 - DNA, 83 bp, Homo sapiens; identical to SEQ ID NO: 3005
  chr7:32996812-32996895
  hypo

SEQ ID NO: 46477 - DNA, 90 bp, Homo sapiens; identical to SEQ ID NO: 37103
  chr7:32997454-32997544
  hypo

SEQ ID NO: 46478 - DNA, 31 bp, Homo sapiens; identical to SEQ ID NO: 14685
  chr7:33139662-33139693
  hypo

SEQ ID NO: 46479 - DNA, 31 bp, Homo sapiens; identical to SEQ ID NO: 14686
  chr7:34192957-34192988
  hypo

SEQ ID NO: 46480 - DNA, 42 bp, Homo sapiens; identical to SEQ ID NO: 14688
  chr7:35994750-35994792
  hypo

SEQ ID NO: 46481 - DNA, 31 bp, Homo sapiens; identical to SEQ ID NO: 14689
  chr7:36134136-36134167
  hypo

SEQ ID NO: 46482 - DNA, 31 bp, Homo sapiens; identical to SEQ ID NO: 14690
  chr7:36134177-36134208
  hypo

SEQ ID NO: 46483 - DNA, 31 bp, Homo sapiens; identical to SEQ ID NO: 14691
  chr7:36134218-36134249
  hypo

SEQ ID NO: 46484 - DNA, 31 bp, Homo sapiens; identical to SEQ ID NO: 3012
  chr7:36192381-36192412
  hypo

SEQ ID NO: 46485 - DNA, 67 bp, Homo sapiens; identical to SEQ ID NO: 3013
  chr7:36192422-36192489
  hypo

SEQ ID NO: 46486 - DNA, 85 bp, Homo sapiens; identical to SEQ ID NO: 3014
  chr7:36192637-36192722
  hypo

SEQ ID NO: 46487 - DNA, 411 bp, Homo sapiens; identical to SEQ ID NO: 3015
  chr7:36192725-36193136
  hypo

SEQ ID NO: 46488 - DNA, 132 bp, Homo sapiens; identical to SEQ ID NO: 3016
  chr7:36193160-36193292
  hypo

SEQ ID NO: 46489 - DNA, 2 bp, Homo sapiens
  chr7:36428639-36428641
  hypo
ag

SEQ ID NO: 46490 - DNA, 37 bp, Homo sapiens; identical to SEQ ID NO: 37111
  chr7:37487335-37487372
  hypo

SEQ ID NO: 46491 - DNA, 38 bp, Homo sapiens; identical to SEQ ID NO: 14714
  chr7:39942870-39942908
  hypo

SEQ ID NO: 46492 - DNA, 31 bp, Homo sapiens; identical to SEQ ID NO: 14716
  chr7:40243014-40243045
  hypo

SEQ ID NO: 46493 - DNA, 31 bp, Homo sapiens; identical to SEQ ID NO: 14717
  chr7:43827244-43827275
  hypo

SEQ ID NO: 46494 - DNA, 61 bp, Homo sapiens; identical to SEQ ID NO: 14718
  chr7:43827298-43827359
  hypo

SEQ ID NO: 46495 - DNA, 34 bp, Homo sapiens; identical to SEQ ID NO: 14719
  chr7:43827396-43827430
  hypo

SEQ ID NO: 46496 - DNA, 38 bp, Homo sapiens; identical to SEQ ID NO: 14722
  chr7:44301707-44301745
  hypo

SEQ ID NO: 46497 - DNA, 31 bp, Homo sapiens; identical to SEQ ID NO: 14723
  chr7:44302563-44302594
  hypo

SEQ ID NO: 46498 - DNA, 54 bp, Homo sapiens; identical to SEQ ID NO: 14724
  chr7:44311756-44311810
  hypo

SEQ ID NO: 46499 - DNA, 31 bp, Homo sapiens; identical to SEQ ID NO: 14725
  chr7:44311825-44311856
  hypo

SEQ ID NO: 46500 - DNA, 31 bp, Homo sapiens; identical to SEQ ID NO: 14726
  chr7:44582325-44582356
  hypo

SEQ ID NO: 46501 - DNA, 37 bp, Homo sapiens; identical to SEQ ID NO: 14727
  chr7:44612092-44612129
  hypo

SEQ ID NO: 46502 - DNA, 2 bp, Homo sapiens
  chr7:44801184-44801186
  hypo
at

SEQ ID NO: 46503 - DNA, 24 bp, Homo sapiens
  chr7:44801215-44801239
  hypo
tgacccccacgaggctctgttcct

SEQ ID NO: 46504 - DNA, 31 bp, Homo sapiens; identical to SEQ ID NO: 14729
  chr7:44801243-44801274
  hypo

SEQ ID NO: 46505 - DNA, 66 bp, Homo sapiens; identical to SEQ ID NO: 14730
  chr7:44801313-44801379
  hypo

SEQ ID NO: 46506 - DNA, 5 bp, Homo sapiens
  chr7:44835103-44835108
  hypo
tccgg

SEQ ID NO: 46507 - DNA, 31 bp, Homo sapiens; identical to SEQ ID NO: 14732
  chr7:44835407-44835438
  hypo

SEQ ID NO: 46508 - DNA, 31 bp, Homo sapiens; identical to SEQ ID NO: 14734
  chr7:45015221-45015252
  hypo

SEQ ID NO: 46509 - DNA, 62 bp, Homo sapiens; identical to SEQ ID NO: 14736
  chr7:45743035-45743097
  hypo

SEQ ID NO: 46510 - DNA, 96 bp, Homo sapiens; identical to SEQ ID NO: 3033
  chr7:47294095-47294191
  hypo

SEQ ID NO: 46511 - DNA, 19 bp, Homo sapiens
  chr7:47449176-47449195
  hypo
ggcaggtagaacactacgc

SEQ ID NO: 46512 - DNA, 31 bp, Homo sapiens; identical to SEQ ID NO: 14742
  chr7:47515266-47515297
  hypo

SEQ ID NO: 46513 - DNA, 68 bp, Homo sapiens; identical to SEQ ID NO: 3034
  chr7:47621698-47621766
  hypo

SEQ ID NO: 46514 - DNA, 31 bp, Homo sapiens; identical to SEQ ID NO: 14744
  chr7:47711088-47711119
  hypo

SEQ ID NO: 46515 - DNA, 31 bp, Homo sapiens; identical to SEQ ID NO: 14745
  chr7:47711120-47711151
  hypo

SEQ ID NO: 46516 - DNA, 134 bp, Homo sapiens; identical to SEQ ID NO: 3035
  chr7:48128031-48128165
  hypo

SEQ ID NO: 46517 - DNA, 31 bp, Homo sapiens; identical to SEQ ID NO: 3036
  chr7:48128168-48128199
  hypo

SEQ ID NO: 46518 - DNA, 2 bp, Homo sapiens
  chr7:50231282-50231284
  hypo
ta

SEQ ID NO: 46519 - DNA, 31 bp, Homo sapiens; identical to SEQ ID NO: 14749
  chr7:50251706-50251737
  hypo

SEQ ID NO: 46520 - DNA, 14 bp, Homo sapiens
  chr7:50343195-50343209
  hypo
acttttcccacccc

SEQ ID NO: 46521 - DNA, 2 bp, Homo sapiens
  chr7:50365026-50365028
  hypo
at

SEQ ID NO: 46522 - DNA, 2 bp, Homo sapiens
  chr7:50365075-50365077
  hypo
tt

SEQ ID NO: 46523 - DNA, 5 bp, Homo sapiens
  chr7:50365107-50365112
  hypo
tgcct

SEQ ID NO: 46524 - DNA, 1 bp, Homo sapiens
  chr7:50441145-50441146
  hypo
t

SEQ ID NO: 46525 - DNA, 49 bp, Homo sapiens; identical to SEQ ID NO: 14761
  chr7:50450339-50450388
  hypo

SEQ ID NO: 46526 - DNA, 44 bp, Homo sapiens; identical to SEQ ID NO: 14762
  chr7:50537913-50537957
  hypo

SEQ ID NO: 46527 - DNA, 31 bp, Homo sapiens; identical to SEQ ID NO: 14763
  chr7:50655023-50655054
  hypo

SEQ ID NO: 46528 - DNA, 31 bp, Homo sapiens; identical to SEQ ID NO: 14764
  chr7:50708877-50708908
  hypo

SEQ ID NO: 46529 - DNA, 55 bp, Homo sapiens; identical to SEQ ID NO: 14765
  chr7:50715973-50716028
  hypo

SEQ ID NO: 46530 - DNA, 31 bp, Homo sapiens; identical to SEQ ID NO: 14766
  chr7:50823199-50823230
  hypo

SEQ ID NO: 46531 - DNA, 31 bp, Homo sapiens; identical to SEQ ID NO: 14767
  chr7:50853191-50853222
  hypo

SEQ ID NO: 46532 - DNA, 31 bp, Homo sapiens; identical to SEQ ID NO: 14768
  chr7:50853259-50853290
  hypo

SEQ ID NO: 46533 - DNA, 41 bp, Homo sapiens; identical to SEQ ID NO: 14769
  chr7:50853323-50853364
  hypo

SEQ ID NO: 46534 - DNA, 31 bp, Homo sapiens; identical to SEQ ID NO: 14770
  chr7:51082824-51082855
  hypo

SEQ ID NO: 46535 - DNA, 31 bp, Homo sapiens; identical to SEQ ID NO: 14771
  chr7:51083467-51083498
  hypo

SEQ ID NO: 46536 - DNA, 31 bp, Homo sapiens; identical to SEQ ID NO: 14772
  chr7:51087890-51087921
  hypo

SEQ ID NO: 46537 - DNA, 31 bp, Homo sapiens; identical to SEQ ID NO: 14773
  chr7:51088280-51088311
  hypo

SEQ ID NO: 46538 - DNA, 34 bp, Homo sapiens; identical to SEQ ID NO: 14774
  chr7:51092656-51092690
  hypo

SEQ ID NO: 46539 - DNA, 31 bp, Homo sapiens; identical to SEQ ID NO: 14775
  chr7:51092717-51092748
  hypo

SEQ ID NO: 46540 - DNA, 49 bp, Homo sapiens; identical to SEQ ID NO: 14776
  chr7:51092873-51092922
  hypo

SEQ ID NO: 46541 - DNA, 31 bp, Homo sapiens; identical to SEQ ID NO: 14777
  chr7:51092987-51093018
  hypo

SEQ ID NO: 46542 - DNA, 38 bp, Homo sapiens; identical to SEQ ID NO: 14778
  chr7:51098964-51099002
  hypo

SEQ ID NO: 46543 - DNA, 31 bp, Homo sapiens; identical to SEQ ID NO: 14779
  chr7:51099004-51099035
  hypo

SEQ ID NO: 46544 - DNA, 31 bp, Homo sapiens; identical to SEQ ID NO: 14780
  chr7:51099075-51099106
  hypo

SEQ ID NO: 46545 - DNA, 31 bp, Homo sapiens; identical to SEQ ID NO: 14781
  chr7:51099118-51099149
  hypo

SEQ ID NO: 46546 - DNA, 41 bp, Homo sapiens; identical to SEQ ID NO: 14782
  chr7:51111295-51111336
  hypo

SEQ ID NO: 46547 - DNA, 52 bp, Homo sapiens; identical to SEQ ID NO: 14783
  chr7:51126557-51126609
  hypo

SEQ ID NO: 46548 - DNA, 61 bp, Homo sapiens; identical to SEQ ID NO: 14784
  chr7:51126610-51126671
  hypo

SEQ ID NO: 46549 - DNA, 31 bp, Homo sapiens; identical to SEQ ID NO: 14785
  chr7:51126694-51126725
  hypo

SEQ ID NO: 46550 - DNA, 31 bp, Homo sapiens; identical to SEQ ID NO: 14786
  chr7:51150748-51150779
  hypo

SEQ ID NO: 46551 - DNA, 31 bp, Homo sapiens; identical to SEQ ID NO: 14787
  chr7:51194780-51194811
  hypo

SEQ ID NO: 46552 - DNA, 43 bp, Homo sapiens; identical to SEQ ID NO: 14788
  chr7:51374680-51374723
  hypo

SEQ ID NO: 46553 - DNA, 31 bp, Homo sapiens; identical to SEQ ID NO: 14789
  chr7:53104021-53104052
  hypo

SEQ ID NO: 46554 - DNA, 38 bp, Homo sapiens; identical to SEQ ID NO: 14790
  chr7:55323528-55323566
  hypo

SEQ ID NO: 46555 - DNA, 40 bp, Homo sapiens; identical to SEQ ID NO: 3052
  chr7:55593335-55593375
  hypo

SEQ ID NO: 46556 - DNA, 31 bp, Homo sapiens; identical to SEQ ID NO: 3053
  chr7:55593380-55593411
  hypo

SEQ ID NO: 46557 - DNA, 31 bp, Homo sapiens; identical to SEQ ID NO: 3054
  chr7:55593420-55593451
  hypo

SEQ ID NO: 46558 - DNA, 60 bp, Homo sapiens; identical to SEQ ID NO: 14795
  chr7:55923020-55923080
  hypo

SEQ ID NO: 46559 - DNA, 31 bp, Homo sapiens; identical to SEQ ID NO: 14796
  chr7:55923116-55923147
  hypo

SEQ ID NO: 46560 - DNA, 31 bp, Homo sapiens; identical to SEQ ID NO: 14797
  chr7:55960567-55960598
  hypo

SEQ ID NO: 46561 - DNA, 50 bp, Homo sapiens; identical to SEQ ID NO: 14799
  chr7:56030944-56030994
  hypo

SEQ ID NO: 46562 - DNA, 31 bp, Homo sapiens; identical to SEQ ID NO: 14800
  chr7:56031246-56031277
  hypo

SEQ ID NO: 46563 - DNA, 44 bp, Homo sapiens; identical to SEQ ID NO: 14801
  chr7:56031536-56031580
  hypo

SEQ ID NO: 46564 - DNA, 31 bp, Homo sapiens; identical to SEQ ID NO: 14802
  chr7:56031581-56031612
  hypo

SEQ ID NO: 46565 - DNA, 31 bp, Homo sapiens; identical to SEQ ID NO: 14805
  chr7:56037256-56037287
  hypo

SEQ ID NO: 46566 - DNA, 2 bp, Homo sapiens
  chr7:56144505-56144507
  hypo
gc

SEQ ID NO: 46567 - DNA, 59 bp, Homo sapiens; identical to SEQ ID NO: 14807
  chr7:56144548-56144607
  hypo

SEQ ID NO: 46568 - DNA, 31 bp, Homo sapiens; identical to SEQ ID NO: 14808
  chr7:56144640-56144671
  hypo

SEQ ID NO: 46569 - DNA, 40 bp, Homo sapiens; identical to SEQ ID NO: 14810
  chr7:57712630-57712670
  hypo

SEQ ID NO: 46570 - DNA, 150 bp, Homo sapiens; identical to SEQ ID NO: 14811
  chr7:63027889-63028039
  hypo

SEQ ID NO: 46571 - DNA, 48 bp, Homo sapiens; identical to SEQ ID NO: 14812
  chr7:63757330-63757378
  hypo

SEQ ID NO: 46572 - DNA, 61 bp, Homo sapiens; identical to SEQ ID NO: 14813
  chr7:63757439-63757500
  hypo

SEQ ID NO: 46573 - DNA, 33 bp, Homo sapiens; identical to SEQ ID NO: 14814
  chr7:64478037-64478070
  hypo

SEQ ID NO: 46574 - DNA, 31 bp, Homo sapiens; identical to SEQ ID NO: 14815
  chr7:64478145-64478176
  hypo

SEQ ID NO: 46575 - DNA, 31 bp, Homo sapiens; identical to SEQ ID NO: 14816
  chr7:64851807-64851838
  hypo

SEQ ID NO: 46576 - DNA, 31 bp, Homo sapiens; identical to SEQ ID NO: 14820
  chr7:65439501-65439532
  hypo

SEQ ID NO: 46577 - DNA, 39 bp, Homo sapiens; identical to SEQ ID NO: 3058
  chr7:65541036-65541075
  hypo

SEQ ID NO: 46578 - DNA, 21 bp, Homo sapiens
  chr7:65554018-65554039
  hypo
ttgcggcgctggaccagccaa

SEQ ID NO: 46579 - DNA, 31 bp, Homo sapiens; identical to SEQ ID NO: 14824
  chr7:65841451-65841482
  hypo

SEQ ID NO: 46580 - DNA, 31 bp, Homo sapiens; identical to SEQ ID NO: 14825
  chr7:65841862-65841893
  hypo

SEQ ID NO: 46581 - DNA, 60 bp, Homo sapiens; identical to SEQ ID NO: 14827
  chr7:65939522-65939582
  hypo

SEQ ID NO: 46582 - DNA, 2 bp, Homo sapiens
  chr7:65969577-65969579
  hypo
tt

SEQ ID NO: 46583 - DNA, 17 bp, Homo sapiens
  chr7:65969655-65969672
  hypo
ttcgtgttgaagaagaa

SEQ ID NO: 46584 - DNA, 138 bp, Homo sapiens; identical to SEQ ID NO: 3059
  chr7:66094048-66094186
  hypo

SEQ ID NO: 46585 - DNA, 31 bp, Homo sapiens; identical to SEQ ID NO: 14832
  chr7:66106012-66106043
  hypo

SEQ ID NO: 46586 - DNA, 63 bp, Homo sapiens; identical to SEQ ID NO: 14833
  chr7:66106095-66106158
  hypo

SEQ ID NO: 46587 - DNA, 31 bp, Homo sapiens; identical to SEQ ID NO: 14835
  chr7:68678433-68678464
  hypo

SEQ ID NO: 46588 - DNA, 31 bp, Homo sapiens; identical to SEQ ID NO: 14836
  chr7:70234743-70234774
  hypo

SEQ ID NO: 46589 - DNA, 31 bp, Homo sapiens; identical to SEQ ID NO: 14837
  chr7:70250820-70250851
  hypo

SEQ ID NO: 46590 - DNA, 41 bp, Homo sapiens; identical to SEQ ID NO: 14838
  chr7:70255441-70255482
  hypo

SEQ ID NO: 46591 - DNA, 42 bp, Homo sapiens; identical to SEQ ID NO: 14839
  chr7:70255540-70255582
  hypo

SEQ ID NO: 46592 - DNA, 57 bp, Homo sapiens; identical to SEQ ID NO: 14840
  chr7:70255960-70256017
  hypo

SEQ ID NO: 46593 - DNA, 31 bp, Homo sapiens; identical to SEQ ID NO: 14842
  chr7:72325008-72325039
  hypo

SEQ ID NO: 46594 - DNA, 31 bp, Homo sapiens; identical to SEQ ID NO: 14844
  chr7:76059753-76059784
  hypo

SEQ ID NO: 46595 - DNA, 20 bp, Homo sapiens
  chr7:76631492-76631512
  hypo
gcatggagaagctgtccgca

SEQ ID NO: 46596 - DNA, 81 bp, Homo sapiens; identical to SEQ ID NO: 14847
  chr7:76631612-76631693
  hypo

SEQ ID NO: 46597 - DNA, 31 bp, Homo sapiens; identical to SEQ ID NO: 14848
  chr7:77184924-77184955
  hypo

SEQ ID NO: 46598 - DNA, 59 bp, Homo sapiens; identical to SEQ ID NO: 14850
  chr7:77309652-77309711
  hypo

SEQ ID NO: 46599 - DNA, 2 bp, Homo sapiens
  chr7:77315388-77315390
  hypo
ct

SEQ ID NO: 46600 - DNA, 31 bp, Homo sapiens; identical to SEQ ID NO: 14853
  chr7:80019541-80019572
  hypo

SEQ ID NO: 46601 - DNA, 60 bp, Homo sapiens; identical to SEQ ID NO: 3065
  chr7:80548576-80548636
  hypo

SEQ ID NO: 46602 - DNA, 31 bp, Homo sapiens; identical to SEQ ID NO: 14856
  chr7:80565299-80565330
  hypo

SEQ ID NO: 46603 - DNA, 31 bp, Homo sapiens; identical to SEQ ID NO: 14860
  chr7:92164124-92164155
  hypo

SEQ ID NO: 46604 - DNA, 144 bp, Homo sapiens; identical to SEQ ID NO: 3079
  chr7:92219763-92219907
  hypo

SEQ ID NO: 46605 - DNA, 385 bp, Homo sapiens; identical to SEQ ID NO: 3080
  chr7:92462331-92462716
  hypo

SEQ ID NO: 46606 - DNA, 140 bp, Homo sapiens; identical to SEQ ID NO: 3081
  chr7:92462810-92462950
  hypo

SEQ ID NO: 46607 - DNA, 31 bp, Homo sapiens; identical to SEQ ID NO: 3082
  chr7:92462963-92462994
  hypo

SEQ ID NO: 46608 - DNA, 31 bp, Homo sapiens; identical to SEQ ID NO: 3083
  chr7:92463001-92463032
  hypo

SEQ ID NO: 46609 - DNA, 31 bp, Homo sapiens; identical to SEQ ID NO: 3084
  chr7:92463048-92463079
  hypo

SEQ ID NO: 46610 - DNA, 78 bp, Homo sapiens; identical to SEQ ID NO: 3085
  chr7:92463082-92463160
  hypo

SEQ ID NO: 46611 - DNA, 31 bp, Homo sapiens; identical to SEQ ID NO: 3086
  chr7:92463161-92463192
  hypo

SEQ ID NO: 46612 - DNA, 138 bp, Homo sapiens; identical to SEQ ID NO: 3087
  chr7:92463195-92463333
  hypo

SEQ ID NO: 46613 - DNA, 64 bp, Homo sapiens; identical to SEQ ID NO: 14870
  chr7:94293683-94293747
  hypo

SEQ ID NO: 46614 - DNA, 97 bp, Homo sapiens; identical to SEQ ID NO: 3090
  chr7:95064295-95064392
  hypo

SEQ ID NO: 46615 - DNA, 2 bp, Homo sapiens
  chr7:97600088-97600090
  hypo
tc

SEQ ID NO: 46616 - DNA, 38 bp, Homo sapiens
  chr7:97600248-97600286
  hypo
agcctgggcaacaccgtgagacctcgtctctatttaaa

SEQ ID NO: 46617 - DNA, 93 bp, Homo sapiens; identical to SEQ ID NO: 14875
  chr7:97670350-97670443
  hypo

SEQ ID NO: 46618 - DNA, 39 bp, Homo sapiens; identical to SEQ ID NO: 14876
  chr7:97670498-97670537
  hypo

SEQ ID NO: 46619 - DNA, 2 bp, Homo sapiens
  chr7:97807741-97807743
  hypo
ga

SEQ ID NO: 46620 - DNA, 31 bp, Homo sapiens; identical to SEQ ID NO: 14879
  chr7:97832524-97832555
  hypo

SEQ ID NO: 46621 - DNA, 2 bp, Homo sapiens
  chr7:97834166-97834168
  hypo
tg

SEQ ID NO: 46622 - DNA, 31 bp, Homo sapiens; identical to SEQ ID NO: 14882
  chr7:97942776-97942807
  hypo

SEQ ID NO: 46623 - DNA, 31 bp, Homo sapiens; identical to SEQ ID NO: 14883
  chr7:97947129-97947160
  hypo

SEQ ID NO: 46624 - DNA, 65 bp, Homo sapiens; identical to SEQ ID NO: 14884
  chr7:97968885-97968950
  hypo

SEQ ID NO: 46625 - DNA, 61 bp, Homo sapiens; identical to SEQ ID NO: 14885
  chr7:97968957-97969018
  hypo

SEQ ID NO: 46626 - DNA, 36 bp, Homo sapiens; identical to SEQ ID NO: 14886
  chr7:98012254-98012290
  hypo

SEQ ID NO: 46627 - DNA, 35 bp, Homo sapiens; identical to SEQ ID NO: 3099
  chr7:98030419-98030454
  hypo

SEQ ID NO: 46628 - DNA, 74 bp, Homo sapiens; identical to SEQ ID NO: 3100
  chr7:98030480-98030554
  hypo

SEQ ID NO: 46629 - DNA, 39 bp, Homo sapiens; identical to SEQ ID NO: 3101
  chr7:98030571-98030610
  hypo

SEQ ID NO: 46630 - DNA, 100 bp, Homo sapiens; identical to SEQ ID NO: 14892
  chr7:98639723-98639823
  hypo

SEQ ID NO: 46631 - DNA, 31 bp, Homo sapiens; identical to SEQ ID NO: 14893
  chr7:98639870-98639901
  hypo

SEQ ID NO: 46632 - DNA, 49 bp, Homo sapiens; identical to SEQ ID NO: 14895
  chr7:98775354-98775403
  hypo

SEQ ID NO: 46633 - DNA, 48 bp, Homo sapiens; identical to SEQ ID NO: 14896
  chr7:98775436-98775484
  hypo

SEQ ID NO: 46634 - DNA, 42 bp, Homo sapiens; identical to SEQ ID NO: 14897
  chr7:98814529-98814571
  hypo

SEQ ID NO: 46635 - DNA, 31 bp, Homo sapiens; identical to SEQ ID NO: 14898
  chr7:98845138-98845169
  hypo

SEQ ID NO: 46636 - DNA, 47 bp, Homo sapiens; identical to SEQ ID NO: 14899
  chr7:98876192-98876239
  hypo

SEQ ID NO: 46637 - DNA, 47 bp, Homo sapiens; identical to SEQ ID NO: 14900
  chr7:98876332-98876379
  hypo

SEQ ID NO: 46638 - DNA, 31 bp, Homo sapiens; identical to SEQ ID NO: 14901
  chr7:98877234-98877265
  hypo

SEQ ID NO: 46639 - DNA, 66 bp, Homo sapiens; identical to SEQ ID NO: 14902
  chr7:98879379-98879445
  hypo

SEQ ID NO: 46640 - DNA, 52 bp, Homo sapiens; identical to SEQ ID NO: 14903
  chr7:98879472-98879524
  hypo

SEQ ID NO: 46641 - DNA, 41 bp, Homo sapiens; identical to SEQ ID NO: 14904
  chr7:98879534-98879575
  hypo

SEQ ID NO: 46642 - DNA, 31 bp, Homo sapiens; identical to SEQ ID NO: 14905
  chr7:98881512-98881543
  hypo

SEQ ID NO: 46643 - DNA, 31 bp, Homo sapiens; identical to SEQ ID NO: 14906
  chr7:98882347-98882378
  hypo

SEQ ID NO: 46644 - DNA, 119 bp, Homo sapiens; identical to SEQ ID NO: 14907
  chr7:98885540-98885659
  hypo

SEQ ID NO: 46645 - DNA, 35 bp, Homo sapiens; identical to SEQ ID NO: 14909
  chr7:98889890-98889925
  hypo

SEQ ID NO: 46646 - DNA, 31 bp, Homo sapiens; identical to SEQ ID NO: 14910
  chr7:98894702-98894733
  hypo

SEQ ID NO: 46647 - DNA, 38 bp, Homo sapiens; identical to SEQ ID NO: 14911
  chr7:98901752-98901790
  hypo

SEQ ID NO: 46648 - DNA, 46 bp, Homo sapiens; identical to SEQ ID NO: 14912
  chr7:98904457-98904503
  hypo

SEQ ID NO: 46649 - DNA, 45 bp, Homo sapiens; identical to SEQ ID NO: 14913
  chr7:98960331-98960376
  hypo

SEQ ID NO: 46650 - DNA, 31 bp, Homo sapiens; identical to SEQ ID NO: 14916
  chr7:98994223-98994254
  hypo

SEQ ID NO: 46651 - DNA, 71 bp, Homo sapiens; identical to SEQ ID NO: 14917
  chr7:99065117-99065188
  hypo

SEQ ID NO: 46652 - DNA, 31 bp, Homo sapiens; identical to SEQ ID NO: 3105
  chr7:99070937-99070968
  hypo

SEQ ID NO: 46653 - DNA, 2 bp, Homo sapiens
  chr7:99103864-99103866
  hypo
gg

SEQ ID NO: 46654 - DNA, 48 bp, Homo sapiens; identical to SEQ ID NO: 37162
  chr7:99156600-99156648
  hypo

SEQ ID NO: 46655 - DNA, 124 bp, Homo sapiens; identical to SEQ ID NO: 37163
  chr7:99156692-99156816
  hypo

SEQ ID NO: 46656 - DNA, 39 bp, Homo sapiens; identical to SEQ ID NO: 14927
  chr7:99391323-99391362
  hypo

SEQ ID NO: 46657 - DNA, 31 bp, Homo sapiens; identical to SEQ ID NO: 14928
  chr7:99391422-99391453
  hypo

SEQ ID NO: 46658 - DNA, 31 bp, Homo sapiens; identical to SEQ ID NO: 14929
  chr7:99391489-99391520
  hypo

SEQ ID NO: 46659 - DNA, 31 bp, Homo sapiens; identical to SEQ ID NO: 14930
  chr7:99611394-99611425
  hypo

SEQ ID NO: 46660 - DNA, 31 bp, Homo sapiens; identical to SEQ ID NO: 14932
  chr7:99782062-99782093
  hypo

SEQ ID NO: 46661 - DNA, 31 bp, Homo sapiens; identical to SEQ ID NO: 3115
  chr7:99869133-99869164
  hypo

SEQ ID NO: 46662 - DNA, 31 bp, Homo sapiens; identical to SEQ ID NO: 14935
  chr7:100039691-100039722
  hypo

SEQ ID NO: 46663 - DNA, 36 bp, Homo sapiens; identical to SEQ ID NO: 14936
  chr7:100064740-100064776
  hypo

SEQ ID NO: 46664 - DNA, 50 bp, Homo sapiens; identical to SEQ ID NO: 14937
  chr7:100086231-100086281
  hypo

SEQ ID NO: 46665 - DNA, 31 bp, Homo sapiens; identical to SEQ ID NO: 14938
  chr7:100116513-100116544
  hypo

SEQ ID NO: 46666 - DNA, 74 bp, Homo sapiens; identical to SEQ ID NO: 14941
  chr7:100179297-100179371
  hypo

SEQ ID NO: 46667 - DNA, 37 bp, Homo sapiens; identical to SEQ ID NO: 14943
  chr7:100189308-100189345
  hypo

SEQ ID NO: 46668 - DNA, 31 bp, Homo sapiens; identical to SEQ ID NO: 14944
  chr7:100190396-100190427
  hypo

SEQ ID NO: 46669 - DNA, 31 bp, Homo sapiens; identical to SEQ ID NO: 14945
  chr7:100212727-100212758
  hypo

SEQ ID NO: 46670 - DNA, 50 bp, Homo sapiens; identical to SEQ ID NO: 14946
  chr7:100388724-100388774
  hypo

SEQ ID NO: 46671 - DNA, 31 bp, Homo sapiens; identical to SEQ ID NO: 14947
  chr7:100402973-100403004
  hypo

SEQ ID NO: 46672 - DNA, 41 bp, Homo sapiens; identical to SEQ ID NO: 14948
  chr7:100403261-100403302
  hypo

SEQ ID NO: 46673 - DNA, 67 bp, Homo sapiens; identical to SEQ ID NO: 14949
  chr7:100405095-100405162
  hypo

SEQ ID NO: 46674 - DNA, 31 bp, Homo sapiens; identical to SEQ ID NO: 14951
  chr7:100407981-100408012
  hypo

SEQ ID NO: 46675 - DNA, 39 bp, Homo sapiens; identical to SEQ ID NO: 14953
  chr7:100410865-100410904
  hypo

SEQ ID NO: 46676 - DNA, 38 bp, Homo sapiens; identical to SEQ ID NO: 14955
  chr7:100414989-100415027
  hypo

SEQ ID NO: 46677 - DNA, 30 bp, Homo sapiens; identical to SEQ ID NO: 14956
  chr7:100415897-100415927
  hypo

SEQ ID NO: 46678 - DNA, 31 bp, Homo sapiens; identical to SEQ ID NO: 14957
  chr7:100417065-100417096
  hypo

SEQ ID NO: 46679 - DNA, 58 bp, Homo sapiens; identical to SEQ ID NO: 14958
  chr7:100421439-100421497
  hypo

SEQ ID NO: 46680 - DNA, 45 bp, Homo sapiens; identical to SEQ ID NO: 3117
  chr7:100424501-100424546
  hypo

SEQ ID NO: 46681 - DNA, 326 bp, Homo sapiens; identical to SEQ ID NO: 3118
  chr7:100424625-100424951
  hypo

SEQ ID NO: 46682 - DNA, 89 bp, Homo sapiens; identical to SEQ ID NO: 3119
  chr7:100424995-100425084
  hypo

SEQ ID NO: 46683 - DNA, 44 bp, Homo sapiens; identical to SEQ ID NO: 14962
  chr7:100490910-100490954
  hypo

SEQ ID NO: 46684 - DNA, 31 bp, Homo sapiens; identical to SEQ ID NO: 14963
  chr7:100650578-100650609
  hypo

SEQ ID NO: 46685 - DNA, 59 bp, Homo sapiens; identical to SEQ ID NO: 14964
  chr7:100731010-100731069
  hypo

SEQ ID NO: 46686 - DNA, 31 bp, Homo sapiens; identical to SEQ ID NO: 14966
  chr7:100866247-100866278
  hypo

SEQ ID NO: 46687 - DNA, 39 bp, Homo sapiens; identical to SEQ ID NO: 14967
  chr7:100866325-100866364
  hypo

SEQ ID NO: 46688 - DNA, 31 bp, Homo sapiens; identical to SEQ ID NO: 14968
  chr7:100866374-100866405
  hypo

SEQ ID NO: 46689 - DNA, 58 bp, Homo sapiens; identical to SEQ ID NO: 14969
  chr7:100961429-100961487
  hypo

SEQ ID NO: 46690 - DNA, 31 bp, Homo sapiens; identical to SEQ ID NO: 14970
  chr7:101132097-101132128
  hypo

SEQ ID NO: 46691 - DNA, 31 bp, Homo sapiens; identical to SEQ ID NO: 14972
  chr7:101195356-101195387
  hypo

SEQ ID NO: 46692 - DNA, 31 bp, Homo sapiens; identical to SEQ ID NO: 14973
  chr7:101270579-101270610
  hypo

SEQ ID NO: 46693 - DNA, 31 bp, Homo sapiens; identical to SEQ ID NO: 14974
  chr7:101382584-101382615
  hypo

SEQ ID NO: 46694 - DNA, 100 bp, Homo sapiens; identical to SEQ ID NO: 14975
  chr7:101497174-101497274
  hypo

SEQ ID NO: 46695 - DNA, 37 bp, Homo sapiens; identical to SEQ ID NO: 14976
  chr7:101497277-101497314
  hypo

SEQ ID NO: 46696 - DNA, 56 bp, Homo sapiens; identical to SEQ ID NO: 14977
  chr7:101504315-101504371
  hypo

SEQ ID NO: 46697 - DNA, 55 bp, Homo sapiens; identical to SEQ ID NO: 14978
  chr7:101504413-101504468
  hypo

SEQ ID NO: 46698 - DNA, 31 bp, Homo sapiens; identical to SEQ ID NO: 14979
  chr7:101521625-101521656
  hypo

SEQ ID NO: 46699 - DNA, 57 bp, Homo sapiens; identical to SEQ ID NO: 14980
  chr7:101533918-101533975
  hypo

SEQ ID NO: 46700 - DNA, 31 bp, Homo sapiens; identical to SEQ ID NO: 14982
  chr7:101603158-101603189
  hypo

SEQ ID NO: 46701 - DNA, 28 bp, Homo sapiens
  chr7:101603242-101603270
  hypo
aagactttaatgccatcgagatgcctca

SEQ ID NO: 46702 - DNA, 4 bp, Homo sapiens
  chr7:101603308-101603312
  hypo
aatg

SEQ ID NO: 46703 - DNA, 46 bp, Homo sapiens; identical to SEQ ID NO: 14984
  chr7:101624112-101624158
  hypo

SEQ ID NO: 46704 - DNA, 45 bp, Homo sapiens; identical to SEQ ID NO: 14985
  chr7:101627908-101627953
  hypo

SEQ ID NO: 46705 - DNA, 48 bp, Homo sapiens; identical to SEQ ID NO: 14986
  chr7:101627982-101628030
  hypo

SEQ ID NO: 46706 - DNA, 31 bp, Homo sapiens; identical to SEQ ID NO: 14987
  chr7:101630647-101630678
  hypo

SEQ ID NO: 46707 - DNA, 31 bp, Homo sapiens; identical to SEQ ID NO: 14988
  chr7:101632780-101632811
  hypo

SEQ ID NO: 46708 - DNA, 39 bp, Homo sapiens
  chr7:101652552-101652591
  hypo
ggagtggctgtcatgacgctgaccgcacaaatgatggtg

SEQ ID NO: 46709 - DNA, 58 bp, Homo sapiens; identical to SEQ ID NO: 14992
  chr7:101656269-101656327
  hypo

SEQ ID NO: 46710 - DNA, 2 bp, Homo sapiens
  chr7:101707050-101707052
  hypo
at

SEQ ID NO: 46711 - DNA, 37 bp, Homo sapiens; identical to SEQ ID NO: 14994
  chr7:101707084-101707121
  hypo

SEQ ID NO: 46712 - DNA, 31 bp, Homo sapiens; identical to SEQ ID NO: 14997
  chr7:102088065-102088096
  hypo

SEQ ID NO: 46713 - DNA, 31 bp, Homo sapiens; identical to SEQ ID NO: 14998
  chr7:102088101-102088132
  hypo

SEQ ID NO: 46714 - DNA, 2 bp, Homo sapiens
  chr7:102097001-102097003
  hypo
tc

SEQ ID NO: 46715 - DNA, 31 bp, Homo sapiens; identical to SEQ ID NO: 15001
  chr7:103080374-103080405
  hypo

SEQ ID NO: 46716 - DNA, 31 bp, Homo sapiens; identical to SEQ ID NO: 15002
  chr7:105016774-105016805
  hypo

SEQ ID NO: 46717 - DNA, 7 bp, Homo sapiens
  chr7:105279369-105279376
  hypo
gtgcagg

SEQ ID NO: 46718 - DNA, 31 bp, Homo sapiens; identical to SEQ ID NO: 15009
  chr7:105399235-105399266
  hypo

SEQ ID NO: 46719 - DNA, 55 bp, Homo sapiens; identical to SEQ ID NO: 15010
  chr7:105399326-105399381
  hypo

SEQ ID NO: 46720 - DNA, 43 bp, Homo sapiens; identical to SEQ ID NO: 15011
  chr7:105399382-105399425
  hypo

SEQ ID NO: 46721 - DNA, 69 bp, Homo sapiens; identical to SEQ ID NO: 15012
  chr7:105586618-105586687
  hypo

SEQ ID NO: 46722 - DNA, 31 bp, Homo sapiens; identical to SEQ ID NO: 15013
  chr7:105586749-105586780
  hypo

SEQ ID NO: 46723 - DNA, 31 bp, Homo sapiens; identical to SEQ ID NO: 3134
  chr7:105752146-105752177
  hypo

SEQ ID NO: 46724 - DNA, 31 bp, Homo sapiens; identical to SEQ ID NO: 15015
  chr7:105753928-105753959
  hypo

SEQ ID NO: 46725 - DNA, 31 bp, Homo sapiens; identical to SEQ ID NO: 3135
  chr7:106684934-106684965
  hypo

SEQ ID NO: 46726 - DNA, 31 bp, Homo sapiens; identical to SEQ ID NO: 15019
  chr7:106837821-106837852
  hypo

SEQ ID NO: 46727 - DNA, 2 bp, Homo sapiens
  chr7:107148302-107148304
  hypo
ca

SEQ ID NO: 46728 - DNA, 31 bp, Homo sapiens; identical to SEQ ID NO: 15022
  chr7:107202109-107202140
  hypo

SEQ ID NO: 46729 - DNA, 31 bp, Homo sapiens; identical to SEQ ID NO: 15023
  chr7:107202451-107202482
  hypo

SEQ ID NO: 46730 - DNA, 31 bp, Homo sapiens; identical to SEQ ID NO: 15024
  chr7:107202499-107202530
  hypo

SEQ ID NO: 46731 - DNA, 30 bp, Homo sapiens
  chr7:107483918-107483948
  hypo
agtcatgtggatcacgcggatccaaaatgg

SEQ ID NO: 46732 - DNA, 74 bp, Homo sapiens; identical to SEQ ID NO: 3138
  chr7:107531846-107531920
  hypo

SEQ ID NO: 46733 - DNA, 31 bp, Homo sapiens; identical to SEQ ID NO: 15027
  chr7:107621457-107621488
  hypo

SEQ ID NO: 46734 - DNA, 45 bp, Homo sapiens; identical to SEQ ID NO: 15028
  chr7:107633906-107633951
  hypo

SEQ ID NO: 46735 - DNA, 31 bp, Homo sapiens; identical to SEQ ID NO: 15033
  chr7:112149177-112149208
  hypo

SEQ ID NO: 46736 - DNA, 31 bp, Homo sapiens; identical to SEQ ID NO: 15034
  chr7:114671155-114671186
  hypo

SEQ ID NO: 46737 - DNA, 31 bp, Homo sapiens; identical to SEQ ID NO: 3149
  chr7:120497419-120497450
  hypo

SEQ ID NO: 46738 - DNA, 62 bp, Homo sapiens; identical to SEQ ID NO: 3160
  chr7:123174505-123174567
  hypo

SEQ ID NO: 46739 - DNA, 66 bp, Homo sapiens; identical to SEQ ID NO: 3161
  chr7:123174597-123174663
  hypo

SEQ ID NO: 46740 - DNA, 36 bp, Homo sapiens; identical to SEQ ID NO: 15038
  chr7:123175907-123175943
  hypo

SEQ ID NO: 46741 - DNA, 31 bp, Homo sapiens; identical to SEQ ID NO: 15039
  chr7:126013968-126013999
  hypo

SEQ ID NO: 46742 - DNA, 31 bp, Homo sapiens; identical to SEQ ID NO: 15042
  chr7:127846529-127846560
  hypo

SEQ ID NO: 46743 - DNA, 30 bp, Homo sapiens; identical to SEQ ID NO: 15043
  chr7:128064475-128064505
  hypo

SEQ ID NO: 46744 - DNA, 31 bp, Homo sapiens; identical to SEQ ID NO: 15044
  chr7:128086258-128086289
  hypo

SEQ ID NO: 46745 - DNA, 31 bp, Homo sapiens; identical to SEQ ID NO: 15048
  chr7:128484036-128484067
  hypo

SEQ ID NO: 46746 - DNA, 41 bp, Homo sapiens; identical to SEQ ID NO: 15049
  chr7:128484115-128484156
  hypo

SEQ ID NO: 46747 - DNA, 44 bp, Homo sapiens; identical to SEQ ID NO: 15050
  chr7:128484190-128484234
  hypo

SEQ ID NO: 46748 - DNA, 57 bp, Homo sapiens; identical to SEQ ID NO: 15051
  chr7:128484237-128484294
  hypo

SEQ ID NO: 46749 - DNA, 31 bp, Homo sapiens; identical to SEQ ID NO: 15052
  chr7:128489033-128489064
  hypo

SEQ ID NO: 46750 - DNA, 31 bp, Homo sapiens; identical to SEQ ID NO: 15053
  chr7:128489609-128489640
  hypo

SEQ ID NO: 46751 - DNA, 31 bp, Homo sapiens; identical to SEQ ID NO: 15054
  chr7:128587360-128587391
  hypo

SEQ ID NO: 46752 - DNA, 31 bp, Homo sapiens; identical to SEQ ID NO: 15055
  chr7:128602075-128602106
  hypo

SEQ ID NO: 46753 - DNA, 31 bp, Homo sapiens; identical to SEQ ID NO: 15056
  chr7:128602129-128602160
  hypo

SEQ ID NO: 46754 - DNA, 31 bp, Homo sapiens; identical to SEQ ID NO: 15058
  chr7:128845244-128845275
  hypo

SEQ ID NO: 46755 - DNA, 31 bp, Homo sapiens; identical to SEQ ID NO: 15059
  chr7:129096501-129096532
  hypo

SEQ ID NO: 46756 - DNA, 31 bp, Homo sapiens; identical to SEQ ID NO: 15060
  chr7:129096565-129096596
  hypo

SEQ ID NO: 46757 - DNA, 49 bp, Homo sapiens; identical to SEQ ID NO: 15061
  chr7:129172366-129172415
  hypo

SEQ ID NO: 46758 - DNA, 31 bp, Homo sapiens; identical to SEQ ID NO: 15062
  chr7:129172417-129172448
  hypo

SEQ ID NO: 46759 - DNA, 31 bp, Homo sapiens; identical to SEQ ID NO: 15064
  chr7:129287571-129287602
  hypo

SEQ ID NO: 46760 - DNA, 31 bp, Homo sapiens; identical to SEQ ID NO: 15065
  chr7:129330423-129330454
  hypo

SEQ ID NO: 46761 - DNA, 31 bp, Homo sapiens; identical to SEQ ID NO: 15066
  chr7:129410251-129410282
  hypo

SEQ ID NO: 46762 - DNA, 31 bp, Homo sapiens; identical to SEQ ID NO: 15067
  chr7:129410296-129410327
  hypo

SEQ ID NO: 46763 - DNA, 45 bp, Homo sapiens; identical to SEQ ID NO: 15068
  chr7:129435133-129435178
  hypo

SEQ ID NO: 46764 - DNA, 31 bp, Homo sapiens; identical to SEQ ID NO: 15069
  chr7:129435215-129435246
  hypo

SEQ ID NO: 46765 - DNA, 31 bp, Homo sapiens; identical to SEQ ID NO: 15070
  chr7:129483512-129483543
  hypo

SEQ ID NO: 46766 - DNA, 2 bp, Homo sapiens
  chr7:129844189-129844191
  hypo
tt

SEQ ID NO: 46767 - DNA, 11 bp, Homo sapiens
  chr7:129844209-129844220
  hypo
gtcttgctgtc

SEQ ID NO: 46768 - DNA, 31 bp, Homo sapiens; identical to SEQ ID NO: 15073
  chr7:129851271-129851302
  hypo

SEQ ID NO: 46769 - DNA, 31 bp, Homo sapiens; identical to SEQ ID NO: 15074
  chr7:129851309-129851340
  hypo

SEQ ID NO: 46770 - DNA, 31 bp, Homo sapiens; identical to SEQ ID NO: 15075
  chr7:129861967-129861998
  hypo

SEQ ID NO: 46771 - DNA, 31 bp, Homo sapiens; identical to SEQ ID NO: 15076
  chr7:129937094-129937125
  hypo

SEQ ID NO: 46772 - DNA, 31 bp, Homo sapiens; identical to SEQ ID NO: 15077
  chr7:131329430-131329461
  hypo

SEQ ID NO: 46773 - DNA, 55 bp, Homo sapiens; identical to SEQ ID NO: 15083
  chr7:134853336-134853391
  hypo

SEQ ID NO: 46774 - DNA, 31 bp, Homo sapiens; identical to SEQ ID NO: 15084
  chr7:134853415-134853446
  hypo

SEQ ID NO: 46775 - DNA, 31 bp, Homo sapiens; identical to SEQ ID NO: 15085
  chr7:134853490-134853521
  hypo

SEQ ID NO: 46776 - DNA, 31 bp, Homo sapiens; identical to SEQ ID NO: 15086
  chr7:134862793-134862824
  hypo

SEQ ID NO: 46777 - DNA, 31 bp, Homo sapiens; identical to SEQ ID NO: 15087
  chr7:134881010-134881041
  hypo

SEQ ID NO: 46778 - DNA, 40 bp, Homo sapiens; identical to SEQ ID NO: 15088
  chr7:134898275-134898315
  hypo

SEQ ID NO: 46779 - DNA, 2 bp, Homo sapiens
  chr7:135125374-135125376
  hypo
gt

SEQ ID NO: 46780 - DNA, 31 bp, Homo sapiens; identical to SEQ ID NO: 15092
  chr7:135247629-135247660
  hypo

SEQ ID NO: 46781 - DNA, 31 bp, Homo sapiens; identical to SEQ ID NO: 15093
  chr7:135495522-135495553
  hypo

SEQ ID NO: 46782 - DNA, 2 bp, Homo sapiens
  chr7:137664094-137664096
  hypo
ta

SEQ ID NO: 46783 - DNA, 31 bp, Homo sapiens; identical to SEQ ID NO: 15095
  chr7:138094770-138094801
  hypo

SEQ ID NO: 46784 - DNA, 31 bp, Homo sapiens; identical to SEQ ID NO: 15096
  chr7:138122332-138122363
  hypo

SEQ ID NO: 46785 - DNA, 31 bp, Homo sapiens; identical to SEQ ID NO: 15097
  chr7:138125640-138125671
  hypo

SEQ ID NO: 46786 - DNA, 31 bp, Homo sapiens; identical to SEQ ID NO: 15098
  chr7:138127125-138127156
  hypo

SEQ ID NO: 46787 - DNA, 31 bp, Homo sapiens; identical to SEQ ID NO: 15100
  chr7:138487654-138487685
  hypo

SEQ ID NO: 46788 - DNA, 39 bp, Homo sapiens; identical to SEQ ID NO: 15101
  chr7:138636037-138636076
  hypo

SEQ ID NO: 46789 - DNA, 31 bp, Homo sapiens; identical to SEQ ID NO: 15102
  chr7:139112526-139112557
  hypo

SEQ ID NO: 46790 - DNA, 92 bp, Homo sapiens; identical to SEQ ID NO: 15103
  chr7:139257982-139258074
  hypo

SEQ ID NO: 46791 - DNA, 38 bp, Homo sapiens; identical to SEQ ID NO: 3175
  chr7:139478236-139478274
  hypo

SEQ ID NO: 46792 - DNA, 77 bp, Homo sapiens; identical to SEQ ID NO: 3176
  chr7:139478356-139478433
  hypo

SEQ ID NO: 46793 - DNA, 31 bp, Homo sapiens; identical to SEQ ID NO: 15106
  chr7:139690718-139690749
  hypo

SEQ ID NO: 46794 - DNA, 53 bp, Homo sapiens; identical to SEQ ID NO: 15107
  chr7:139717470-139717523
  hypo

SEQ ID NO: 46795 - DNA, 31 bp, Homo sapiens; identical to SEQ ID NO: 15108
  chr7:139763700-139763731
  hypo

SEQ ID NO: 46796 - DNA, 31 bp, Homo sapiens; identical to SEQ ID NO: 15109
  chr7:139763756-139763787
  hypo

SEQ ID NO: 46797 - DNA, 31 bp, Homo sapiens; identical to SEQ ID NO: 15111
  chr7:140027171-140027202
  hypo

SEQ ID NO: 46798 - DNA, 31 bp, Homo sapiens; identical to SEQ ID NO: 3177
  chr7:140098302-140098333
  hypo

SEQ ID NO: 46799 - DNA, 69 bp, Homo sapiens; identical to SEQ ID NO: 3178
  chr7:140098372-140098441
  hypo

SEQ ID NO: 46800 - DNA, 31 bp, Homo sapiens; identical to SEQ ID NO: 15114
  chr7:140156477-140156508
  hypo

SEQ ID NO: 46801 - DNA, 2 bp, Homo sapiens
  chr7:140156523-140156525
  hypo
ca

SEQ ID NO: 46802 - DNA, 5 bp, Homo sapiens
  chr7:140180299-140180304
  hypo
taatc

SEQ ID NO: 46803 - DNA, 70 bp, Homo sapiens; identical to SEQ ID NO: 15120
  chr7:140205261-140205331
  hypo

SEQ ID NO: 46804 - DNA, 31 bp, Homo sapiens; identical to SEQ ID NO: 15121
  chr7:140205348-140205379
  hypo

SEQ ID NO: 46805 - DNA, 78 bp, Homo sapiens; identical to SEQ ID NO: 15122
  chr7:140217362-140217440
  hypo

SEQ ID NO: 46806 - DNA, 31 bp, Homo sapiens; identical to SEQ ID NO: 15123
  chr7:140221610-140221641
  hypo

SEQ ID NO: 46807 - DNA, 61 bp, Homo sapiens; identical to SEQ ID NO: 15124
  chr7:140221652-140221713
  hypo

SEQ ID NO: 46808 - DNA, 64 bp, Homo sapiens; identical to SEQ ID NO: 15125
  chr7:140221827-140221891
  hypo

SEQ ID NO: 46809 - DNA, 31 bp, Homo sapiens; identical to SEQ ID NO: 15126
  chr7:140255213-140255244
  hypo

SEQ ID NO: 46810 - DNA, 31 bp, Homo sapiens; identical to SEQ ID NO: 15127
  chr7:143013313-143013344
  hypo

SEQ ID NO: 46811 - DNA, 31 bp, Homo sapiens; identical to SEQ ID NO: 15128
  chr7:143013387-143013418
  hypo

SEQ ID NO: 46812 - DNA, 31 bp, Homo sapiens; identical to SEQ ID NO: 15129
  chr7:143013427-143013458
  hypo

SEQ ID NO: 46813 - DNA, 31 bp, Homo sapiens; identical to SEQ ID NO: 15130
  chr7:143018532-143018563
  hypo

SEQ ID NO: 46814 - DNA, 58 bp, Homo sapiens; identical to SEQ ID NO: 15131
  chr7:143096712-143096770
  hypo

SEQ ID NO: 46815 - DNA, 80 bp, Homo sapiens; identical to SEQ ID NO: 15132
  chr7:143097072-143097152
  hypo

SEQ ID NO: 46816 - DNA, 31 bp, Homo sapiens; identical to SEQ ID NO: 15133
  chr7:148481291-148481322
  hypo

SEQ ID NO: 46817 - DNA, 31 bp, Homo sapiens; identical to SEQ ID NO: 15135
  chr7:148692905-148692936
  hypo

SEQ ID NO: 46818 - DNA, 31 bp, Homo sapiens; identical to SEQ ID NO: 15136
  chr7:148703453-148703484
  hypo

SEQ ID NO: 46819 - DNA, 31 bp, Homo sapiens; identical to SEQ ID NO: 15137
  chr7:148703648-148703679
  hypo

SEQ ID NO: 46820 - DNA, 31 bp, Homo sapiens; identical to SEQ ID NO: 15138
  chr7:148759940-148759971
  hypo

SEQ ID NO: 46821 - DNA, 31 bp, Homo sapiens; identical to SEQ ID NO: 15141
  chr7:148884130-148884161
  hypo

SEQ ID NO: 46822 - DNA, 34 bp, Homo sapiens; identical to SEQ ID NO: 15142
  chr7:148901697-148901731
  hypo

SEQ ID NO: 46823 - DNA, 72 bp, Homo sapiens; identical to SEQ ID NO: 15143
  chr7:148921570-148921642
  hypo

SEQ ID NO: 46824 - DNA, 31 bp, Homo sapiens; identical to SEQ ID NO: 3180
  chr7:148936685-148936716
  hypo

SEQ ID NO: 46825 - DNA, 49 bp, Homo sapiens; identical to SEQ ID NO: 15145
  chr7:148992354-148992403
  hypo

SEQ ID NO: 46826 - DNA, 52 bp, Homo sapiens; identical to SEQ ID NO: 15146
  chr7:149005004-149005056
  hypo

SEQ ID NO: 46827 - DNA, 45 bp, Homo sapiens; identical to SEQ ID NO: 15147
  chr7:149005138-149005183
  hypo

SEQ ID NO: 46828 - DNA, 31 bp, Homo sapiens; identical to SEQ ID NO: 15148
  chr7:149153083-149153114
  hypo

SEQ ID NO: 46829 - DNA, 31 bp, Homo sapiens; identical to SEQ ID NO: 15149
  chr7:149315325-149315356
  hypo

SEQ ID NO: 46830 - DNA, 2 bp, Homo sapiens
  chr7:150049532-150049534
  hypo
ta

SEQ ID NO: 46831 - DNA, 63 bp, Homo sapiens; identical to SEQ ID NO: 15162
  chr7:150069580-150069643
  hypo

SEQ ID NO: 46832 - DNA, 67 bp, Homo sapiens; identical to SEQ ID NO: 15163
  chr7:150081382-150081449
  hypo

SEQ ID NO: 46833 - DNA, 54 bp, Homo sapiens; identical to SEQ ID NO: 15164
  chr7:150105547-150105601
  hypo

SEQ ID NO: 46834 - DNA, 31 bp, Homo sapiens; identical to SEQ ID NO: 15165
  chr7:150699034-150699065
  hypo

SEQ ID NO: 46835 - DNA, 56 bp, Homo sapiens; identical to SEQ ID NO: 15166
  chr7:150720587-150720643
  hypo

SEQ ID NO: 46836 - DNA, 39 bp, Homo sapiens; identical to SEQ ID NO: 15167
  chr7:150720669-150720708
  hypo

SEQ ID NO: 46837 - DNA, 31 bp, Homo sapiens; identical to SEQ ID NO: 15168
  chr7:150720745-150720776
  hypo

SEQ ID NO: 46838 - DNA, 42 bp, Homo sapiens
  chr7:150758925-150758967
  hypo
ggaggatccccagcagcgcagcctgcgcgtggtggctcctgc

SEQ ID NO: 46839 - DNA, 2 bp, Homo sapiens
  chr7:150773893-150773895
  hypo
tg

SEQ ID NO: 46840 - DNA, 51 bp, Homo sapiens; identical to SEQ ID NO: 15173
  chr7:150774592-150774643
  hypo

SEQ ID NO: 46841 - DNA, 2 bp, Homo sapiens
  chr7:150774703-150774705
  hypo
cc

SEQ ID NO: 46842 - DNA, 134 bp, Homo sapiens; identical to SEQ ID NO: 3186
  chr7:150784072-150784206
  hypo

SEQ ID NO: 46843 - DNA, 148 bp, Homo sapiens; identical to SEQ ID NO: 3188
  chr7:150784689-150784837
  hypo

SEQ ID NO: 46844 - DNA, 31 bp, Homo sapiens; identical to SEQ ID NO: 15178
  chr7:150811427-150811458
  hypo

SEQ ID NO: 46845 - DNA, 31 bp, Homo sapiens; identical to SEQ ID NO: 15179
  chr7:150811491-150811522
  hypo

SEQ ID NO: 46846 - DNA, 31 bp, Homo sapiens; identical to SEQ ID NO: 15180
  chr7:150811558-150811589
  hypo

SEQ ID NO: 46847 - DNA, 55 bp, Homo sapiens; identical to SEQ ID NO: 15181
  chr7:150812865-150812920
  hypo

SEQ ID NO: 46848 - DNA, 31 bp, Homo sapiens; identical to SEQ ID NO: 15182
  chr7:150813052-150813083
  hypo

SEQ ID NO: 46849 - DNA, 30 bp, Homo sapiens
  chr7:150813151-150813181
  hypo
gttcccagagctagcccgagcacccatgtg

SEQ ID NO: 46850 - DNA, 21 bp, Homo sapiens
  chr7:150813210-150813231
  hypo
ggctgtcggagggctctgggt

SEQ ID NO: 46851 - DNA, 31 bp, Homo sapiens; identical to SEQ ID NO: 15184
  chr7:150813272-150813303
  hypo

SEQ ID NO: 46852 - DNA, 31 bp, Homo sapiens; identical to SEQ ID NO: 15185
  chr7:150813307-150813338
  hypo

SEQ ID NO: 46853 - DNA, 34 bp, Homo sapiens; identical to SEQ ID NO: 3189
  chr7:150869803-150869837
  hypo

SEQ ID NO: 46854 - DNA, 48 bp, Homo sapiens; identical to SEQ ID NO: 3190
  chr7:150948762-150948810
  hypo

SEQ ID NO: 46855 - DNA, 35 bp, Homo sapiens; identical to SEQ ID NO: 3191
  chr7:151038573-151038608
  hypo

SEQ ID NO: 46856 - DNA, 65 bp, Homo sapiens; identical to SEQ ID NO: 3192
  chr7:151038609-151038674
  hypo

SEQ ID NO: 46857 - DNA, 282 bp, Homo sapiens; identical to SEQ ID NO: 3193
  chr7:151038681-151038963
  hypo

SEQ ID NO: 46858 - DNA, 31 bp, Homo sapiens; identical to SEQ ID NO: 15192
  chr7:151073545-151073576
  hypo

SEQ ID NO: 46859 - DNA, 31 bp, Homo sapiens; identical to SEQ ID NO: 15193
  chr7:151073690-151073721
  hypo

SEQ ID NO: 46860 - DNA, 52 bp, Homo sapiens; identical to SEQ ID NO: 15194
  chr7:151074138-151074190
  hypo

SEQ ID NO: 46861 - DNA, 35 bp, Homo sapiens; identical to SEQ ID NO: 15195
  chr7:151074642-151074677
  hypo

SEQ ID NO: 46862 - DNA, 39 bp, Homo sapiens; identical to SEQ ID NO: 15196
  chr7:151129033-151129072
  hypo

SEQ ID NO: 46863 - DNA, 34 bp, Homo sapiens; identical to SEQ ID NO: 15197
  chr7:151134319-151134353
  hypo

SEQ ID NO: 46864 - DNA, 65 bp, Homo sapiens; identical to SEQ ID NO: 3194
  chr7:151217152-151217217
  hypo

SEQ ID NO: 46865 - DNA, 31 bp, Homo sapiens; identical to SEQ ID NO: 15199
  chr7:151361418-151361449
  hypo

SEQ ID NO: 46866 - DNA, 31 bp, Homo sapiens; identical to SEQ ID NO: 15200
  chr7:151474643-151474674
  hypo

SEQ ID NO: 46867 - DNA, 31 bp, Homo sapiens; identical to SEQ ID NO: 15201
  chr7:151476538-151476569
  hypo

SEQ ID NO: 46868 - DNA, 64 bp, Homo sapiens; identical to SEQ ID NO: 15202
  chr7:151476622-151476686
  hypo

SEQ ID NO: 46869 - DNA, 36 bp, Homo sapiens; identical to SEQ ID NO: 15203
  chr7:151496735-151496771
  hypo

SEQ ID NO: 46870 - DNA, 121 bp, Homo sapiens; identical to SEQ ID NO: 3196
  chr7:151573023-151573144
  hypo

SEQ ID NO: 46871 - DNA, 31 bp, Homo sapiens; identical to SEQ ID NO: 15206
  chr7:151712355-151712386
  hypo

SEQ ID NO: 46872 - DNA, 31 bp, Homo sapiens; identical to SEQ ID NO: 15207
  chr7:151712411-151712442
  hypo

SEQ ID NO: 46873 - DNA, 211 bp, Homo sapiens; identical to SEQ ID NO: 3198
  chr7:151722792-151723003
  hypo

SEQ ID NO: 46874 - DNA, 40 bp, Homo sapiens; identical to SEQ ID NO: 3199
  chr7:151723103-151723143
  hypo

SEQ ID NO: 46875 - DNA, 4 bp, Homo sapiens
  chr7:151723167-151723171
  hypo
cgtc

SEQ ID NO: 46876 - DNA, 91 bp, Homo sapiens; identical to SEQ ID NO: 15211
  chr7:151802390-151802481
  hypo

SEQ ID NO: 46877 - DNA, 41 bp, Homo sapiens; identical to SEQ ID NO: 15212
  chr7:151802488-151802529
  hypo

SEQ ID NO: 46878 - DNA, 31 bp, Homo sapiens; identical to SEQ ID NO: 15213
  chr7:151802543-151802574
  hypo

SEQ ID NO: 46879 - DNA, 45 bp, Homo sapiens; identical to SEQ ID NO: 15214
  chr7:152243972-152244017
  hypo

SEQ ID NO: 46880 - DNA, 31 bp, Homo sapiens; identical to SEQ ID NO: 15215
  chr7:152252877-152252908
  hypo

SEQ ID NO: 46881 - DNA, 31 bp, Homo sapiens; identical to SEQ ID NO: 15216
  chr7:152397925-152397956
  hypo

SEQ ID NO: 46882 - DNA, 31 bp, Homo sapiens; identical to SEQ ID NO: 15217
  chr7:152543181-152543212
  hypo

SEQ ID NO: 46883 - DNA, 35 bp, Homo sapiens; identical to SEQ ID NO: 15218
  chr7:152543616-152543651
  hypo

SEQ ID NO: 46884 - DNA, 31 bp, Homo sapiens; identical to SEQ ID NO: 15219
  chr7:152553622-152553653
  hypo

SEQ ID NO: 46885 - DNA, 31 bp, Homo sapiens; identical to SEQ ID NO: 15220
  chr7:152555645-152555676
  hypo

SEQ ID NO: 46886 - DNA, 31 bp, Homo sapiens; identical to SEQ ID NO: 15221
  chr7:152555677-152555708
  hypo

SEQ ID NO: 46887 - DNA, 45 bp, Homo sapiens; identical to SEQ ID NO: 15222
  chr7:152555732-152555777
  hypo

SEQ ID NO: 46888 - DNA, 31 bp, Homo sapiens; identical to SEQ ID NO: 15223
  chr7:152555788-152555819
  hypo

SEQ ID NO: 46889 - DNA, 75 bp, Homo sapiens; identical to SEQ ID NO: 15224
  chr7:152562696-152562771
  hypo

SEQ ID NO: 46890 - DNA, 31 bp, Homo sapiens; identical to SEQ ID NO: 15225
  chr7:152562880-152562911
  hypo

SEQ ID NO: 46891 - DNA, 39 bp, Homo sapiens; identical to SEQ ID NO: 15226
  chr7:152564407-152564446
  hypo

SEQ ID NO: 46892 - DNA, 31 bp, Homo sapiens; identical to SEQ ID NO: 15227
  chr7:152566125-152566156
  hypo

SEQ ID NO: 46893 - DNA, 31 bp, Homo sapiens; identical to SEQ ID NO: 15228
  chr7:152567398-152567429
  hypo

SEQ ID NO: 46894 - DNA, 31 bp, Homo sapiens; identical to SEQ ID NO: 15229
  chr7:154468091-154468122
  hypo

SEQ ID NO: 46895 - DNA, 31 bp, Homo sapiens; identical to SEQ ID NO: 15230
  chr7:155077345-155077376
  hypo

SEQ ID NO: 46896 - DNA, 31 bp, Homo sapiens; identical to SEQ ID NO: 15231
  chr7:155077382-155077413
  hypo

SEQ ID NO: 46897 - DNA, 53 bp, Homo sapiens; identical to SEQ ID NO: 15232
  chr7:155077414-155077467
  hypo

SEQ ID NO: 46898 - DNA, 31 bp, Homo sapiens; identical to SEQ ID NO: 15233
  chr7:155077519-155077550
  hypo

SEQ ID NO: 46899 - DNA, 31 bp, Homo sapiens; identical to SEQ ID NO: 3202
  chr7:155244946-155244977
  hypo

SEQ ID NO: 46900 - DNA, 31 bp, Homo sapiens; identical to SEQ ID NO: 15235
  chr7:155352343-155352374
  hypo

SEQ ID NO: 46901 - DNA, 31 bp, Homo sapiens; identical to SEQ ID NO: 15236
  chr7:155385398-155385429
  hypo

SEQ ID NO: 46902 - DNA, 31 bp, Homo sapiens; identical to SEQ ID NO: 15237
  chr7:155385446-155385477
  hypo

SEQ ID NO: 46903 - DNA, 83 bp, Homo sapiens; identical to SEQ ID NO: 15238
  chr7:155385525-155385608
  hypo

SEQ ID NO: 46904 - DNA, 10 bp, Homo sapiens
  chr7:155436111-155436121
  hypo
ggattacagg

SEQ ID NO: 46905 - DNA, 31 bp, Homo sapiens; identical to SEQ ID NO: 15240
  chr7:155469875-155469906
  hypo

SEQ ID NO: 46906 - DNA, 53 bp, Homo sapiens; identical to SEQ ID NO: 15241
  chr7:155530781-155530834
  hypo

SEQ ID NO: 46907 - DNA, 40 bp, Homo sapiens; identical to SEQ ID NO: 15242
  chr7:155530919-155530959
  hypo

SEQ ID NO: 46908 - DNA, 73 bp, Homo sapiens; identical to SEQ ID NO: 15243
  chr7:155559942-155560015
  hypo

SEQ ID NO: 46909 - DNA, 45 bp, Homo sapiens; identical to SEQ ID NO: 15244
  chr7:155560024-155560069
  hypo

SEQ ID NO: 46910 - DNA, 13 bp, Homo sapiens
  chr7:155580714-155580727
  hypo
ctgtttcccccac

SEQ ID NO: 46911 - DNA, 44 bp, Homo sapiens; identical to SEQ ID NO: 37226
  chr7:155580882-155580926
  hypo

SEQ ID NO: 46912 - DNA, 17 bp, Homo sapiens
  chr7:155581226-155581243
  hypo
ccaaaaccacacccagc

SEQ ID NO: 46913 - DNA, 31 bp, Homo sapiens; identical to SEQ ID NO: 15252
  chr7:155582169-155582200
  hypo

SEQ ID NO: 46914 - DNA, 9 bp, Homo sapiens
  chr7:155582210-155582219
  hypo
tcagggctc

SEQ ID NO: 46915 - DNA, 31 bp, Homo sapiens; identical to SEQ ID NO: 15255
  chr7:155613134-155613165
  hypo

SEQ ID NO: 46916 - DNA, 31 bp, Homo sapiens; identical to SEQ ID NO: 15257
  chr7:155948762-155948793
  hypo

SEQ ID NO: 46917 - DNA, 31 bp, Homo sapiens; identical to SEQ ID NO: 15258
  chr7:156181998-156182029
  hypo

SEQ ID NO: 46918 - DNA, 31 bp, Homo sapiens; identical to SEQ ID NO: 15259
  chr7:156233573-156233604
  hypo

SEQ ID NO: 46919 - DNA, 31 bp, Homo sapiens; identical to SEQ ID NO: 15260
  chr7:156264382-156264413
  hypo

SEQ ID NO: 46920 - DNA, 31 bp, Homo sapiens; identical to SEQ ID NO: 15261
  chr7:156289999-156290030
  hypo

SEQ ID NO: 46921 - DNA, 31 bp, Homo sapiens; identical to SEQ ID NO: 15262
  chr7:156613329-156613360
  hypo

SEQ ID NO: 46922 - DNA, 83 bp, Homo sapiens; identical to SEQ ID NO: 15263
  chr7:156613381-156613464
  hypo

SEQ ID NO: 46923 - DNA, 31 bp, Homo sapiens; identical to SEQ ID NO: 15264
  chr7:156613486-156613517
  hypo

SEQ ID NO: 46924 - DNA, 50 bp, Homo sapiens; identical to SEQ ID NO: 15265
  chr7:156733284-156733334
  hypo

SEQ ID NO: 46925 - DNA, 31 bp, Homo sapiens; identical to SEQ ID NO: 15267
  chr7:156744822-156744853
  hypo

SEQ ID NO: 46926 - DNA, 146 bp, Homo sapiens; identical to SEQ ID NO: 15268
  chr7:156782594-156782740
  hypo

SEQ ID NO: 46927 - DNA, 31 bp, Homo sapiens; identical to SEQ ID NO: 15269
  chr7:156782751-156782782
  hypo

SEQ ID NO: 46928 - DNA, 190 bp, Homo sapiens; identical to SEQ ID NO: 37233
  chr7:156802164-156802354
  hypo

SEQ ID NO: 46929 - DNA, 48 bp, Homo sapiens; identical to SEQ ID NO: 3212
  chr7:156803445-156803493
  hypo

SEQ ID NO: 46930 - DNA, 31 bp, Homo sapiens; identical to SEQ ID NO: 15274
  chr7:156918681-156918712
  hypo

SEQ ID NO: 46931 - DNA, 39 bp, Homo sapiens; identical to SEQ ID NO: 15275
  chr7:157073423-157073462
  hypo

SEQ ID NO: 46932 - DNA, 40 bp, Homo sapiens; identical to SEQ ID NO: 15277
  chr7:157106436-157106476
  hypo

SEQ ID NO: 46933 - DNA, 31 bp, Homo sapiens; identical to SEQ ID NO: 15279
  chr7:157151169-157151200
  hypo

SEQ ID NO: 46934 - DNA, 31 bp, Homo sapiens; identical to SEQ ID NO: 15280
  chr7:157151242-157151273
  hypo

SEQ ID NO: 46935 - DNA, 69 bp, Homo sapiens; identical to SEQ ID NO: 15281
  chr7:157151276-157151345
  hypo

SEQ ID NO: 46936 - DNA, 2 bp, Homo sapiens
  chr7:157255060-157255062
  hypo
gc

SEQ ID NO: 46937 - DNA, 31 bp, Homo sapiens; identical to SEQ ID NO: 15283
  chr7:157260472-157260503
  hypo

SEQ ID NO: 46938 - DNA, 31 bp, Homo sapiens; identical to SEQ ID NO: 15288
  chr7:157716856-157716887
  hypo

SEQ ID NO: 46939 - DNA, 26 bp, Homo sapiens
  chr7:157722651-157722677
  hypo
acctagacacccgtcccagctcagac

SEQ ID NO: 46940 - DNA, 51 bp, Homo sapiens; identical to SEQ ID NO: 15290
  chr7:157730125-157730176
  hypo

SEQ ID NO: 46941 - DNA, 41 bp, Homo sapiens
  chr7:157776962-157777003
  hypo
cccacgccaggctccaccccatcccacgccaggctccaccc

SEQ ID NO: 46942 - DNA, 20 bp, Homo sapiens
  chr7:157793806-157793826
  hypo
ggggctggggtttggccgca

SEQ ID NO: 46943 - DNA, 31 bp, Homo sapiens; identical to SEQ ID NO: 15296
  chr7:157868202-157868233
  hypo

SEQ ID NO: 46944 - DNA, 56 bp, Homo sapiens; identical to SEQ ID NO: 15297
  chr7:157980854-157980910
  hypo

SEQ ID NO: 46945 - DNA, 34 bp, Homo sapiens; identical to SEQ ID NO: 15298
  chr7:157981409-157981443
  hypo

SEQ ID NO: 46946 - DNA, 43 bp, Homo sapiens
  chr7:158188490-158188533
  hypo
cgcgaggggcgaggggcgagggctcccggcctgcgccgccttg

SEQ ID NO: 46947 - DNA, 53 bp, Homo sapiens; identical to SEQ ID NO: 15300
  chr7:158188578-158188631
  hypo

SEQ ID NO: 46948 - DNA, 31 bp, Homo sapiens; identical to SEQ ID NO: 15301
  chr7:158381341-158381372
  hypo

SEQ ID NO: 46949 - DNA, 50 bp, Homo sapiens; identical to SEQ ID NO: 15302
  chr7:158659173-158659223
  hypo

SEQ ID NO: 46950 - DNA, 54 bp, Homo sapiens
  chr7:158766775-158766829
  hypo
caccccgcgctgtccccggcggtctggcctggcgtctggagctccgggagcgcc

SEQ ID NO: 46951 - DNA, 81 bp, Homo sapiens; identical to SEQ ID NO: 15306
  chr7:158767223-158767304
  hypo

SEQ ID NO: 46952 - DNA, 2 bp, Homo sapiens
  chr8:591504-591506
  hypo
gg

SEQ ID NO: 46953 - DNA, 31 bp, Homo sapiens; identical to SEQ ID NO: 15308
  chr8:592904-592935
  hypo

SEQ ID NO: 46954 - DNA, 11 bp, Homo sapiens
  chr8:593193-593204
  hypo
cgttaaacatt

SEQ ID NO: 46955 - DNA, 19 bp, Homo sapiens
  chr8:644617-644636
  hypo
acagtcacaggcaccacgc

SEQ ID NO: 46956 - DNA, 31 bp, Homo sapiens; identical to SEQ ID NO: 15312
  chr8:667864-667895
  hypo

SEQ ID NO: 46957 - DNA, 31 bp, Homo sapiens; identical to SEQ ID NO: 15313
  chr8:1731056-1731087
  hypo

SEQ ID NO: 46958 - DNA, 45 bp, Homo sapiens; identical to SEQ ID NO: 15314
  chr8:1759475-1759520
  hypo

SEQ ID NO: 46959 - DNA, 31 bp, Homo sapiens; identical to SEQ ID NO: 15315
  chr8:1779412-1779443
  hypo

SEQ ID NO: 46960 - DNA, 31 bp, Homo sapiens; identical to SEQ ID NO: 15316
  chr8:1783329-1783360
  hypo

SEQ ID NO: 46961 - DNA, 31 bp, Homo sapiens; identical to SEQ ID NO: 15317
  chr8:1789553-1789584
  hypo

SEQ ID NO: 46962 - DNA, 43 bp, Homo sapiens; identical to SEQ ID NO: 15318
  chr8:1798700-1798743
  hypo

SEQ ID NO: 46963 - DNA, 31 bp, Homo sapiens; identical to SEQ ID NO: 15319
  chr8:1814164-1814195
  hypo

SEQ ID NO: 46964 - DNA, 31 bp, Homo sapiens; identical to SEQ ID NO: 15320
  chr8:1814209-1814240
  hypo

SEQ ID NO: 46965 - DNA, 55 bp, Homo sapiens; identical to SEQ ID NO: 15321
  chr8:1826000-1826055
  hypo

SEQ ID NO: 46966 - DNA, 31 bp, Homo sapiens; identical to SEQ ID NO: 15322
  chr8:1842463-1842494
  hypo

SEQ ID NO: 46967 - DNA, 49 bp, Homo sapiens; identical to SEQ ID NO: 15323
  chr8:1902077-1902126
  hypo

SEQ ID NO: 46968 - DNA, 31 bp, Homo sapiens; identical to SEQ ID NO: 15324
  chr8:1902230-1902261
  hypo

SEQ ID NO: 46969 - DNA, 34 bp, Homo sapiens; identical to SEQ ID NO: 15326
  chr8:1926962-1926996
  hypo

SEQ ID NO: 46970 - DNA, 31 bp, Homo sapiens; identical to SEQ ID NO: 15327
  chr8:3881023-3881054
  hypo

SEQ ID NO: 46971 - DNA, 31 bp, Homo sapiens; identical to SEQ ID NO: 15328
  chr8:6322706-6322737
  hypo

SEQ ID NO: 46972 - DNA, 31 bp, Homo sapiens; identical to SEQ ID NO: 15329
  chr8:6323427-6323458
  hypo

SEQ ID NO: 46973 - DNA, 39 bp, Homo sapiens; identical to SEQ ID NO: 15330
  chr8:6361544-6361583
  hypo

SEQ ID NO: 46974 - DNA, 74 bp, Homo sapiens; identical to SEQ ID NO: 15332
  chr8:6434529-6434603
  hypo

SEQ ID NO: 46975 - DNA, 47 bp, Homo sapiens; identical to SEQ ID NO: 15333
  chr8:6434653-6434700
  hypo

SEQ ID NO: 46976 - DNA, 31 bp, Homo sapiens; identical to SEQ ID NO: 15334
  chr8:6594590-6594621
  hypo

SEQ ID NO: 46977 - DNA, 31 bp, Homo sapiens; identical to SEQ ID NO: 15336
  chr8:6636291-6636322
  hypo

SEQ ID NO: 46978 - DNA, 31 bp, Homo sapiens; identical to SEQ ID NO: 15337
  chr8:6636483-6636514
  hypo

SEQ ID NO: 46979 - DNA, 31 bp, Homo sapiens; identical to SEQ ID NO: 3221
  chr8:8313040-8313071
  hypo

SEQ ID NO: 46980 - DNA, 31 bp, Homo sapiens; identical to SEQ ID NO: 15339
  chr8:8436500-8436531
  hypo

SEQ ID NO: 46981 - DNA, 31 bp, Homo sapiens; identical to SEQ ID NO: 15340
  chr8:8437500-8437531
  hypo

SEQ ID NO: 46982 - DNA, 94 bp, Homo sapiens; identical to SEQ ID NO: 15341
  chr8:8456540-8456634
  hypo

SEQ ID NO: 46983 - DNA, 31 bp, Homo sapiens; identical to SEQ ID NO: 15342
  chr8:8456660-8456691
  hypo

SEQ ID NO: 46984 - DNA, 49 bp, Homo sapiens; identical to SEQ ID NO: 15345
  chr8:8651863-8651912
  hypo

SEQ ID NO: 46985 - DNA, 43 bp, Homo sapiens; identical to SEQ ID NO: 15346
  chr8:8651924-8651967
  hypo

SEQ ID NO: 46986 - DNA, 60 bp, Homo sapiens; identical to SEQ ID NO: 15347
  chr8:8651999-8652059
  hypo

SEQ ID NO: 46987 - DNA, 31 bp, Homo sapiens; identical to SEQ ID NO: 15348
  chr8:8669150-8669181
  hypo

SEQ ID NO: 46988 - DNA, 69 bp, Homo sapiens; identical to SEQ ID NO: 15349
  chr8:8673404-8673473
  hypo

SEQ ID NO: 46989 - DNA, 40 bp, Homo sapiens; identical to SEQ ID NO: 15350
  chr8:8673494-8673534
  hypo

SEQ ID NO: 46990 - DNA, 45 bp, Homo sapiens; identical to SEQ ID NO: 15351
  chr8:8680436-8680481
  hypo

SEQ ID NO: 46991 - DNA, 56 bp, Homo sapiens; identical to SEQ ID NO: 15352
  chr8:8680486-8680542
  hypo

SEQ ID NO: 46992 - DNA, 31 bp, Homo sapiens; identical to SEQ ID NO: 15353
  chr8:8680545-8680576
  hypo

SEQ ID NO: 46993 - DNA, 31 bp, Homo sapiens; identical to SEQ ID NO: 15354
  chr8:8681181-8681212
  hypo

SEQ ID NO: 46994 - DNA, 37 bp, Homo sapiens
  chr8:8681222-8681259
  hypo
tgaacccacaggtcaccgagaagagcatcacctgcga

SEQ ID NO: 46995 - DNA, 31 bp, Homo sapiens; identical to SEQ ID NO: 15356
  chr8:8682667-8682698
  hypo

SEQ ID NO: 46996 - DNA, 31 bp, Homo sapiens; identical to SEQ ID NO: 15357
  chr8:8687219-8687250
  hypo

SEQ ID NO: 46997 - DNA, 30 bp, Homo sapiens; identical to SEQ ID NO: 15358
  chr8:8689405-8689435
  hypo

SEQ ID NO: 46998 - DNA, 49 bp, Homo sapiens; identical to SEQ ID NO: 15359
  chr8:8690236-8690285
  hypo

SEQ ID NO: 46999 - DNA, 36 bp, Homo sapiens; identical to SEQ ID NO: 15360
  chr8:8690311-8690347
  hypo

SEQ ID NO: 47000 - DNA, 31 bp, Homo sapiens; identical to SEQ ID NO: 15361
  chr8:8690365-8690396
  hypo

SEQ ID NO: 47001 - DNA, 31 bp, Homo sapiens; identical to SEQ ID NO: 15362
  chr8:8692862-8692893
  hypo

SEQ ID NO: 47002 - DNA, 64 bp, Homo sapiens; identical to SEQ ID NO: 15363
  chr8:8692897-8692961
  hypo

SEQ ID NO: 47003 - DNA, 31 bp, Homo sapiens; identical to SEQ ID NO: 15364
  chr8:8693006-8693037
  hypo

SEQ ID NO: 47004 - DNA, 31 bp, Homo sapiens; identical to SEQ ID NO: 15366
  chr8:8698201-8698232
  hypo

SEQ ID NO: 47005 - DNA, 44 bp, Homo sapiens; identical to SEQ ID NO: 15368
  chr8:8712642-8712686
  hypo

SEQ ID NO: 47006 - DNA, 31 bp, Homo sapiens; identical to SEQ ID NO: 15369
  chr8:8712745-8712776
  hypo

SEQ ID NO: 47007 - DNA, 31 bp, Homo sapiens; identical to SEQ ID NO: 15370
  chr8:8712793-8712824
  hypo

SEQ ID NO: 47008 - DNA, 30 bp, Homo sapiens; identical to SEQ ID NO: 15371
  chr8:8725340-8725370
  hypo

SEQ ID NO: 47009 - DNA, 80 bp, Homo sapiens; identical to SEQ ID NO: 3222
  chr8:8750283-8750363
  hypo

SEQ ID NO: 47010 - DNA, 73 bp, Homo sapiens; identical to SEQ ID NO: 3223
  chr8:8750475-8750548
  hypo

SEQ ID NO: 47011 - DNA, 105 bp, Homo sapiens; identical to SEQ ID NO: 3224
  chr8:8750554-8750659
  hypo

SEQ ID NO: 47012 - DNA, 31 bp, Homo sapiens; identical to SEQ ID NO: 15375
  chr8:8768214-8768245
  hypo

SEQ ID NO: 47013 - DNA, 31 bp, Homo sapiens; identical to SEQ ID NO: 15377
  chr8:8780185-8780216
  hypo

SEQ ID NO: 47014 - DNA, 31 bp, Homo sapiens; identical to SEQ ID NO: 15378
  chr8:8806386-8806417
  hypo

SEQ ID NO: 47015 - DNA, 31 bp, Homo sapiens; identical to SEQ ID NO: 3225
  chr8:8820809-8820840
  hypo

SEQ ID NO: 47016 - DNA, 31 bp, Homo sapiens; identical to SEQ ID NO: 15380
  chr8:8842048-8842079
  hypo

SEQ ID NO: 47017 - DNA, 33 bp, Homo sapiens; identical to SEQ ID NO: 15381
  chr8:8850262-8850295
  hypo

SEQ ID NO: 47018 - DNA, 31 bp, Homo sapiens; identical to SEQ ID NO: 15382
  chr8:8851528-8851559
  hypo

SEQ ID NO: 47019 - DNA, 31 bp, Homo sapiens; identical to SEQ ID NO: 15383
  chr8:8922914-8922945
  hypo

SEQ ID NO: 47020 - DNA, 31 bp, Homo sapiens; identical to SEQ ID NO: 15384
  chr8:8926654-8926685
  hypo

SEQ ID NO: 47021 - DNA, 20 bp, Homo sapiens
  chr8:9686535-9686555
  hypo
ttcatttaatgggatccgga

SEQ ID NO: 47022 - DNA, 31 bp, Homo sapiens; identical to SEQ ID NO: 3226
  chr8:10058671-10058702
  hypo

SEQ ID NO: 47023 - DNA, 58 bp, Homo sapiens; identical to SEQ ID NO: 3227
  chr8:10058735-10058793
  hypo

SEQ ID NO: 47024 - DNA, 56 bp, Homo sapiens; identical to SEQ ID NO: 3228
  chr8:10058801-10058857
  hypo

SEQ ID NO: 47025 - DNA, 31 bp, Homo sapiens; identical to SEQ ID NO: 15389
  chr8:10466916-10466947
  hypo

SEQ ID NO: 47026 - DNA, 31 bp, Homo sapiens; identical to SEQ ID NO: 15390
  chr8:10467118-10467149
  hypo

SEQ ID NO: 47027 - DNA, 31 bp, Homo sapiens; identical to SEQ ID NO: 15391
  chr8:10695375-10695406
  hypo

SEQ ID NO: 47028 - DNA, 87 bp, Homo sapiens; identical to SEQ ID NO: 37250
  chr8:10873649-10873736
  hypo

SEQ ID NO: 47029 - DNA, 35 bp, Homo sapiens; identical to SEQ ID NO: 3236
  chr8:11058961-11058996
  hypo

SEQ ID NO: 47030 - DNA, 31 bp, Homo sapiens; identical to SEQ ID NO: 15395
  chr8:11612346-11612377
  hypo

SEQ ID NO: 47031 - DNA, 31 bp, Homo sapiens; identical to SEQ ID NO: 15396
  chr8:11612382-11612413
  hypo

SEQ ID NO: 47032 - DNA, 31 bp, Homo sapiens; identical to SEQ ID NO: 15397
  chr8:11637202-11637233
  hypo

SEQ ID NO: 47033 - DNA, 2 bp, Homo sapiens
  chr8:11704539-11704541
  hypo
cc

SEQ ID NO: 47034 - DNA, 2 bp, Homo sapiens
  chr8:11705916-11705918
  hypo
at

SEQ ID NO: 47035 - DNA, 60 bp, Homo sapiens; identical to SEQ ID NO: 15402
  chr8:11706666-11706726
  hypo

SEQ ID NO: 47036 - DNA, 39 bp, Homo sapiens; identical to SEQ ID NO: 15403
  chr8:11708329-11708368
  hypo

SEQ ID NO: 47037 - DNA, 2 bp, Homo sapiens
  chr8:11708425-11708427
  hypo
ct

SEQ ID NO: 47038 - DNA, 31 bp, Homo sapiens; identical to SEQ ID NO: 3239
  chr8:11726003-11726034
  hypo

SEQ ID NO: 47039 - DNA, 31 bp, Homo sapiens; identical to SEQ ID NO: 3240
  chr8:11726134-11726165
  hypo

SEQ ID NO: 47040 - DNA, 38 bp, Homo sapiens; identical to SEQ ID NO: 3244
  chr8:17434663-17434701
  hypo

SEQ ID NO: 47041 - DNA, 31 bp, Homo sapiens; identical to SEQ ID NO: 15408
  chr8:17489660-17489691
  hypo

SEQ ID NO: 47042 - DNA, 37 bp, Homo sapiens; identical to SEQ ID NO: 15409
  chr8:18381896-18381933
  hypo

SEQ ID NO: 47043 - DNA, 38 bp, Homo sapiens; identical to SEQ ID NO: 15410
  chr8:18474404-18474442
  hypo

SEQ ID NO: 47044 - DNA, 31 bp, Homo sapiens; identical to SEQ ID NO: 15411
  chr8:18797737-18797768
  hypo

SEQ ID NO: 47045 - DNA, 31 bp, Homo sapiens; identical to SEQ ID NO: 3252
  chr8:18870815-18870846
  hypo

SEQ ID NO: 47046 - DNA, 31 bp, Homo sapiens; identical to SEQ ID NO: 15414
  chr8:19068612-19068643
  hypo

SEQ ID NO: 47047 - DNA, 36 bp, Homo sapiens; identical to SEQ ID NO: 15415
  chr8:19094993-19095029
  hypo

SEQ ID NO: 47048 - DNA, 47 bp, Homo sapiens; identical to SEQ ID NO: 15416
  chr8:19095053-19095100
  hypo

SEQ ID NO: 47049 - DNA, 31 bp, Homo sapiens; identical to SEQ ID NO: 15417
  chr8:19192505-19192536
  hypo

SEQ ID NO: 47050 - DNA, 29 bp, Homo sapiens
  chr8:19797405-19797434
  hypo
gcagtcacctctctgccggaggggccctg

SEQ ID NO: 47051 - DNA, 31 bp, Homo sapiens; identical to SEQ ID NO: 15419
  chr8:20793600-20793631
  hypo

SEQ ID NO: 47052 - DNA, 35 bp, Homo sapiens; identical to SEQ ID NO: 15420
  chr8:20793724-20793759
  hypo

SEQ ID NO: 47053 - DNA, 31 bp, Homo sapiens; identical to SEQ ID NO: 15421
  chr8:21590920-21590951
  hypo

SEQ ID NO: 47054 - DNA, 31 bp, Homo sapiens; identical to SEQ ID NO: 15422
  chr8:21590958-21590989
  hypo

SEQ ID NO: 47055 - DNA, 59 bp, Homo sapiens; identical to SEQ ID NO: 15423
  chr8:21591024-21591083
  hypo

SEQ ID NO: 47056 - DNA, 31 bp, Homo sapiens; identical to SEQ ID NO: 15424
  chr8:21591085-21591116
  hypo

SEQ ID NO: 47057 - DNA, 125 bp, Homo sapiens; identical to SEQ ID NO: 3261
  chr8:21906318-21906443
  hypo

SEQ ID NO: 47058 - DNA, 31 bp, Homo sapiens; identical to SEQ ID NO: 15427
  chr8:21910413-21910444
  hypo

SEQ ID NO: 47059 - DNA, 31 bp, Homo sapiens; identical to SEQ ID NO: 15428
  chr8:21931502-21931533
  hypo

SEQ ID NO: 47060 - DNA, 31 bp, Homo sapiens; identical to SEQ ID NO: 15429
  chr8:21932330-21932361
  hypo

SEQ ID NO: 47061 - DNA, 31 bp, Homo sapiens; identical to SEQ ID NO: 15430
  chr8:21940765-21940796
  hypo

SEQ ID NO: 47062 - DNA, 40 bp, Homo sapiens; identical to SEQ ID NO: 15431
  chr8:21961869-21961909
  hypo

SEQ ID NO: 47063 - DNA, 44 bp, Homo sapiens; identical to SEQ ID NO: 15432
  chr8:21977901-21977945
  hypo

SEQ ID NO: 47064 - DNA, 34 bp, Homo sapiens; identical to SEQ ID NO: 15433
  chr8:21978252-21978286
  hypo

SEQ ID NO: 47065 - DNA, 60 bp, Homo sapiens; identical to SEQ ID NO: 15434
  chr8:21978418-21978478
  hypo

SEQ ID NO: 47066 - DNA, 31 bp, Homo sapiens; identical to SEQ ID NO: 15435
  chr8:21979170-21979201
  hypo

SEQ ID NO: 47067 - DNA, 71 bp, Homo sapiens; identical to SEQ ID NO: 15436
  chr8:21981255-21981326
  hypo

SEQ ID NO: 47068 - DNA, 53 bp, Homo sapiens; identical to SEQ ID NO: 15437
  chr8:22006312-22006365
  hypo

SEQ ID NO: 47069 - DNA, 41 bp, Homo sapiens; identical to SEQ ID NO: 15438
  chr8:22052965-22053006
  hypo

SEQ ID NO: 47070 - DNA, 31 bp, Homo sapiens; identical to SEQ ID NO: 15439
  chr8:22071496-22071527
  hypo

SEQ ID NO: 47071 - DNA, 41 bp, Homo sapiens; identical to SEQ ID NO: 15440
  chr8:22073145-22073186
  hypo

SEQ ID NO: 47072 - DNA, 31 bp, Homo sapiens; identical to SEQ ID NO: 15441
  chr8:22088363-22088394
  hypo

SEQ ID NO: 47073 - DNA, 31 bp, Homo sapiens; identical to SEQ ID NO: 15442
  chr8:22396803-22396834
  hypo

SEQ ID NO: 47074 - DNA, 31 bp, Homo sapiens; identical to SEQ ID NO: 15443
  chr8:22432576-22432607
  hypo

SEQ ID NO: 47075 - DNA, 31 bp, Homo sapiens; identical to SEQ ID NO: 15444
  chr8:22482549-22482580
  hypo

SEQ ID NO: 47076 - DNA, 31 bp, Homo sapiens; identical to SEQ ID NO: 15445
  chr8:22854457-22854488
  hypo

SEQ ID NO: 47077 - DNA, 31 bp, Homo sapiens; identical to SEQ ID NO: 3265
  chr8:22857229-22857260
  hypo

SEQ ID NO: 47078 - DNA, 31 bp, Homo sapiens; identical to SEQ ID NO: 15447
  chr8:22874764-22874795
  hypo

SEQ ID NO: 47079 - DNA, 31 bp, Homo sapiens; identical to SEQ ID NO: 15448
  chr8:22874952-22874983
  hypo

SEQ ID NO: 47080 - DNA, 53 bp, Homo sapiens; identical to SEQ ID NO: 15449
  chr8:22875009-22875062
  hypo

SEQ ID NO: 47081 - DNA, 31 bp, Homo sapiens; identical to SEQ ID NO: 15450
  chr8:22875070-22875101
  hypo

SEQ ID NO: 47082 - DNA, 31 bp, Homo sapiens; identical to SEQ ID NO: 15451
  chr8:22875112-22875143
  hypo

SEQ ID NO: 47083 - DNA, 31 bp, Homo sapiens; identical to SEQ ID NO: 15452
  chr8:22875153-22875184
  hypo

SEQ ID NO: 47084 - DNA, 31 bp, Homo sapiens; identical to SEQ ID NO: 15453
  chr8:22875192-22875223
  hypo

SEQ ID NO: 47085 - DNA, 54 bp, Homo sapiens; identical to SEQ ID NO: 15454
  chr8:22984119-22984173
  hypo

SEQ ID NO: 47086 - DNA, 31 bp, Homo sapiens; identical to SEQ ID NO: 15456
  chr8:23177355-23177386
  hypo

SEQ ID NO: 47087 - DNA, 53 bp, Homo sapiens; identical to SEQ ID NO: 3267
  chr8:23386070-23386123
  hypo

SEQ ID NO: 47088 - DNA, 31 bp, Homo sapiens; identical to SEQ ID NO: 3268
  chr8:23386137-23386168
  hypo

SEQ ID NO: 47089 - DNA, 31 bp, Homo sapiens; identical to SEQ ID NO: 3269
  chr8:23386169-23386200
  hypo

SEQ ID NO: 47090 - DNA, 2 bp, Homo sapiens
  chr8:23399593-23399595
  hypo
ag

SEQ ID NO: 47091 - DNA, 47 bp, Homo sapiens; identical to SEQ ID NO: 15461
  chr8:23399691-23399738
  hypo

SEQ ID NO: 47092 - DNA, 2 bp, Homo sapiens
  chr8:23423917-23423919
  hypo
ct

SEQ ID NO: 47093 - DNA, 31 bp, Homo sapiens; identical to SEQ ID NO: 15465
  chr8:25107886-25107917
  hypo

SEQ ID NO: 47094 - DNA, 56 bp, Homo sapiens; identical to SEQ ID NO: 15466
  chr8:25107974-25108030
  hypo

SEQ ID NO: 47095 - DNA, 35 bp, Homo sapiens; identical to SEQ ID NO: 15467
  chr8:25108054-25108089
  hypo

SEQ ID NO: 47096 - DNA, 31 bp, Homo sapiens; identical to SEQ ID NO: 15469
  chr8:25159882-25159913
  hypo

SEQ ID NO: 47097 - DNA, 31 bp, Homo sapiens; identical to SEQ ID NO: 15470
  chr8:25206371-25206402
  hypo

SEQ ID NO: 47098 - DNA, 31 bp, Homo sapiens; identical to SEQ ID NO: 15471
  chr8:25212178-25212209
  hypo

SEQ ID NO: 47099 - DNA, 31 bp, Homo sapiens; identical to SEQ ID NO: 15472
  chr8:25246525-25246556
  hypo

SEQ ID NO: 47100 - DNA, 40 bp, Homo sapiens; identical to SEQ ID NO: 15473
  chr8:25249435-25249475
  hypo

SEQ ID NO: 47101 - DNA, 31 bp, Homo sapiens; identical to SEQ ID NO: 15475
  chr8:25252861-25252892
  hypo

SEQ ID NO: 47102 - DNA, 35 bp, Homo sapiens; identical to SEQ ID NO: 15476
  chr8:25338911-25338946
  hypo

SEQ ID NO: 47103 - DNA, 53 bp, Homo sapiens; identical to SEQ ID NO: 15477
  chr8:26053987-26054040
  hypo

SEQ ID NO: 47104 - DNA, 38 bp, Homo sapiens; identical to SEQ ID NO: 15478
  chr8:26267633-26267671
  hypo

SEQ ID NO: 47105 - DNA, 31 bp, Homo sapiens; identical to SEQ ID NO: 15479
  chr8:26267683-26267714
  hypo

SEQ ID NO: 47106 - DNA, 45 bp, Homo sapiens; identical to SEQ ID NO: 15480
  chr8:26267724-26267769
  hypo

SEQ ID NO: 47107 - DNA, 65 bp, Homo sapiens; identical to SEQ ID NO: 3278
  chr8:26435019-26435084
  hypo

SEQ ID NO: 47108 - DNA, 31 bp, Homo sapiens; identical to SEQ ID NO: 15482
  chr8:26509696-26509727
  hypo

SEQ ID NO: 47109 - DNA, 31 bp, Homo sapiens; identical to SEQ ID NO: 15483
  chr8:26513962-26513993
  hypo

SEQ ID NO: 47110 - DNA, 31 bp, Homo sapiens; identical to SEQ ID NO: 15484
  chr8:27525306-27525337
  hypo

SEQ ID NO: 47111 - DNA, 31 bp, Homo sapiens; identical to SEQ ID NO: 15485
  chr8:27778322-27778353
  hypo

SEQ ID NO: 47112 - DNA, 2 bp, Homo sapiens
  chr8:27931083-27931085
  hypo
gt

SEQ ID NO: 47113 - DNA, 55 bp, Homo sapiens; identical to SEQ ID NO: 15488
  chr8:28208921-28208976
  hypo

SEQ ID NO: 47114 - DNA, 38 bp, Homo sapiens; identical to SEQ ID NO: 15489
  chr8:28208978-28209016
  hypo

SEQ ID NO: 47115 - DNA, 51 bp, Homo sapiens; identical to SEQ ID NO: 15490
  chr8:28209076-28209127
  hypo

SEQ ID NO: 47116 - DNA, 31 bp, Homo sapiens; identical to SEQ ID NO: 3285
  chr8:28242820-28242851
  hypo

SEQ ID NO: 47117 - DNA, 31 bp, Homo sapiens; identical to SEQ ID NO: 3286
  chr8:28242854-28242885
  hypo

SEQ ID NO: 47118 - DNA, 31 bp, Homo sapiens; identical to SEQ ID NO: 15493
  chr8:28266308-28266339
  hypo

SEQ ID NO: 47119 - DNA, 53 bp, Homo sapiens; identical to SEQ ID NO: 15494
  chr8:29212821-29212874
  hypo

SEQ ID NO: 47120 - DNA, 48 bp, Homo sapiens; identical to SEQ ID NO: 15495
  chr8:29212892-29212940
  hypo

SEQ ID NO: 47121 - DNA, 94 bp, Homo sapiens; identical to SEQ ID NO: 15498
  chr8:29949230-29949324
  hypo

SEQ ID NO: 47122 - DNA, 31 bp, Homo sapiens; identical to SEQ ID NO: 15500
  chr8:29958323-29958354
  hypo

SEQ ID NO: 47123 - DNA, 31 bp, Homo sapiens; identical to SEQ ID NO: 15501
  chr8:30092821-30092852
  hypo

SEQ ID NO: 47124 - DNA, 31 bp, Homo sapiens; identical to SEQ ID NO: 15502
  chr8:30161182-30161213
  hypo

SEQ ID NO: 47125 - DNA, 31 bp, Homo sapiens; identical to SEQ ID NO: 15503
  chr8:30162575-30162606
  hypo

SEQ ID NO: 47126 - DNA, 134 bp, Homo sapiens; identical to SEQ ID NO: 3290
  chr8:30241764-30241898
  hypo

SEQ ID NO: 47127 - DNA, 60 bp, Homo sapiens; identical to SEQ ID NO: 3291
  chr8:30241907-30241967
  hypo

SEQ ID NO: 47128 - DNA, 31 bp, Homo sapiens; identical to SEQ ID NO: 3292
  chr8:30241968-30241999
  hypo

SEQ ID NO: 47129 - DNA, 57 bp, Homo sapiens; identical to SEQ ID NO: 3293
  chr8:30242004-30242061
  hypo

SEQ ID NO: 47130 - DNA, 31 bp, Homo sapiens; identical to SEQ ID NO: 15509
  chr8:32621345-32621376
  hypo

SEQ ID NO: 47131 - DNA, 31 bp, Homo sapiens; identical to SEQ ID NO: 15510
  chr8:33417651-33417682
  hypo

SEQ ID NO: 47132 - DNA, 309 bp, Homo sapiens; identical to SEQ ID NO: 3298
  chr8:37553217-37553526
  hypo

SEQ ID NO: 47133 - DNA, 43 bp, Homo sapiens; identical to SEQ ID NO: 3299
  chr8:37553607-37553650
  hypo

SEQ ID NO: 47134 - DNA, 223 bp, Homo sapiens; identical to SEQ ID NO: 3300
  chr8:37553677-37553900
  hypo

SEQ ID NO: 47135 - DNA, 34 bp, Homo sapiens; identical to SEQ ID NO: 15514
  chr8:37673306-37673340
  hypo

SEQ ID NO: 47136 - DNA, 31 bp, Homo sapiens; identical to SEQ ID NO: 15516
  chr8:37914602-37914633
  hypo

SEQ ID NO: 47137 - DNA, 55 bp, Homo sapiens; identical to SEQ ID NO: 15517
  chr8:37946121-37946176
  hypo

SEQ ID NO: 47138 - DNA, 63 bp, Homo sapiens; identical to SEQ ID NO: 15518
  chr8:37946241-37946304
  hypo

SEQ ID NO: 47139 - DNA, 31 bp, Homo sapiens; identical to SEQ ID NO: 15521
  chr8:38223413-38223444
  hypo

SEQ ID NO: 47140 - DNA, 35 bp, Homo sapiens; identical to SEQ ID NO: 15523
  chr8:38279096-38279131
  hypo

SEQ ID NO: 47141 - DNA, 54 bp, Homo sapiens; identical to SEQ ID NO: 15527
  chr8:38786220-38786274
  hypo

SEQ ID NO: 47142 - DNA, 31 bp, Homo sapiens; identical to SEQ ID NO: 15528
  chr8:40157533-40157564
  hypo

SEQ ID NO: 47143 - DNA, 31 bp, Homo sapiens; identical to SEQ ID NO: 15529
  chr8:41141360-41141391
  hypo

SEQ ID NO: 47144 - DNA, 31 bp, Homo sapiens; identical to SEQ ID NO: 15530
  chr8:41325382-41325413
  hypo

SEQ ID NO: 47145 - DNA, 31 bp, Homo sapiens; identical to SEQ ID NO: 15531
  chr8:41325415-41325446
  hypo

SEQ ID NO: 47146 - DNA, 2 bp, Homo sapiens
  chr8:41488145-41488147
  hypo
tg

SEQ ID NO: 47147 - DNA, 2 bp, Homo sapiens
  chr8:42147391-42147393
  hypo
ga

SEQ ID NO: 47148 - DNA, 32 bp, Homo sapiens
  chr8:42147521-42147553
  hypo
cattgcggttggccacccgtcctgggctctgt

SEQ ID NO: 47149 - DNA, 31 bp, Homo sapiens; identical to SEQ ID NO: 15536
  chr8:42255792-42255823
  hypo

SEQ ID NO: 47150 - DNA, 31 bp, Homo sapiens; identical to SEQ ID NO: 15537
  chr8:42293858-42293889
  hypo

SEQ ID NO: 47151 - DNA, 29 bp, Homo sapiens
  chr8:42350492-42350521
  hypo
ccagccttggttttcgattaagtttaagg

SEQ ID NO: 47152 - DNA, 2 bp, Homo sapiens
  chr8:42399255-42399257
  hypo
tc

SEQ ID NO: 47153 - DNA, 15 bp, Homo sapiens
  chr8:42399281-42399296
  hypo
cggtggctcacgctt

SEQ ID NO: 47154 - DNA, 31 bp, Homo sapiens; identical to SEQ ID NO: 15540
  chr8:48092297-48092328
  hypo

SEQ ID NO: 47155 - DNA, 2 bp, Homo sapiens
  chr8:48294167-48294169
  hypo
ct

SEQ ID NO: 47156 - DNA, 31 bp, Homo sapiens; identical to SEQ ID NO: 15542
  chr8:48585926-48585957
  hypo

SEQ ID NO: 47157 - DNA, 292 bp, Homo sapiens; identical to SEQ ID NO: 3319
  chr8:48649724-48650016
  hypo

SEQ ID NO: 47158 - DNA, 37 bp, Homo sapiens; identical to SEQ ID NO: 3320
  chr8:48650189-48650226
  hypo

SEQ ID NO: 47159 - DNA, 48 bp, Homo sapiens; identical to SEQ ID NO: 3321
  chr8:48650239-48650287
  hypo

SEQ ID NO: 47160 - DNA, 31 bp, Homo sapiens; identical to SEQ ID NO: 3322
  chr8:48650303-48650334
  hypo

SEQ ID NO: 47161 - DNA, 107 bp, Homo sapiens; identical to SEQ ID NO: 3323
  chr8:48650382-48650489
  hypo

SEQ ID NO: 47162 - DNA, 71 bp, Homo sapiens; identical to SEQ ID NO: 3325
  chr8:48650937-48651008
  hypo

SEQ ID NO: 47163 - DNA, 38 bp, Homo sapiens; identical to SEQ ID NO: 3326
  chr8:48651054-48651092
  hypo

SEQ ID NO: 47164 - DNA, 31 bp, Homo sapiens; identical to SEQ ID NO: 15550
  chr8:48744145-48744176
  hypo

SEQ ID NO: 47165 - DNA, 31 bp, Homo sapiens; identical to SEQ ID NO: 15551
  chr8:48744183-48744214
  hypo

SEQ ID NO: 47166 - DNA, 31 bp, Homo sapiens; identical to SEQ ID NO: 15552
  chr8:48744502-48744533
  hypo

SEQ ID NO: 47167 - DNA, 31 bp, Homo sapiens; identical to SEQ ID NO: 15553
  chr8:48744542-48744573
  hypo

SEQ ID NO: 47168 - DNA, 31 bp, Homo sapiens; identical to SEQ ID NO: 15554
  chr8:48854639-48854670
  hypo

SEQ ID NO: 47169 - DNA, 56 bp, Homo sapiens; identical to SEQ ID NO: 15555
  chr8:49055452-49055508
  hypo

SEQ ID NO: 47170 - DNA, 31 bp, Homo sapiens; identical to SEQ ID NO: 15556
  chr8:49055538-49055569
  hypo

SEQ ID NO: 47171 - DNA, 31 bp, Homo sapiens; identical to SEQ ID NO: 15557
  chr8:49055591-49055622
  hypo

SEQ ID NO: 47172 - DNA, 44 bp, Homo sapiens; identical to SEQ ID NO: 15558
  chr8:49172891-49172935
  hypo

SEQ ID NO: 47173 - DNA, 78 bp, Homo sapiens; identical to SEQ ID NO: 15559
  chr8:49172985-49173063
  hypo

SEQ ID NO: 47174 - DNA, 31 bp, Homo sapiens; identical to SEQ ID NO: 15560
  chr8:49527632-49527663
  hypo

SEQ ID NO: 47175 - DNA, 31 bp, Homo sapiens; identical to SEQ ID NO: 15561
  chr8:52143268-52143299
  hypo

SEQ ID NO: 47176 - DNA, 31 bp, Homo sapiens; identical to SEQ ID NO: 15562
  chr8:53757576-53757607
  hypo

SEQ ID NO: 47177 - DNA, 31 bp, Homo sapiens; identical to SEQ ID NO: 15563
  chr8:54416852-54416883
  hypo

SEQ ID NO: 47178 - DNA, 31 bp, Homo sapiens; identical to SEQ ID NO: 15564
  chr8:54645444-54645475
  hypo

SEQ ID NO: 47179 - DNA, 90 bp, Homo sapiens; identical to SEQ ID NO: 15565
  chr8:54645499-54645589
  hypo

SEQ ID NO: 47180 - DNA, 38 bp, Homo sapiens; identical to SEQ ID NO: 15568
  chr8:54925430-54925468
  hypo

SEQ ID NO: 47181 - DNA, 31 bp, Homo sapiens; identical to SEQ ID NO: 15569
  chr8:54925496-54925527
  hypo

SEQ ID NO: 47182 - DNA, 31 bp, Homo sapiens; identical to SEQ ID NO: 15570
  chr8:54935857-54935888
  hypo

SEQ ID NO: 47183 - DNA, 59 bp, Homo sapiens; identical to SEQ ID NO: 3332
  chr8:56791950-56792009
  hypo

SEQ ID NO: 47184 - DNA, 31 bp, Homo sapiens; identical to SEQ ID NO: 15572
  chr8:56860458-56860489
  hypo

SEQ ID NO: 47185 - DNA, 2 bp, Homo sapiens
  chr8:62034028-62034030
  hypo
tg

SEQ ID NO: 47186 - DNA, 31 bp, Homo sapiens; identical to SEQ ID NO: 3338
  chr8:62626392-62626423
  hypo

SEQ ID NO: 47187 - DNA, 31 bp, Homo sapiens; identical to SEQ ID NO: 3339
  chr8:62626692-62626723
  hypo

SEQ ID NO: 47188 - DNA, 70 bp, Homo sapiens; identical to SEQ ID NO: 3340
  chr8:62627198-62627268
  hypo

SEQ ID NO: 47189 - DNA, 40 bp, Homo sapiens; identical to SEQ ID NO: 3341
  chr8:62627303-62627343
  hypo

SEQ ID NO: 47190 - DNA, 31 bp, Homo sapiens; identical to SEQ ID NO: 3346
  chr8:67417700-67417731
  hypo

SEQ ID NO: 47191 - DNA, 31 bp, Homo sapiens; identical to SEQ ID NO: 3347
  chr8:67417787-67417818
  hypo

SEQ ID NO: 47192 - DNA, 31 bp, Homo sapiens; identical to SEQ ID NO: 3348
  chr8:67417831-67417862
  hypo

SEQ ID NO: 47193 - DNA, 31 bp, Homo sapiens; identical to SEQ ID NO: 15587
  chr8:68115287-68115318
  hypo

SEQ ID NO: 47194 - DNA, 31 bp, Homo sapiens; identical to SEQ ID NO: 15588
  chr8:68115461-68115492
  hypo

SEQ ID NO: 47195 - DNA, 35 bp, Homo sapiens
  chr8:71017205-71017240
  hypo
aggcgtgagccaccgcgcccagatgatttggcttc

SEQ ID NO: 47196 - DNA, 31 bp, Homo sapiens; identical to SEQ ID NO: 15590
  chr8:71059337-71059368
  hypo

SEQ ID NO: 47197 - DNA, 60 bp, Homo sapiens; identical to SEQ ID NO: 15591
  chr8:74673151-74673211
  hypo

SEQ ID NO: 47198 - DNA, 31 bp, Homo sapiens; identical to SEQ ID NO: 15594
  chr8:80673151-80673182
  hypo

SEQ ID NO: 47199 - DNA, 77 bp, Homo sapiens; identical to SEQ ID NO: 3358
  chr8:81490276-81490353
  hypo

SEQ ID NO: 47200 - DNA, 104 bp, Homo sapiens; identical to SEQ ID NO: 3359
  chr8:81490360-81490464
  hypo

SEQ ID NO: 47201 - DNA, 31 bp, Homo sapiens; identical to SEQ ID NO: 15598
  chr8:81615050-81615081
  hypo

SEQ ID NO: 47202 - DNA, 31 bp, Homo sapiens; identical to SEQ ID NO: 3363
  chr8:81785309-81785340
  hypo

SEQ ID NO: 47203 - DNA, 474 bp, Homo sapiens; identical to SEQ ID NO: 3364
  chr8:81785543-81786017
  hypo

SEQ ID NO: 47204 - DNA, 257 bp, Homo sapiens; identical to SEQ ID NO: 3366
  chr8:81786400-81786657
  hypo

SEQ ID NO: 47205 - DNA, 42 bp, Homo sapiens; identical to SEQ ID NO: 37363
  chr8:82193698-82193740
  hypo

SEQ ID NO: 47206 - DNA, 30 bp, Homo sapiens; identical to SEQ ID NO: 15608
  chr8:82680453-82680483
  hypo

SEQ ID NO: 47207 - DNA, 90 bp, Homo sapiens; identical to SEQ ID NO: 3376
  chr8:87527031-87527121
  hypo

SEQ ID NO: 47208 - DNA, 31 bp, Homo sapiens; identical to SEQ ID NO: 3377
  chr8:91657492-91657523
  hypo

SEQ ID NO: 47209 - DNA, 2 bp, Homo sapiens
  chr8:92083522-92083524
  hypo
tg

SEQ ID NO: 47210 - DNA, 13 bp, Homo sapiens
  chr8:95650754-95650767
  hypo
ttacaggcgtgag

SEQ ID NO: 47211 - DNA, 56 bp, Homo sapiens; identical to SEQ ID NO: 3381
  chr8:95654442-95654498
  hypo

SEQ ID NO: 47212 - DNA, 48 bp, Homo sapiens; identical to SEQ ID NO: 3382
  chr8:95654507-95654555
  hypo

SEQ ID NO: 47213 - DNA, 31 bp, Homo sapiens; identical to SEQ ID NO: 15620
  chr8:96145223-96145254
  hypo

SEQ ID NO: 47214 - DNA, 58 bp, Homo sapiens; identical to SEQ ID NO: 15621
  chr8:96145255-96145313
  hypo

SEQ ID NO: 47215 - DNA, 31 bp, Homo sapiens; identical to SEQ ID NO: 15622
  chr8:96145380-96145411
  hypo

SEQ ID NO: 47216 - DNA, 49 bp, Homo sapiens; identical to SEQ ID NO: 3383
  chr8:96145957-96146006
  hypo

SEQ ID NO: 47217 - DNA, 370 bp, Homo sapiens; identical to SEQ ID NO: 3384
  chr8:96146109-96146479
  hypo

SEQ ID NO: 47218 - DNA, 39 bp, Homo sapiens; identical to SEQ ID NO: 15626
  chr8:96229504-96229543
  hypo

SEQ ID NO: 47219 - DNA, 31 bp, Homo sapiens; identical to SEQ ID NO: 15627
  chr8:96232002-96232033
  hypo

SEQ ID NO: 47220 - DNA, 37 bp, Homo sapiens; identical to SEQ ID NO: 37374
  chr8:97657754-97657791
  hypo

SEQ ID NO: 47221 - DNA, 31 bp, Homo sapiens; identical to SEQ ID NO: 15630
  chr8:99440634-99440665
  hypo

SEQ ID NO: 47222 - DNA, 31 bp, Homo sapiens; identical to SEQ ID NO: 15633
  chr8:102039314-102039345
  hypo

SEQ ID NO: 47223 - DNA, 31 bp, Homo sapiens; identical to SEQ ID NO: 15634
  chr8:102039359-102039390
  hypo

SEQ ID NO: 47224 - DNA, 31 bp, Homo sapiens; identical to SEQ ID NO: 15635
  chr8:102039435-102039466
  hypo

SEQ ID NO: 47225 - DNA, 23 bp, Homo sapiens
  chr8:102039470-102039493
  hypo
cagctgtcttagtcaccgcattc

SEQ ID NO: 47226 - DNA, 41 bp, Homo sapiens; identical to SEQ ID NO: 15637
  chr8:102190374-102190415
  hypo

SEQ ID NO: 47227 - DNA, 57 bp, Homo sapiens; identical to SEQ ID NO: 15638
  chr8:102190507-102190564
  hypo

SEQ ID NO: 47228 - DNA, 31 bp, Homo sapiens; identical to SEQ ID NO: 15639
  chr8:102450881-102450912
  hypo

SEQ ID NO: 47229 - DNA, 31 bp, Homo sapiens; identical to SEQ ID NO: 15640
  chr8:102450920-102450951
  hypo

SEQ ID NO: 47230 - DNA, 58 bp, Homo sapiens; identical to SEQ ID NO: 15641
  chr8:102450954-102451012
  hypo

SEQ ID NO: 47231 - DNA, 59 bp, Homo sapiens; identical to SEQ ID NO: 15642
  chr8:102451041-102451100
  hypo

SEQ ID NO: 47232 - DNA, 43 bp, Homo sapiens; identical to SEQ ID NO: 15643
  chr8:102451103-102451146
  hypo

SEQ ID NO: 47233 - DNA, 41 bp, Homo sapiens; identical to SEQ ID NO: 15644
  chr8:103403084-103403125
  hypo

SEQ ID NO: 47234 - DNA, 31 bp, Homo sapiens; identical to SEQ ID NO: 15645
  chr8:103403149-103403180
  hypo

SEQ ID NO: 47235 - DNA, 34 bp, Homo sapiens; identical to SEQ ID NO: 15646
  chr8:103629515-103629549
  hypo

SEQ ID NO: 47236 - DNA, 31 bp, Homo sapiens; identical to SEQ ID NO: 15648
  chr8:103757770-103757801
  hypo

SEQ ID NO: 47237 - DNA, 38 bp, Homo sapiens; identical to SEQ ID NO: 15649
  chr8:103833089-103833127
  hypo

SEQ ID NO: 47238 - DNA, 31 bp, Homo sapiens; identical to SEQ ID NO: 15650
  chr8:103916555-103916586
  hypo

SEQ ID NO: 47239 - DNA, 46 bp, Homo sapiens; identical to SEQ ID NO: 15651
  chr8:103932059-103932105
  hypo

SEQ ID NO: 47240 - DNA, 31 bp, Homo sapiens; identical to SEQ ID NO: 15652
  chr8:104086526-104086557
  hypo

SEQ ID NO: 47241 - DNA, 54 bp, Homo sapiens; identical to SEQ ID NO: 15653
  chr8:104086565-104086619
  hypo

SEQ ID NO: 47242 - DNA, 31 bp, Homo sapiens; identical to SEQ ID NO: 15654
  chr8:104086646-104086677
  hypo

SEQ ID NO: 47243 - DNA, 31 bp, Homo sapiens; identical to SEQ ID NO: 15655
  chr8:104086695-104086726
  hypo

SEQ ID NO: 47244 - DNA, 31 bp, Homo sapiens; identical to SEQ ID NO: 3399
  chr8:107669717-107669748
  hypo

SEQ ID NO: 47245 - DNA, 31 bp, Homo sapiens; identical to SEQ ID NO: 15658
  chr8:110459065-110459096
  hypo

SEQ ID NO: 47246 - DNA, 2 bp, Homo sapiens
  chr8:117824013-117824015
  hypo
aa

SEQ ID NO: 47247 - DNA, 31 bp, Homo sapiens; identical to SEQ ID NO: 15661
  chr8:118531586-118531617
  hypo

SEQ ID NO: 47248 - DNA, 31 bp, Homo sapiens; identical to SEQ ID NO: 15662
  chr8:118531659-118531690
  hypo

SEQ ID NO: 47249 - DNA, 55 bp, Homo sapiens; identical to SEQ ID NO: 15663
  chr8:118531713-118531768
  hypo

SEQ ID NO: 47250 - DNA, 31 bp, Homo sapiens; identical to SEQ ID NO: 15664
  chr8:118531806-118531837
  hypo

SEQ ID NO: 47251 - DNA, 2 bp, Homo sapiens
  chr8:118532127-118532129
  hypo
at

SEQ ID NO: 47252 - DNA, 13 bp, Homo sapiens
  chr8:118532150-118532163
  hypo
ggtggcttatgcc

SEQ ID NO: 47253 - DNA, 31 bp, Homo sapiens; identical to SEQ ID NO: 3403
  chr8:119123497-119123528
  hypo

SEQ ID NO: 47254 - DNA, 31 bp, Homo sapiens; identical to SEQ ID NO: 3404
  chr8:119123674-119123705
  hypo

SEQ ID NO: 47255 - DNA, 39 bp, Homo sapiens; identical to SEQ ID NO: 15669
  chr8:122245399-122245438
  hypo

SEQ ID NO: 47256 - DNA, 2 bp, Homo sapiens
  chr8:123695488-123695490
  hypo
tg

SEQ ID NO: 47257 - DNA, 2 bp, Homo sapiens
  chr8:124055129-124055131
  hypo
at

SEQ ID NO: 47258 - DNA, 31 bp, Homo sapiens; identical to SEQ ID NO: 15675
  chr8:124163978-124164009
  hypo

SEQ ID NO: 47259 - DNA, 31 bp, Homo sapiens; identical to SEQ ID NO: 15676
  chr8:124164019-124164050
  hypo

SEQ ID NO: 47260 - DNA, 31 bp, Homo sapiens; identical to SEQ ID NO: 15677
  chr8:124164065-124164096
  hypo

SEQ ID NO: 47261 - DNA, 55 bp, Homo sapiens; identical to SEQ ID NO: 15678
  chr8:124164100-124164155
  hypo

SEQ ID NO: 47262 - DNA, 31 bp, Homo sapiens; identical to SEQ ID NO: 15680
  chr8:124247664-124247695
  hypo

SEQ ID NO: 47263 - DNA, 71 bp, Homo sapiens; identical to SEQ ID NO: 15681
  chr8:124247735-124247806
  hypo

SEQ ID NO: 47264 - DNA, 31 bp, Homo sapiens; identical to SEQ ID NO: 15683
  chr8:124532973-124533004
  hypo

SEQ ID NO: 47265 - DNA, 31 bp, Homo sapiens; identical to SEQ ID NO: 15684
  chr8:124533014-124533045
  hypo

SEQ ID NO: 47266 - DNA, 31 bp, Homo sapiens; identical to SEQ ID NO: 15685
  chr8:124553866-124553897
  hypo

SEQ ID NO: 47267 - DNA, 2 bp, Homo sapiens
  chr8:125452301-125452303
  hypo
tt

SEQ ID NO: 47268 - DNA, 31 bp, Homo sapiens; identical to SEQ ID NO: 15688
  chr8:125680996-125681027
  hypo

SEQ ID NO: 47269 - DNA, 39 bp, Homo sapiens; identical to SEQ ID NO: 15691
  chr8:126042841-126042880
  hypo

SEQ ID NO: 47270 - DNA, 31 bp, Homo sapiens; identical to SEQ ID NO: 15692
  chr8:126044383-126044414
  hypo

SEQ ID NO: 47271 - DNA, 31 bp, Homo sapiens; identical to SEQ ID NO: 3411
  chr8:127570026-127570057
  hypo

SEQ ID NO: 47272 - DNA, 163 bp, Homo sapiens; identical to SEQ ID NO: 3414
  chr8:127570640-127570803
  hypo

SEQ ID NO: 47273 - DNA, 2 bp, Homo sapiens
  chr8:128861839-128861841
  hypo
ga

SEQ ID NO: 47274 - DNA, 37 bp, Homo sapiens; identical to SEQ ID NO: 15697
  chr8:128861890-128861927
  hypo

SEQ ID NO: 47275 - DNA, 37 bp, Homo sapiens; identical to SEQ ID NO: 15698
  chr8:128861941-128861978
  hypo

SEQ ID NO: 47276 - DNA, 31 bp, Homo sapiens; identical to SEQ ID NO: 15699
  chr8:128872593-128872624
  hypo

SEQ ID NO: 47277 - DNA, 2 bp, Homo sapiens
  chr8:129069802-129069804
  hypo
cc

SEQ ID NO: 47278 - DNA, 31 bp, Homo sapiens; identical to SEQ ID NO: 15703
  chr8:131412441-131412472
  hypo

SEQ ID NO: 47279 - DNA, 31 bp, Homo sapiens; identical to SEQ ID NO: 15705
  chr8:133182608-133182639
  hypo

SEQ ID NO: 47280 - DNA, 2 bp, Homo sapiens
  chr8:133686744-133686746
  hypo
at

SEQ ID NO: 47281 - DNA, 133 bp, Homo sapiens; identical to SEQ ID NO: 3419
  chr8:134308982-134309115
  hypo

SEQ ID NO: 47282 - DNA, 133 bp, Homo sapiens; identical to SEQ ID NO: 3420
  chr8:134309262-134309395
  hypo

SEQ ID NO: 47283 - DNA, 31 bp, Homo sapiens; identical to SEQ ID NO: 3421
  chr8:134581318-134581349
  hypo

SEQ ID NO: 47284 - DNA, 72 bp, Homo sapiens; identical to SEQ ID NO: 37398
  chr8:134583293-134583365
  hypo

SEQ ID NO: 47285 - DNA, 76 bp, Homo sapiens; identical to SEQ ID NO: 3423
  chr8:134583478-134583554
  hypo

SEQ ID NO: 47286 - DNA, 31 bp, Homo sapiens; identical to SEQ ID NO: 3424
  chr8:135703767-135703798
  hypo

SEQ ID NO: 47287 - DNA, 31 bp, Homo sapiens; identical to SEQ ID NO: 15717
  chr8:140920091-140920122
  hypo

SEQ ID NO: 47288 - DNA, 2 bp, Homo sapiens
  chr8:141106959-141106961
  hypo
ag

SEQ ID NO: 47289 - DNA, 31 bp, Homo sapiens; identical to SEQ ID NO: 15719
  chr8:141107013-141107044
  hypo

SEQ ID NO: 47290 - DNA, 31 bp, Homo sapiens; identical to SEQ ID NO: 15720
  chr8:141107048-141107079
  hypo

SEQ ID NO: 47291 - DNA, 58 bp, Homo sapiens; identical to SEQ ID NO: 15721
  chr8:141107096-141107154
  hypo

SEQ ID NO: 47292 - DNA, 31 bp, Homo sapiens; identical to SEQ ID NO: 15723
  chr8:141159978-141160009
  hypo

SEQ ID NO: 47293 - DNA, 31 bp, Homo sapiens; identical to SEQ ID NO: 15724
  chr8:141231022-141231053
  hypo

SEQ ID NO: 47294 - DNA, 2 bp, Homo sapiens
  chr8:141588007-141588009
  hypo
tc

SEQ ID NO: 47295 - DNA, 31 bp, Homo sapiens; identical to SEQ ID NO: 15728
  chr8:141588428-141588459
  hypo

SEQ ID NO: 47296 - DNA, 81 bp, Homo sapiens; identical to SEQ ID NO: 15729
  chr8:141589814-141589895
  hypo

SEQ ID NO: 47297 - DNA, 31 bp, Homo sapiens; identical to SEQ ID NO: 15730
  chr8:141589908-141589939
  hypo

SEQ ID NO: 47298 - DNA, 31 bp, Homo sapiens; identical to SEQ ID NO: 15731
  chr8:141589945-141589976
  hypo

SEQ ID NO: 47299 - DNA, 2 bp, Homo sapiens
  chr8:141594856-141594858
  hypo
ac

SEQ ID NO: 47300 - DNA, 31 bp, Homo sapiens; identical to SEQ ID NO: 15736
  chr8:141613217-141613248
  hypo

SEQ ID NO: 47301 - DNA, 31 bp, Homo sapiens; identical to SEQ ID NO: 15737
  chr8:141634056-141634087
  hypo

SEQ ID NO: 47302 - DNA, 82 bp, Homo sapiens; identical to SEQ ID NO: 3426
  chr8:141644413-141644495
  hypo

SEQ ID NO: 47303 - DNA, 31 bp, Homo sapiens; identical to SEQ ID NO: 15739
  chr8:141704909-141704940
  hypo

SEQ ID NO: 47304 - DNA, 31 bp, Homo sapiens; identical to SEQ ID NO: 15740
  chr8:141705098-141705129
  hypo

SEQ ID NO: 47305 - DNA, 31 bp, Homo sapiens; identical to SEQ ID NO: 15742
  chr8:141745320-141745351
  hypo

SEQ ID NO: 47306 - DNA, 60 bp, Homo sapiens; identical to SEQ ID NO: 15743
  chr8:141745366-141745426
  hypo

SEQ ID NO: 47307 - DNA, 35 bp, Homo sapiens; identical to SEQ ID NO: 15744
  chr8:141745462-141745497
  hypo

SEQ ID NO: 47308 - DNA, 31 bp, Homo sapiens; identical to SEQ ID NO: 15745
  chr8:141761240-141761271
  hypo

SEQ ID NO: 47309 - DNA, 31 bp, Homo sapiens; identical to SEQ ID NO: 3427
  chr8:142010383-142010414
  hypo

SEQ ID NO: 47310 - DNA, 48 bp, Homo sapiens; identical to SEQ ID NO: 3428
  chr8:142010549-142010597
  hypo

SEQ ID NO: 47311 - DNA, 39 bp, Homo sapiens; identical to SEQ ID NO: 3429
  chr8:142010629-142010668
  hypo

SEQ ID NO: 47312 - DNA, 109 bp, Homo sapiens; identical to SEQ ID NO: 3430
  chr8:142010702-142010811
  hypo

SEQ ID NO: 47313 - DNA, 38 bp, Homo sapiens; identical to SEQ ID NO: 3431
  chr8:142011006-142011044
  hypo

SEQ ID NO: 47314 - DNA, 31 bp, Homo sapiens; identical to SEQ ID NO: 3433
  chr8:142011161-142011192
  hypo

SEQ ID NO: 47315 - DNA, 397 bp, Homo sapiens; identical to SEQ ID NO: 3434
  chr8:142011193-142011590
  hypo

SEQ ID NO: 47316 - DNA, 73 bp, Homo sapiens; identical to SEQ ID NO: 3435
  chr8:142011606-142011679
  hypo

SEQ ID NO: 47317 - DNA, 44 bp, Homo sapiens; identical to SEQ ID NO: 3436
  chr8:142011876-142011920
  hypo

SEQ ID NO: 47318 - DNA, 182 bp, Homo sapiens; identical to SEQ ID NO: 3437
  chr8:142012050-142012232
  hypo

SEQ ID NO: 47319 - DNA, 31 bp, Homo sapiens; identical to SEQ ID NO: 15757
  chr8:142030712-142030743
  hypo

SEQ ID NO: 47320 - DNA, 31 bp, Homo sapiens; identical to SEQ ID NO: 15758
  chr8:142078609-142078640
  hypo

SEQ ID NO: 47321 - DNA, 63 bp, Homo sapiens; identical to SEQ ID NO: 15759
  chr8:142227489-142227552
  hypo

SEQ ID NO: 47322 - DNA, 49 bp, Homo sapiens; identical to SEQ ID NO: 15760
  chr8:142227560-142227609
  hypo

SEQ ID NO: 47323 - DNA, 31 bp, Homo sapiens; identical to SEQ ID NO: 15761
  chr8:142240706-142240737
  hypo

SEQ ID NO: 47324 - DNA, 2 bp, Homo sapiens
  chr8:142243947-142243949
  hypo
ag

SEQ ID NO: 47325 - DNA, 2 bp, Homo sapiens
  chr8:142290790-142290792
  hypo
ca

SEQ ID NO: 47326 - DNA, 50 bp, Homo sapiens; identical to SEQ ID NO: 3440
  chr8:142297707-142297757
  hypo

SEQ ID NO: 47327 - DNA, 43 bp, Homo sapiens; identical to SEQ ID NO: 15767
  chr8:142349884-142349927
  hypo

SEQ ID NO: 47328 - DNA, 31 bp, Homo sapiens; identical to SEQ ID NO: 15768
  chr8:142349956-142349987
  hypo

SEQ ID NO: 47329 - DNA, 31 bp, Homo sapiens; identical to SEQ ID NO: 15769
  chr8:142350117-142350148
  hypo

SEQ ID NO: 47330 - DNA, 53 bp, Homo sapiens; identical to SEQ ID NO: 15770
  chr8:142359674-142359727
  hypo

SEQ ID NO: 47331 - DNA, 60 bp, Homo sapiens; identical to SEQ ID NO: 15771
  chr8:142359752-142359812
  hypo

SEQ ID NO: 47332 - DNA, 31 bp, Homo sapiens; identical to SEQ ID NO: 15772
  chr8:142359828-142359859
  hypo

SEQ ID NO: 47333 - DNA, 31 bp, Homo sapiens; identical to SEQ ID NO: 15773
  chr8:142374614-142374645
  hypo

SEQ ID NO: 47334 - DNA, 31 bp, Homo sapiens; identical to SEQ ID NO: 15774
  chr8:142374657-142374688
  hypo

SEQ ID NO: 47335 - DNA, 31 bp, Homo sapiens; identical to SEQ ID NO: 15775
  chr8:142374716-142374747
  hypo

SEQ ID NO: 47336 - DNA, 40 bp, Homo sapiens; identical to SEQ ID NO: 15776
  chr8:142374763-142374803
  hypo

SEQ ID NO: 47337 - DNA, 31 bp, Homo sapiens; identical to SEQ ID NO: 15777
  chr8:142383100-142383131
  hypo

SEQ ID NO: 47338 - DNA, 39 bp, Homo sapiens; identical to SEQ ID NO: 15778
  chr8:142383152-142383191
  hypo

SEQ ID NO: 47339 - DNA, 47 bp, Homo sapiens; identical to SEQ ID NO: 15779
  chr8:142383258-142383305
  hypo

SEQ ID NO: 47340 - DNA, 31 bp, Homo sapiens; identical to SEQ ID NO: 15780
  chr8:143353856-143353887
  hypo

SEQ ID NO: 47341 - DNA, 31 bp, Homo sapiens; identical to SEQ ID NO: 15781
  chr8:143360666-143360697
  hypo

SEQ ID NO: 47342 - DNA, 31 bp, Homo sapiens; identical to SEQ ID NO: 15782
  chr8:143367814-143367845
  hypo

SEQ ID NO: 47343 - DNA, 48 bp, Homo sapiens; identical to SEQ ID NO: 15783
  chr8:143369008-143369056
  hypo

SEQ ID NO: 47344 - DNA, 43 bp, Homo sapiens; identical to SEQ ID NO: 15784
  chr8:143369085-143369128
  hypo

SEQ ID NO: 47345 - DNA, 31 bp, Homo sapiens; identical to SEQ ID NO: 15785
  chr8:143369222-143369253
  hypo

SEQ ID NO: 47346 - DNA, 71 bp, Homo sapiens; identical to SEQ ID NO: 15786
  chr8:143397306-143397377
  hypo

SEQ ID NO: 47347 - DNA, 44 bp, Homo sapiens; identical to SEQ ID NO: 15787
  chr8:143397380-143397424
  hypo

SEQ ID NO: 47348 - DNA, 37 bp, Homo sapiens; identical to SEQ ID NO: 15788
  chr8:143397432-143397469
  hypo

SEQ ID NO: 47349 - DNA, 31 bp, Homo sapiens; identical to SEQ ID NO: 15789
  chr8:143400345-143400376
  hypo

SEQ ID NO: 47350 - DNA, 64 bp, Homo sapiens; identical to SEQ ID NO: 15791
  chr8:143410615-143410679
  hypo

SEQ ID NO: 47351 - DNA, 31 bp, Homo sapiens; identical to SEQ ID NO: 15792
  chr8:143410680-143410711
  hypo

SEQ ID NO: 47352 - DNA, 31 bp, Homo sapiens; identical to SEQ ID NO: 15793
  chr8:143425489-143425520
  hypo

SEQ ID NO: 47353 - DNA, 42 bp, Homo sapiens; identical to SEQ ID NO: 3441
  chr8:143429132-143429174
  hypo

SEQ ID NO: 47354 - DNA, 97 bp, Homo sapiens; identical to SEQ ID NO: 15797
  chr8:143660375-143660472
  hypo

SEQ ID NO: 47355 - DNA, 19 bp, Homo sapiens
  chr8:143660669-143660688
  hypo
actccgagggacccccagt

SEQ ID NO: 47356 - DNA, 31 bp, Homo sapiens; identical to SEQ ID NO: 15799
  chr8:143699027-143699058
  hypo

SEQ ID NO: 47357 - DNA, 59 bp, Homo sapiens; identical to SEQ ID NO: 15800
  chr8:143699065-143699124
  hypo

SEQ ID NO: 47358 - DNA, 31 bp, Homo sapiens; identical to SEQ ID NO: 15801
  chr8:143699157-143699188
  hypo

SEQ ID NO: 47359 - DNA, 31 bp, Homo sapiens; identical to SEQ ID NO: 15802
  chr8:143843555-143843586
  hypo

SEQ ID NO: 47360 - DNA, 31 bp, Homo sapiens; identical to SEQ ID NO: 15803
  chr8:143856622-143856653
  hypo

SEQ ID NO: 47361 - DNA, 31 bp, Homo sapiens; identical to SEQ ID NO: 15804
  chr8:144093515-144093546
  hypo

SEQ ID NO: 47362 - DNA, 52 bp, Homo sapiens; identical to SEQ ID NO: 15805
  chr8:144292670-144292722
  hypo

SEQ ID NO: 47363 - DNA, 31 bp, Homo sapiens; identical to SEQ ID NO: 15809
  chr8:144331530-144331561
  hypo

SEQ ID NO: 47364 - DNA, 31 bp, Homo sapiens; identical to SEQ ID NO: 15810
  chr8:144333711-144333742
  hypo

SEQ ID NO: 47365 - DNA, 31 bp, Homo sapiens; identical to SEQ ID NO: 15811
  chr8:144334637-144334668
  hypo

SEQ ID NO: 47366 - DNA, 31 bp, Homo sapiens; identical to SEQ ID NO: 15812
  chr8:144334669-144334700
  hypo

SEQ ID NO: 47367 - DNA, 43 bp, Homo sapiens; identical to SEQ ID NO: 15813
  chr8:144335406-144335449
  hypo

SEQ ID NO: 47368 - DNA, 19 bp, Homo sapiens
  chr8:144343992-144344011
  hypo
gccacgcctgtctccggca

SEQ ID NO: 47369 - DNA, 55 bp, Homo sapiens; identical to SEQ ID NO: 15819
  chr8:144347180-144347235
  hypo

SEQ ID NO: 47370 - DNA, 31 bp, Homo sapiens; identical to SEQ ID NO: 15820
  chr8:144347775-144347806
  hypo

SEQ ID NO: 47371 - DNA, 31 bp, Homo sapiens; identical to SEQ ID NO: 15821
  chr8:144359678-144359709
  hypo

SEQ ID NO: 47372 - DNA, 31 bp, Homo sapiens; identical to SEQ ID NO: 15822
  chr8:144359867-144359898
  hypo

SEQ ID NO: 47373 - DNA, 50 bp, Homo sapiens; identical to SEQ ID NO: 15827
  chr8:144360600-144360650
  hypo

SEQ ID NO: 47374 - DNA, 31 bp, Homo sapiens; identical to SEQ ID NO: 15830
  chr8:144361913-144361944
  hypo

SEQ ID NO: 47375 - DNA, 31 bp, Homo sapiens; identical to SEQ ID NO: 15831
  chr8:144386879-144386910
  hypo

SEQ ID NO: 47376 - DNA, 55 bp, Homo sapiens; identical to SEQ ID NO: 15832
  chr8:144398062-144398117
  hypo

SEQ ID NO: 47377 - DNA, 31 bp, Homo sapiens; identical to SEQ ID NO: 15833
  chr8:144399475-144399506
  hypo

SEQ ID NO: 47378 - DNA, 2 bp, Homo sapiens
  chr8:144414247-144414249
  hypo
gg

SEQ ID NO: 47379 - DNA, 43 bp, Homo sapiens; identical to SEQ ID NO: 15835
  chr8:144414334-144414377
  hypo

SEQ ID NO: 47380 - DNA, 31 bp, Homo sapiens; identical to SEQ ID NO: 15836
  chr8:144446233-144446264
  hypo

SEQ ID NO: 47381 - DNA, 31 bp, Homo sapiens; identical to SEQ ID NO: 15837
  chr8:144449873-144449904
  hypo

SEQ ID NO: 47382 - DNA, 31 bp, Homo sapiens; identical to SEQ ID NO: 15838
  chr8:144461394-144461425
  hypo

SEQ ID NO: 47383 - DNA, 31 bp, Homo sapiens; identical to SEQ ID NO: 15839
  chr8:144461463-144461494
  hypo

SEQ ID NO: 47384 - DNA, 34 bp, Homo sapiens; identical to SEQ ID NO: 15840
  chr8:144461504-144461538
  hypo

SEQ ID NO: 47385 - DNA, 31 bp, Homo sapiens; identical to SEQ ID NO: 15841
  chr8:144574934-144574965
  hypo

SEQ ID NO: 47386 - DNA, 31 bp, Homo sapiens; identical to SEQ ID NO: 15842
  chr8:144590272-144590303
  hypo

SEQ ID NO: 47387 - DNA, 113 bp, Homo sapiens; identical to SEQ ID NO: 37420
  chr8:144636577-144636690
  hypo

SEQ ID NO: 47388 - DNA, 31 bp, Homo sapiens; identical to SEQ ID NO: 3449
  chr8:144640707-144640738
  hypo

SEQ ID NO: 47389 - DNA, 2 bp, Homo sapiens
  chr8:144661900-144661902
  hypo
gg

SEQ ID NO: 47390 - DNA, 30 bp, Homo sapiens
  chr8:144681821-144681851
  hypo
ctcagtgccgactgccggggaggccgtgcg

SEQ ID NO: 47391 - DNA, 54 bp, Homo sapiens; identical to SEQ ID NO: 3451
  chr8:144691795-144691849
  hypo

SEQ ID NO: 47392 - DNA, 31 bp, Homo sapiens; identical to SEQ ID NO: 15853
  chr8:145161407-145161438
  hypo

SEQ ID NO: 47393 - DNA, 31 bp, Homo sapiens; identical to SEQ ID NO: 15854
  chr8:145161471-145161502
  hypo

SEQ ID NO: 47394 - DNA, 84 bp, Homo sapiens; identical to SEQ ID NO: 15855
  chr8:145161520-145161604
  hypo

SEQ ID NO: 47395 - DNA, 31 bp, Homo sapiens; identical to SEQ ID NO: 3454
  chr8:145697428-145697459
  hypo

SEQ ID NO: 47396 - DNA, 31 bp, Homo sapiens; identical to SEQ ID NO: 3455
  chr8:145697478-145697509
  hypo

SEQ ID NO: 47397 - DNA, 36 bp, Homo sapiens; identical to SEQ ID NO: 37428
  chr8:145697521-145697557
  hypo

SEQ ID NO: 47398 - DNA, 31 bp, Homo sapiens; identical to SEQ ID NO: 15859
  chr8:145706678-145706709
  hypo

SEQ ID NO: 47399 - DNA, 31 bp, Homo sapiens; identical to SEQ ID NO: 15860
  chr8:145709415-145709446
  hypo

SEQ ID NO: 47400 - DNA, 31 bp, Homo sapiens; identical to SEQ ID NO: 15861
  chr8:145715362-145715393
  hypo

SEQ ID NO: 47401 - DNA, 39 bp, Homo sapiens; identical to SEQ ID NO: 15862
  chr8:145719388-145719427
  hypo

SEQ ID NO: 47402 - DNA, 2 bp, Homo sapiens
  chr8:145728371-145728373
  hypo
ct

SEQ ID NO: 47403 - DNA, 31 bp, Homo sapiens; identical to SEQ ID NO: 15864
  chr8:145736699-145736730
  hypo

SEQ ID NO: 47404 - DNA, 31 bp, Homo sapiens; identical to SEQ ID NO: 15865
  chr8:145737999-145738030
  hypo

SEQ ID NO: 47405 - DNA, 51 bp, Homo sapiens; identical to SEQ ID NO: 15866
  chr8:145738056-145738107
  hypo

SEQ ID NO: 47406 - DNA, 37 bp, Homo sapiens; identical to SEQ ID NO: 15867
  chr8:145738382-145738419
  hypo

SEQ ID NO: 47407 - DNA, 31 bp, Homo sapiens; identical to SEQ ID NO: 15868
  chr8:145738424-145738455
  hypo

SEQ ID NO: 47408 - DNA, 75 bp, Homo sapiens; identical to SEQ ID NO: 15869
  chr8:145738457-145738532
  hypo

SEQ ID NO: 47409 - DNA, 31 bp, Homo sapiens; identical to SEQ ID NO: 15870
  chr8:145738661-145738692
  hypo

SEQ ID NO: 47410 - DNA, 69 bp, Homo sapiens; identical to SEQ ID NO: 15871
  chr8:145738696-145738765
  hypo

SEQ ID NO: 47411 - DNA, 14 bp, Homo sapiens
  chr8:145751952-145751966
  hypo
atccgctgggcagg

SEQ ID NO: 47412 - DNA, 58 bp, Homo sapiens; identical to SEQ ID NO: 15875
  chr8:145763000-145763058
  hypo

SEQ ID NO: 47413 - DNA, 42 bp, Homo sapiens; identical to SEQ ID NO: 15876
  chr8:145770757-145770799
  hypo

SEQ ID NO: 47414 - DNA, 100 bp, Homo sapiens; identical to SEQ ID NO: 15877
  chr8:145772640-145772740
  hypo

SEQ ID NO: 47415 - DNA, 47 bp, Homo sapiens; identical to SEQ ID NO: 15878
  chr8:145772764-145772811
  hypo

SEQ ID NO: 47416 - DNA, 55 bp, Homo sapiens; identical to SEQ ID NO: 15879
  chr8:145772823-145772878
  hypo

SEQ ID NO: 47417 - DNA, 31 bp, Homo sapiens; identical to SEQ ID NO: 15880
  chr8:145777265-145777296
  hypo

SEQ ID NO: 47418 - DNA, 36 bp, Homo sapiens; identical to SEQ ID NO: 15881
  chr8:145779198-145779234
  hypo

SEQ ID NO: 47419 - DNA, 31 bp, Homo sapiens; identical to SEQ ID NO: 15882
  chr8:145780239-145780270
  hypo

SEQ ID NO: 47420 - DNA, 47 bp, Homo sapiens; identical to SEQ ID NO: 15883
  chr8:145811090-145811137
  hypo

SEQ ID NO: 47421 - DNA, 31 bp, Homo sapiens; identical to SEQ ID NO: 15884
  chr8:145811230-145811261
  hypo

SEQ ID NO: 47422 - DNA, 36 bp, Homo sapiens; identical to SEQ ID NO: 15885
  chr8:145813605-145813641
  hypo

SEQ ID NO: 47423 - DNA, 31 bp, Homo sapiens; identical to SEQ ID NO: 15886
  chr8:145813758-145813789
  hypo

SEQ ID NO: 47424 - DNA, 43 bp, Homo sapiens; identical to SEQ ID NO: 15887
  chr8:145813964-145814007
  hypo

SEQ ID NO: 47425 - DNA, 31 bp, Homo sapiens; identical to SEQ ID NO: 15888
  chr8:145814033-145814064
  hypo

SEQ ID NO: 47426 - DNA, 51 bp, Homo sapiens; identical to SEQ ID NO: 15889
  chr8:145814543-145814594
  hypo

SEQ ID NO: 47427 - DNA, 78 bp, Homo sapiens; identical to SEQ ID NO: 15890
  chr8:145814672-145814750
  hypo

SEQ ID NO: 47428 - DNA, 48 bp, Homo sapiens; identical to SEQ ID NO: 15891
  chr8:145814777-145814825
  hypo

SEQ ID NO: 47429 - DNA, 31 bp, Homo sapiens; identical to SEQ ID NO: 15892
  chr8:145815416-145815447
  hypo

SEQ ID NO: 47430 - DNA, 114 bp, Homo sapiens; identical to SEQ ID NO: 15893
  chr8:145815478-145815592
  hypo

SEQ ID NO: 47431 - DNA, 31 bp, Homo sapiens; identical to SEQ ID NO: 15894
  chr8:145823325-145823356
  hypo

SEQ ID NO: 47432 - DNA, 31 bp, Homo sapiens; identical to SEQ ID NO: 15895
  chr8:145823369-145823400
  hypo

SEQ ID NO: 47433 - DNA, 31 bp, Homo sapiens; identical to SEQ ID NO: 15896
  chr8:145823402-145823433
  hypo

SEQ ID NO: 47434 - DNA, 65 bp, Homo sapiens; identical to SEQ ID NO: 15897
  chr8:145826422-145826487
  hypo

SEQ ID NO: 47435 - DNA, 37 bp, Homo sapiens; identical to SEQ ID NO: 15899
  chr8:145826578-145826615
  hypo

SEQ ID NO: 47436 - DNA, 31 bp, Homo sapiens; identical to SEQ ID NO: 15900
  chr8:145827337-145827368
  hypo

SEQ ID NO: 47437 - DNA, 31 bp, Homo sapiens; identical to SEQ ID NO: 15901
  chr8:145828363-145828394
  hypo

SEQ ID NO: 47438 - DNA, 31 bp, Homo sapiens; identical to SEQ ID NO: 15902
  chr8:145828567-145828598
  hypo

SEQ ID NO: 47439 - DNA, 65 bp, Homo sapiens; identical to SEQ ID NO: 15903
  chr8:145828605-145828670
  hypo

SEQ ID NO: 47440 - DNA, 31 bp, Homo sapiens; identical to SEQ ID NO: 15904
  chr8:145829405-145829436
  hypo

SEQ ID NO: 47441 - DNA, 31 bp, Homo sapiens; identical to SEQ ID NO: 15905
  chr8:145830861-145830892
  hypo

SEQ ID NO: 47442 - DNA, 38 bp, Homo sapiens; identical to SEQ ID NO: 15906
  chr8:145831494-145831532
  hypo

SEQ ID NO: 47443 - DNA, 79 bp, Homo sapiens; identical to SEQ ID NO: 15907
  chr8:145843551-145843630
  hypo

SEQ ID NO: 47444 - DNA, 64 bp, Homo sapiens; identical to SEQ ID NO: 15908
  chr8:145844222-145844286
  hypo

SEQ ID NO: 47445 - DNA, 31 bp, Homo sapiens; identical to SEQ ID NO: 15909
  chr8:145844495-145844526
  hypo

SEQ ID NO: 47446 - DNA, 75 bp, Homo sapiens; identical to SEQ ID NO: 15910
  chr8:145844672-145844747
  hypo

SEQ ID NO: 47447 - DNA, 49 bp, Homo sapiens; identical to SEQ ID NO: 15911
  chr8:145844887-145844936
  hypo

SEQ ID NO: 47448 - DNA, 31 bp, Homo sapiens; identical to SEQ ID NO: 15912
  chr8:145844937-145844968
  hypo

SEQ ID NO: 47449 - DNA, 71 bp, Homo sapiens; identical to SEQ ID NO: 15913
  chr8:145845804-145845875
  hypo

SEQ ID NO: 47450 - DNA, 46 bp, Homo sapiens; identical to SEQ ID NO: 15914
  chr8:145849041-145849087
  hypo

SEQ ID NO: 47451 - DNA, 53 bp, Homo sapiens; identical to SEQ ID NO: 15915
  chr8:145849123-145849176
  hypo

SEQ ID NO: 47452 - DNA, 31 bp, Homo sapiens; identical to SEQ ID NO: 15916
  chr8:145849178-145849209
  hypo

SEQ ID NO: 47453 - DNA, 97 bp, Homo sapiens; identical to SEQ ID NO: 15918
  chr8:145852063-145852160
  hypo

SEQ ID NO: 47454 - DNA, 31 bp, Homo sapiens; identical to SEQ ID NO: 15919
  chr8:145852645-145852676
  hypo

SEQ ID NO: 47455 - DNA, 70 bp, Homo sapiens; identical to SEQ ID NO: 15920
  chr8:145854281-145854351
  hypo

SEQ ID NO: 47456 - DNA, 114 bp, Homo sapiens; identical to SEQ ID NO: 15921
  chr8:145854688-145854802
  hypo

SEQ ID NO: 47457 - DNA, 96 bp, Homo sapiens; identical to SEQ ID NO: 3462
  chr8:145911309-145911405
  hypo

SEQ ID NO: 47458 - DNA, 31 bp, Homo sapiens; identical to SEQ ID NO: 3463
  chr8:145911410-145911441
  hypo

SEQ ID NO: 47459 - DNA, 2 bp, Homo sapiens
  chr8:145979451-145979453
  hypo
ag

SEQ ID NO: 47460 - DNA, 31 bp, Homo sapiens; identical to SEQ ID NO: 15928
  chr8:146046146-146046177
  hypo

SEQ ID NO: 47461 - DNA, 31 bp, Homo sapiens; identical to SEQ ID NO: 15929
  chr8:146046220-146046251
  hypo

SEQ ID NO: 47462 - DNA, 31 bp, Homo sapiens; identical to SEQ ID NO: 3465
  chr8:146052175-146052206
  hypo

SEQ ID NO: 47463 - DNA, 37 bp, Homo sapiens; identical to SEQ ID NO: 3466
  chr8:146078070-146078107
  hypo

SEQ ID NO: 47464 - DNA, 66 bp, Homo sapiens
  chr8:146079313-146079379
  hypo
tgacaggttgggtgcggtggctcacgcctgtaatcccagcactttgggaggcggaggtggacaacc

SEQ ID NO: 47465 - DNA, 58 bp, Homo sapiens; identical to SEQ ID NO: 15934
  chr8:146176521-146176579
  hypo

SEQ ID NO: 47466 - DNA, 2 bp, Homo sapiens
  chr9:377163-377165
  hypo
ag

SEQ ID NO: 47467 - DNA, 31 bp, Homo sapiens; identical to SEQ ID NO: 15936
  chr9:792361-792392
  hypo

SEQ ID NO: 47468 - DNA, 79 bp, Homo sapiens; identical to SEQ ID NO: 15937
  chr9:2718778-2718857
  hypo

SEQ ID NO: 47469 - DNA, 31 bp, Homo sapiens; identical to SEQ ID NO: 15938
  chr9:4622942-4622973
  hypo

SEQ ID NO: 47470 - DNA, 31 bp, Homo sapiens; identical to SEQ ID NO: 15939
  chr9:4714887-4714918
  hypo

SEQ ID NO: 47471 - DNA, 35 bp, Homo sapiens; identical to SEQ ID NO: 15940
  chr9:4714919-4714954
  hypo

SEQ ID NO: 47472 - DNA, 31 bp, Homo sapiens; identical to SEQ ID NO: 15941
  chr9:4771251-4771282
  hypo

SEQ ID NO: 47473 - DNA, 31 bp, Homo sapiens; identical to SEQ ID NO: 15942
  chr9:4864559-4864590
  hypo

SEQ ID NO: 47474 - DNA, 44 bp, Homo sapiens; identical to SEQ ID NO: 15943
  chr9:4987436-4987480
  hypo

SEQ ID NO: 47475 - DNA, 42 bp, Homo sapiens; identical to SEQ ID NO: 15944
  chr9:5418575-5418617
  hypo

SEQ ID NO: 47476 - DNA, 55 bp, Homo sapiens; identical to SEQ ID NO: 3474
  chr9:6412929-6412984
  hypo

SEQ ID NO: 47477 - DNA, 31 bp, Homo sapiens; identical to SEQ ID NO: 15949
  chr9:7164554-7164585
  hypo

SEQ ID NO: 47478 - DNA, 34 bp, Homo sapiens; identical to SEQ ID NO: 15950
  chr9:7164588-7164622
  hypo

SEQ ID NO: 47479 - DNA, 45 bp, Homo sapiens; identical to SEQ ID NO: 15951
  chr9:7164643-7164688
  hypo

SEQ ID NO: 47480 - DNA, 31 bp, Homo sapiens; identical to SEQ ID NO: 15952
  chr9:10964598-10964629
  hypo

SEQ ID NO: 47481 - DNA, 31 bp, Homo sapiens; identical to SEQ ID NO: 3476
  chr9:12776574-12776605
  hypo

SEQ ID NO: 47482 - DNA, 31 bp, Homo sapiens; identical to SEQ ID NO: 15955
  chr9:12776617-12776648
  hypo

SEQ ID NO: 47483 - DNA, 6 bp, Homo sapiens
  chr9:13279298-13279304
  hypo
agcgcc

SEQ ID NO: 47484 - DNA, 47 bp, Homo sapiens; identical to SEQ ID NO: 37448
  chr9:13279406-13279453
  hypo

SEQ ID NO: 47485 - DNA, 31 bp, Homo sapiens; identical to SEQ ID NO: 3478
  chr9:13279546-13279577
  hypo

SEQ ID NO: 47486 - DNA, 37 bp, Homo sapiens; identical to SEQ ID NO: 37450
  chr9:13279597-13279634
  hypo

SEQ ID NO: 47487 - DNA, 21 bp, Homo sapiens
  chr9:13279749-13279770
  hypo
ggggacgcggccgagcaggcc

SEQ ID NO: 47488 - DNA, 31 bp, Homo sapiens; identical to SEQ ID NO: 15959
  chr9:13753040-13753071
  hypo

SEQ ID NO: 47489 - DNA, 83 bp, Homo sapiens; identical to SEQ ID NO: 15960
  chr9:13753090-13753173
  hypo

SEQ ID NO: 47490 - DNA, 31 bp, Homo sapiens; identical to SEQ ID NO: 15961
  chr9:13753202-13753233
  hypo

SEQ ID NO: 47491 - DNA, 31 bp, Homo sapiens; identical to SEQ ID NO: 15963
  chr9:14232122-14232153
  hypo

SEQ ID NO: 47492 - DNA, 31 bp, Homo sapiens; identical to SEQ ID NO: 15964
  chr9:14232178-14232209
  hypo

SEQ ID NO: 47493 - DNA, 61 bp, Homo sapiens; identical to SEQ ID NO: 15965
  chr9:14232273-14232334
  hypo

SEQ ID NO: 47494 - DNA, 105 bp, Homo sapiens; identical to SEQ ID NO: 3481
  chr9:14313927-14314032
  hypo

SEQ ID NO: 47495 - DNA, 135 bp, Homo sapiens; identical to SEQ ID NO: 3482
  chr9:14314038-14314173
  hypo

SEQ ID NO: 47496 - DNA, 86 bp, Homo sapiens; identical to SEQ ID NO: 3483
  chr9:14314196-14314282
  hypo

SEQ ID NO: 47497 - DNA, 31 bp, Homo sapiens; identical to SEQ ID NO: 3484
  chr9:14314538-14314569
  hypo

SEQ ID NO: 47498 - DNA, 39 bp, Homo sapiens; identical to SEQ ID NO: 3485
  chr9:14315070-14315109
  hypo

SEQ ID NO: 47499 - DNA, 411 bp, Homo sapiens; identical to SEQ ID NO: 3486
  chr9:14315263-14315674
  hypo

SEQ ID NO: 47500 - DNA, 31 bp, Homo sapiens; identical to SEQ ID NO: 3487
  chr9:14315779-14315810
  hypo

SEQ ID NO: 47501 - DNA, 43 bp, Homo sapiens; identical to SEQ ID NO: 3488
  chr9:14322292-14322335
  hypo

SEQ ID NO: 47502 - DNA, 181 bp, Homo sapiens; identical to SEQ ID NO: 3489
  chr9:14322352-14322533
  hypo

SEQ ID NO: 47503 - DNA, 383 bp, Homo sapiens; identical to SEQ ID NO: 3490
  chr9:14322614-14322997
  hypo

SEQ ID NO: 47504 - DNA, 31 bp, Homo sapiens; identical to SEQ ID NO: 3491
  chr9:14323107-14323138
  hypo

SEQ ID NO: 47505 - DNA, 31 bp, Homo sapiens; identical to SEQ ID NO: 15977
  chr9:14428822-14428853
  hypo

SEQ ID NO: 47506 - DNA, 31 bp, Homo sapiens; identical to SEQ ID NO: 3493
  chr9:15306648-15306679
  hypo

SEQ ID NO: 47507 - DNA, 113 bp, Homo sapiens; identical to SEQ ID NO: 3494
  chr9:15306719-15306832
  hypo

SEQ ID NO: 47508 - DNA, 31 bp, Homo sapiens; identical to SEQ ID NO: 3495
  chr9:15306895-15306926
  hypo

SEQ ID NO: 47509 - DNA, 134 bp, Homo sapiens; identical to SEQ ID NO: 3496
  chr9:15306998-15307132
  hypo

SEQ ID NO: 47510 - DNA, 31 bp, Homo sapiens; identical to SEQ ID NO: 15983
  chr9:15343233-15343264
  hypo

SEQ ID NO: 47511 - DNA, 64 bp, Homo sapiens; identical to SEQ ID NO: 15984
  chr9:15527747-15527811
  hypo

SEQ ID NO: 47512 - DNA, 31 bp, Homo sapiens; identical to SEQ ID NO: 15985
  chr9:15701646-15701677
  hypo

SEQ ID NO: 47513 - DNA, 34 bp, Homo sapiens; identical to SEQ ID NO: 15988
  chr9:16828976-16829010
  hypo

SEQ ID NO: 47514 - DNA, 31 bp, Homo sapiens; identical to SEQ ID NO: 15989
  chr9:18527897-18527928
  hypo

SEQ ID NO: 47515 - DNA, 31 bp, Homo sapiens; identical to SEQ ID NO: 15991
  chr9:19289482-19289513
  hypo

SEQ ID NO: 47516 - DNA, 31 bp, Homo sapiens; identical to SEQ ID NO: 15993
  chr9:19414879-19414910
  hypo

SEQ ID NO: 47517 - DNA, 170 bp, Homo sapiens; identical to SEQ ID NO: 3499
  chr9:20621047-20621217
  hypo

SEQ ID NO: 47518 - DNA, 34 bp, Homo sapiens; identical to SEQ ID NO: 3500
  chr9:20621272-20621306
  hypo

SEQ ID NO: 47519 - DNA, 276 bp, Homo sapiens; identical to SEQ ID NO: 3501
  chr9:20621639-20621915
  hypo

SEQ ID NO: 47520 - DNA, 31 bp, Homo sapiens; identical to SEQ ID NO: 3502
  chr9:20622091-20622122
  hypo

SEQ ID NO: 47521 - DNA, 70 bp, Homo sapiens; identical to SEQ ID NO: 3503
  chr9:20622136-20622206
  hypo

SEQ ID NO: 47522 - DNA, 41 bp, Homo sapiens; identical to SEQ ID NO: 3504
  chr9:20622217-20622258
  hypo

SEQ ID NO: 47523 - DNA, 2 bp, Homo sapiens
  chr9:21031411-21031413
  hypo
aa

SEQ ID NO: 47524 - DNA, 31 bp, Homo sapiens; identical to SEQ ID NO: 3506
  chr9:21802621-21802652
  hypo

SEQ ID NO: 47525 - DNA, 31 bp, Homo sapiens; identical to SEQ ID NO: 16003
  chr9:26936773-26936804
  hypo

SEQ ID NO: 47526 - DNA, 31 bp, Homo sapiens; identical to SEQ ID NO: 16005
  chr9:33409492-33409523
  hypo

SEQ ID NO: 47527 - DNA, 39 bp, Homo sapiens; identical to SEQ ID NO: 16007
  chr9:33411487-33411526
  hypo

SEQ ID NO: 47528 - DNA, 32 bp, Homo sapiens; identical to SEQ ID NO: 16009
  chr9:33438854-33438886
  hypo

SEQ ID NO: 47529 - DNA, 54 bp, Homo sapiens; identical to SEQ ID NO: 16010
  chr9:33442911-33442965
  hypo

SEQ ID NO: 47530 - DNA, 31 bp, Homo sapiens; identical to SEQ ID NO: 16011
  chr9:33466348-33466379
  hypo

SEQ ID NO: 47531 - DNA, 35 bp, Homo sapiens; identical to SEQ ID NO: 16013
  chr9:34148341-34148376
  hypo

SEQ ID NO: 47532 - DNA, 31 bp, Homo sapiens; identical to SEQ ID NO: 16014
  chr9:34372617-34372648
  hypo

SEQ ID NO: 47533 - DNA, 31 bp, Homo sapiens; identical to SEQ ID NO: 16016
  chr9:34583938-34583969
  hypo

SEQ ID NO: 47534 - DNA, 34 bp, Homo sapiens; identical to SEQ ID NO: 3510
  chr9:35072283-35072317
  hypo

SEQ ID NO: 47535 - DNA, 167 bp, Homo sapiens; identical to SEQ ID NO: 3511
  chr9:35161858-35162025
  hypo

SEQ ID NO: 47536 - DNA, 31 bp, Homo sapiens; identical to SEQ ID NO: 16019
  chr9:35608229-35608260
  hypo

SEQ ID NO: 47537 - DNA, 31 bp, Homo sapiens; identical to SEQ ID NO: 16020
  chr9:35608272-35608303
  hypo

SEQ ID NO: 47538 - DNA, 105 bp, Homo sapiens; identical to SEQ ID NO: 16021
  chr9:35609215-35609320
  hypo

SEQ ID NO: 47539 - DNA, 31 bp, Homo sapiens; identical to SEQ ID NO: 16022
  chr9:35694371-35694402
  hypo

SEQ ID NO: 47540 - DNA, 31 bp, Homo sapiens; identical to SEQ ID NO: 3519
  chr9:35700411-35700442
  hypo

SEQ ID NO: 47541 - DNA, 71 bp, Homo sapiens; identical to SEQ ID NO: 16024
  chr9:35712950-35713021
  hypo

SEQ ID NO: 47542 - DNA, 51 bp, Homo sapiens; identical to SEQ ID NO: 16030
  chr9:36303886-36303937
  hypo

SEQ ID NO: 47543 - DNA, 30 bp, Homo sapiens; identical to SEQ ID NO: 16031
  chr9:36483383-36483413
  hypo

SEQ ID NO: 47544 - DNA, 31 bp, Homo sapiens; identical to SEQ ID NO: 16032
  chr9:36880260-36880291
  hypo

SEQ ID NO: 47545 - DNA, 38 bp, Homo sapiens; identical to SEQ ID NO: 16042
  chr9:37122904-37122942
  hypo

SEQ ID NO: 47546 - DNA, 31 bp, Homo sapiens; identical to SEQ ID NO: 16043
  chr9:37377485-37377516
  hypo

SEQ ID NO: 47547 - DNA, 31 bp, Homo sapiens; identical to SEQ ID NO: 16044
  chr9:37414528-37414559
  hypo

SEQ ID NO: 47548 - DNA, 31 bp, Homo sapiens; identical to SEQ ID NO: 16045
  chr9:37414578-37414609
  hypo

SEQ ID NO: 47549 - DNA, 83 bp, Homo sapiens; identical to SEQ ID NO: 16046
  chr9:37414623-37414706
  hypo

SEQ ID NO: 47550 - DNA, 31 bp, Homo sapiens; identical to SEQ ID NO: 16047
  chr9:37432302-37432333
  hypo

SEQ ID NO: 47551 - DNA, 31 bp, Homo sapiens; identical to SEQ ID NO: 16049
  chr9:37918142-37918173
  hypo

SEQ ID NO: 47552 - DNA, 31 bp, Homo sapiens; identical to SEQ ID NO: 16050
  chr9:37919798-37919829
  hypo

SEQ ID NO: 47553 - DNA, 76 bp, Homo sapiens; identical to SEQ ID NO: 16051
  chr9:37935348-37935424
  hypo

SEQ ID NO: 47554 - DNA, 31 bp, Homo sapiens; identical to SEQ ID NO: 16052
  chr9:37935503-37935534
  hypo

SEQ ID NO: 47555 - DNA, 39 bp, Homo sapiens; identical to SEQ ID NO: 16053
  chr9:37935688-37935727
  hypo

SEQ ID NO: 47556 - DNA, 31 bp, Homo sapiens; identical to SEQ ID NO: 16054
  chr9:37935750-37935781
  hypo

SEQ ID NO: 47557 - DNA, 31 bp, Homo sapiens; identical to SEQ ID NO: 16055
  chr9:37948877-37948908
  hypo

SEQ ID NO: 47558 - DNA, 31 bp, Homo sapiens; identical to SEQ ID NO: 16056
  chr9:37948935-37948966
  hypo

SEQ ID NO: 47559 - DNA, 31 bp, Homo sapiens; identical to SEQ ID NO: 16057
  chr9:37955882-37955913
  hypo

SEQ ID NO: 47560 - DNA, 31 bp, Homo sapiens; identical to SEQ ID NO: 16058
  chr9:37973846-37973877
  hypo

SEQ ID NO: 47561 - DNA, 31 bp, Homo sapiens; identical to SEQ ID NO: 16059
  chr9:37974529-37974560
  hypo

SEQ ID NO: 47562 - DNA, 35 bp, Homo sapiens; identical to SEQ ID NO: 16060
  chr9:37985464-37985499
  hypo

SEQ ID NO: 47563 - DNA, 31 bp, Homo sapiens; identical to SEQ ID NO: 16061
  chr9:37985848-37985879
  hypo

SEQ ID NO: 47564 - DNA, 31 bp, Homo sapiens; identical to SEQ ID NO: 3541
  chr9:37998734-37998765
  hypo

SEQ ID NO: 47565 - DNA, 74 bp, Homo sapiens; identical to SEQ ID NO: 16063
  chr9:38012922-38012996
  hypo

SEQ ID NO: 47566 - DNA, 31 bp, Homo sapiens; identical to SEQ ID NO: 16064
  chr9:38013020-38013051
  hypo

SEQ ID NO: 47567 - DNA, 31 bp, Homo sapiens; identical to SEQ ID NO: 16065
  chr9:38013076-38013107
  hypo

SEQ ID NO: 47568 - DNA, 31 bp, Homo sapiens; identical to SEQ ID NO: 16067
  chr9:38033550-38033581
  hypo

SEQ ID NO: 47569 - DNA, 31 bp, Homo sapiens; identical to SEQ ID NO: 16068
  chr9:38033585-38033616
  hypo

SEQ ID NO: 47570 - DNA, 37 bp, Homo sapiens; identical to SEQ ID NO: 16069
  chr9:38042760-38042797
  hypo

SEQ ID NO: 47571 - DNA, 31 bp, Homo sapiens; identical to SEQ ID NO: 16070
  chr9:38042804-38042835
  hypo

SEQ ID NO: 47572 - DNA, 44 bp, Homo sapiens; identical to SEQ ID NO: 16071
  chr9:38042924-38042968
  hypo

SEQ ID NO: 47573 - DNA, 34 bp, Homo sapiens; identical to SEQ ID NO: 3542
  chr9:38067950-38067984
  hypo

SEQ ID NO: 47574 - DNA, 96 bp, Homo sapiens; identical to SEQ ID NO: 3543
  chr9:38067990-38068086
  hypo

SEQ ID NO: 47575 - DNA, 106 bp, Homo sapiens; identical to SEQ ID NO: 3544
  chr9:38068491-38068597
  hypo

SEQ ID NO: 47576 - DNA, 76 bp, Homo sapiens; identical to SEQ ID NO: 3545
  chr9:38068628-38068704
  hypo

SEQ ID NO: 47577 - DNA, 75 bp, Homo sapiens; identical to SEQ ID NO: 3546
  chr9:38068832-38068907
  hypo

SEQ ID NO: 47578 - DNA, 31 bp, Homo sapiens; identical to SEQ ID NO: 16077
  chr9:38131871-38131902
  hypo

SEQ ID NO: 47579 - DNA, 31 bp, Homo sapiens; identical to SEQ ID NO: 16078
  chr9:38290208-38290239
  hypo

SEQ ID NO: 47580 - DNA, 45 bp, Homo sapiens; identical to SEQ ID NO: 16079
  chr9:38290342-38290387
  hypo

SEQ ID NO: 47581 - DNA, 31 bp, Homo sapiens; identical to SEQ ID NO: 16080
  chr9:38425342-38425373
  hypo

SEQ ID NO: 47582 - DNA, 2 bp, Homo sapiens
  chr9:71655283-71655285
  hypo
ta

SEQ ID NO: 47583 - DNA, 17 bp, Homo sapiens
  chr9:71655302-71655319
  hypo
tgccgggcgcggtggct

SEQ ID NO: 47584 - DNA, 43 bp, Homo sapiens; identical to SEQ ID NO: 3556
  chr9:71736562-71736605
  hypo

SEQ ID NO: 47585 - DNA, 41 bp, Homo sapiens; identical to SEQ ID NO: 3559
  chr9:71788700-71788741
  hypo

SEQ ID NO: 47586 - DNA, 31 bp, Homo sapiens; identical to SEQ ID NO: 3560
  chr9:71788789-71788820
  hypo

SEQ ID NO: 47587 - DNA, 49 bp, Homo sapiens; identical to SEQ ID NO: 3561
  chr9:71788827-71788876
  hypo

SEQ ID NO: 47588 - DNA, 36 bp, Homo sapiens; identical to SEQ ID NO: 16091
  chr9:71800809-71800845
  hypo

SEQ ID NO: 47589 - DNA, 31 bp, Homo sapiens; identical to SEQ ID NO: 16092
  chr9:71836312-71836343
  hypo

SEQ ID NO: 47590 - DNA, 31 bp, Homo sapiens; identical to SEQ ID NO: 3567
  chr9:71881715-71881746
  hypo

SEQ ID NO: 47591 - DNA, 31 bp, Homo sapiens; identical to SEQ ID NO: 16094
  chr9:71884367-71884398
  hypo

SEQ ID NO: 47592 - DNA, 31 bp, Homo sapiens; identical to SEQ ID NO: 16095
  chr9:72271625-72271656
  hypo

SEQ ID NO: 47593 - DNA, 31 bp, Homo sapiens; identical to SEQ ID NO: 3573
  chr9:72374873-72374904
  hypo

SEQ ID NO: 47594 - DNA, 31 bp, Homo sapiens; identical to SEQ ID NO: 3574
  chr9:72874087-72874118
  hypo

SEQ ID NO: 47595 - DNA, 40 bp, Homo sapiens; identical to SEQ ID NO: 37515
  chr9:73027930-73027970
  hypo

SEQ ID NO: 47596 - DNA, 40 bp, Homo sapiens; identical to SEQ ID NO: 3578
  chr9:73028998-73029038
  hypo

SEQ ID NO: 47597 - DNA, 31 bp, Homo sapiens; identical to SEQ ID NO: 3579
  chr9:73035699-73035730
  hypo

SEQ ID NO: 47598 - DNA, 31 bp, Homo sapiens; identical to SEQ ID NO: 16101
  chr9:73152152-73152183
  hypo

SEQ ID NO: 47599 - DNA, 31 bp, Homo sapiens; identical to SEQ ID NO: 16102
  chr9:73220268-73220299
  hypo

SEQ ID NO: 47600 - DNA, 31 bp, Homo sapiens; identical to SEQ ID NO: 16103
  chr9:73984602-73984633
  hypo

SEQ ID NO: 47601 - DNA, 31 bp, Homo sapiens; identical to SEQ ID NO: 16105
  chr9:74418834-74418865
  hypo

SEQ ID NO: 47602 - DNA, 31 bp, Homo sapiens; identical to SEQ ID NO: 16106
  chr9:74622982-74623013
  hypo

SEQ ID NO: 47603 - DNA, 59 bp, Homo sapiens; identical to SEQ ID NO: 3581
  chr9:74639986-74640045
  hypo

SEQ ID NO: 47604 - DNA, 47 bp, Homo sapiens; identical to SEQ ID NO: 3582
  chr9:74640069-74640116
  hypo

SEQ ID NO: 47605 - DNA, 31 bp, Homo sapiens; identical to SEQ ID NO: 3583
  chr9:74640148-74640179
  hypo

SEQ ID NO: 47606 - DNA, 31 bp, Homo sapiens; identical to SEQ ID NO: 16110
  chr9:74794875-74794906
  hypo

SEQ ID NO: 47607 - DNA, 36 bp, Homo sapiens; identical to SEQ ID NO: 16111
  chr9:74794979-74795015
  hypo

SEQ ID NO: 47608 - DNA, 31 bp, Homo sapiens; identical to SEQ ID NO: 16112
  chr9:75005075-75005106
  hypo

SEQ ID NO: 47609 - DNA, 31 bp, Homo sapiens; identical to SEQ ID NO: 16113
  chr9:75005113-75005144
  hypo

SEQ ID NO: 47610 - DNA, 31 bp, Homo sapiens; identical to SEQ ID NO: 16114
  chr9:75005174-75005205
  hypo

SEQ ID NO: 47611 - DNA, 31 bp, Homo sapiens; identical to SEQ ID NO: 16117
  chr9:75049395-75049426
  hypo

SEQ ID NO: 47612 - DNA, 31 bp, Homo sapiens; identical to SEQ ID NO: 16119
  chr9:75083051-75083082
  hypo

SEQ ID NO: 47613 - DNA, 31 bp, Homo sapiens; identical to SEQ ID NO: 16120
  chr9:75083127-75083158
  hypo

SEQ ID NO: 47614 - DNA, 51 bp, Homo sapiens; identical to SEQ ID NO: 16121
  chr9:75083163-75083214
  hypo

SEQ ID NO: 47615 - DNA, 31 bp, Homo sapiens; identical to SEQ ID NO: 16122
  chr9:75083227-75083258
  hypo

SEQ ID NO: 47616 - DNA, 31 bp, Homo sapiens; identical to SEQ ID NO: 16125
  chr9:75130857-75130888
  hypo

SEQ ID NO: 47617 - DNA, 31 bp, Homo sapiens; identical to SEQ ID NO: 16126
  chr9:75136041-75136072
  hypo

SEQ ID NO: 47618 - DNA, 31 bp, Homo sapiens; identical to SEQ ID NO: 16127
  chr9:75136095-75136126
  hypo

SEQ ID NO: 47619 - DNA, 31 bp, Homo sapiens; identical to SEQ ID NO: 16129
  chr9:75160821-75160852
  hypo

SEQ ID NO: 47620 - DNA, 31 bp, Homo sapiens; identical to SEQ ID NO: 16131
  chr9:75256673-75256704
  hypo

SEQ ID NO: 47621 - DNA, 47 bp, Homo sapiens; identical to SEQ ID NO: 16132
  chr9:75429002-75429049
  hypo

SEQ ID NO: 47622 - DNA, 31 bp, Homo sapiens; identical to SEQ ID NO: 16133
  chr9:75429064-75429095
  hypo

SEQ ID NO: 47623 - DNA, 40 bp, Homo sapiens; identical to SEQ ID NO: 16134
  chr9:75429130-75429170
  hypo

SEQ ID NO: 47624 - DNA, 41 bp, Homo sapiens; identical to SEQ ID NO: 16136
  chr9:79012635-79012676
  hypo

SEQ ID NO: 47625 - DNA, 31 bp, Homo sapiens; identical to SEQ ID NO: 16137
  chr9:79651146-79651177
  hypo

SEQ ID NO: 47626 - DNA, 57 bp, Homo sapiens; identical to SEQ ID NO: 16138
  chr9:80076051-80076108
  hypo

SEQ ID NO: 47627 - DNA, 31 bp, Homo sapiens; identical to SEQ ID NO: 16139
  chr9:80076180-80076211
  hypo

SEQ ID NO: 47628 - DNA, 47 bp, Homo sapiens; identical to SEQ ID NO: 16140
  chr9:80076213-80076260
  hypo

SEQ ID NO: 47629 - DNA, 31 bp, Homo sapiens; identical to SEQ ID NO: 16141
  chr9:80113570-80113601
  hypo

SEQ ID NO: 47630 - DNA, 31 bp, Homo sapiens; identical to SEQ ID NO: 16142
  chr9:80116553-80116584
  hypo

SEQ ID NO: 47631 - DNA, 31 bp, Homo sapiens; identical to SEQ ID NO: 16143
  chr9:80137053-80137084
  hypo

SEQ ID NO: 47632 - DNA, 31 bp, Homo sapiens; identical to SEQ ID NO: 16144
  chr9:80137117-80137148
  hypo

SEQ ID NO: 47633 - DNA, 86 bp, Homo sapiens; identical to SEQ ID NO: 16145
  chr9:80137159-80137245
  hypo

SEQ ID NO: 47634 - DNA, 31 bp, Homo sapiens; identical to SEQ ID NO: 16146
  chr9:80141356-80141387
  hypo

SEQ ID NO: 47635 - DNA, 31 bp, Homo sapiens; identical to SEQ ID NO: 16148
  chr9:80272559-80272590
  hypo

SEQ ID NO: 47636 - DNA, 31 bp, Homo sapiens; identical to SEQ ID NO: 16149
  chr9:80272888-80272919
  hypo

SEQ ID NO: 47637 - DNA, 31 bp, Homo sapiens; identical to SEQ ID NO: 16150
  chr9:80304156-80304187
  hypo

SEQ ID NO: 47638 - DNA, 35 bp, Homo sapiens; identical to SEQ ID NO: 16151
  chr9:80315385-80315420
  hypo

SEQ ID NO: 47639 - DNA, 31 bp, Homo sapiens; identical to SEQ ID NO: 16153
  chr9:80475685-80475716
  hypo

SEQ ID NO: 47640 - DNA, 31 bp, Homo sapiens; identical to SEQ ID NO: 16154
  chr9:80488591-80488622
  hypo

SEQ ID NO: 47641 - DNA, 38 bp, Homo sapiens; identical to SEQ ID NO: 16155
  chr9:80501725-80501763
  hypo

SEQ ID NO: 47642 - DNA, 49 bp, Homo sapiens; identical to SEQ ID NO: 16157
  chr9:80533773-80533822
  hypo

SEQ ID NO: 47643 - DNA, 30 bp, Homo sapiens; identical to SEQ ID NO: 16158
  chr9:80534762-80534792
  hypo

SEQ ID NO: 47644 - DNA, 31 bp, Homo sapiens; identical to SEQ ID NO: 16161
  chr9:80544781-80544812
  hypo

SEQ ID NO: 47645 - DNA, 31 bp, Homo sapiens; identical to SEQ ID NO: 16162
  chr9:80546151-80546182
  hypo

SEQ ID NO: 47646 - DNA, 31 bp, Homo sapiens; identical to SEQ ID NO: 16164
  chr9:80563223-80563254
  hypo

SEQ ID NO: 47647 - DNA, 31 bp, Homo sapiens; identical to SEQ ID NO: 16165
  chr9:80570420-80570451
  hypo

SEQ ID NO: 47648 - DNA, 31 bp, Homo sapiens; identical to SEQ ID NO: 16167
  chr9:80591630-80591661
  hypo

SEQ ID NO: 47649 - DNA, 31 bp, Homo sapiens; identical to SEQ ID NO: 16168
  chr9:80642698-80642729
  hypo

SEQ ID NO: 47650 - DNA, 87 bp, Homo sapiens; identical to SEQ ID NO: 3589
  chr9:80646055-80646142
  hypo

SEQ ID NO: 47651 - DNA, 164 bp, Homo sapiens; identical to SEQ ID NO: 3590
  chr9:80646151-80646315
  hypo

SEQ ID NO: 47652 - DNA, 337 bp, Homo sapiens; identical to SEQ ID NO: 37531
  chr9:80646509-80646846
  hypo

SEQ ID NO: 47653 - DNA, 73 bp, Homo sapiens; identical to SEQ ID NO: 3592
  chr9:80646862-80646935
  hypo

SEQ ID NO: 47654 - DNA, 69 bp, Homo sapiens; identical to SEQ ID NO: 37533
  chr9:80647103-80647172
  hypo

SEQ ID NO: 47655 - DNA, 107 bp, Homo sapiens; identical to SEQ ID NO: 37536
  chr9:82185537-82185644
  hypo

SEQ ID NO: 47656 - DNA, 156 bp, Homo sapiens; identical to SEQ ID NO: 37537
  chr9:82185703-82185859
  hypo

SEQ ID NO: 47657 - DNA, 72 bp, Homo sapiens; identical to SEQ ID NO: 3596
  chr9:82185989-82186061
  hypo

SEQ ID NO: 47658 - DNA, 37 bp, Homo sapiens; identical to SEQ ID NO: 16177
  chr9:84130101-84130138
  hypo

SEQ ID NO: 47659 - DNA, 31 bp, Homo sapiens; identical to SEQ ID NO: 16178
  chr9:84205670-84205701
  hypo

SEQ ID NO: 47660 - DNA, 31 bp, Homo sapiens; identical to SEQ ID NO: 16179
  chr9:84291856-84291887
  hypo

SEQ ID NO: 47661 - DNA, 53 bp, Homo sapiens; identical to SEQ ID NO: 3605
  chr9:84303002-84303055
  hypo

SEQ ID NO: 47662 - DNA, 59 bp, Homo sapiens; identical to SEQ ID NO: 3606
  chr9:84303106-84303165
  hypo

SEQ ID NO: 47663 - DNA, 167 bp, Homo sapiens; identical to SEQ ID NO: 3607
  chr9:84303313-84303480
  hypo

SEQ ID NO: 47664 - DNA, 31 bp, Homo sapiens; identical to SEQ ID NO: 16183
  chr9:84456245-84456276
  hypo

SEQ ID NO: 47665 - DNA, 31 bp, Homo sapiens; identical to SEQ ID NO: 16184
  chr9:84460617-84460648
  hypo

SEQ ID NO: 47666 - DNA, 60 bp, Homo sapiens; identical to SEQ ID NO: 16185
  chr9:84530342-84530402
  hypo

SEQ ID NO: 47667 - DNA, 31 bp, Homo sapiens; identical to SEQ ID NO: 16186
  chr9:84530411-84530442
  hypo

SEQ ID NO: 47668 - DNA, 31 bp, Homo sapiens; identical to SEQ ID NO: 16187
  chr9:84530481-84530512
  hypo

SEQ ID NO: 47669 - DNA, 31 bp, Homo sapiens; identical to SEQ ID NO: 16188
  chr9:84640507-84640538
  hypo

SEQ ID NO: 47670 - DNA, 31 bp, Homo sapiens; identical to SEQ ID NO: 16189
  chr9:85076174-85076205
  hypo

SEQ ID NO: 47671 - DNA, 31 bp, Homo sapiens; identical to SEQ ID NO: 16190
  chr9:85485585-85485616
  hypo

SEQ ID NO: 47672 - DNA, 41 bp, Homo sapiens; identical to SEQ ID NO: 16191
  chr9:85673369-85673410
  hypo

SEQ ID NO: 47673 - DNA, 31 bp, Homo sapiens; identical to SEQ ID NO: 16192
  chr9:85673438-85673469
  hypo

SEQ ID NO: 47674 - DNA, 31 bp, Homo sapiens; identical to SEQ ID NO: 16193
  chr9:85683069-85683100
  hypo

SEQ ID NO: 47675 - DNA, 31 bp, Homo sapiens; identical to SEQ ID NO: 3613
  chr9:85834937-85834968
  hypo

SEQ ID NO: 47676 - DNA, 31 bp, Homo sapiens; identical to SEQ ID NO: 16195
  chr9:85927653-85927684
  hypo

SEQ ID NO: 47677 - DNA, 31 bp, Homo sapiens; identical to SEQ ID NO: 16196
  chr9:85944983-85945014
  hypo

SEQ ID NO: 47678 - DNA, 31 bp, Homo sapiens; identical to SEQ ID NO: 16197
  chr9:85948467-85948498
  hypo

SEQ ID NO: 47679 - DNA, 31 bp, Homo sapiens; identical to SEQ ID NO: 16198
  chr9:86036211-86036242
  hypo

SEQ ID NO: 47680 - DNA, 31 bp, Homo sapiens; identical to SEQ ID NO: 16199
  chr9:86518262-86518293
  hypo

SEQ ID NO: 47681 - DNA, 35 bp, Homo sapiens; identical to SEQ ID NO: 16200
  chr9:86590360-86590395
  hypo

SEQ ID NO: 47682 - DNA, 31 bp, Homo sapiens; identical to SEQ ID NO: 16201
  chr9:86691067-86691098
  hypo

SEQ ID NO: 47683 - DNA, 31 bp, Homo sapiens; identical to SEQ ID NO: 16205
  chr9:88490934-88490965
  hypo

SEQ ID NO: 47684 - DNA, 42 bp, Homo sapiens; identical to SEQ ID NO: 16207
  chr9:88672700-88672742
  hypo

SEQ ID NO: 47685 - DNA, 31 bp, Homo sapiens; identical to SEQ ID NO: 16209
  chr9:89699519-89699550
  hypo

SEQ ID NO: 47686 - DNA, 31 bp, Homo sapiens; identical to SEQ ID NO: 16210
  chr9:90439261-90439292
  hypo

SEQ ID NO: 47687 - DNA, 31 bp, Homo sapiens; identical to SEQ ID NO: 16211
  chr9:90483185-90483216
  hypo

SEQ ID NO: 47688 - DNA, 31 bp, Homo sapiens; identical to SEQ ID NO: 16212
  chr9:90483232-90483263
  hypo

SEQ ID NO: 47689 - DNA, 70 bp, Homo sapiens; identical to SEQ ID NO: 16213
  chr9:90483321-90483391
  hypo

SEQ ID NO: 47690 - DNA, 31 bp, Homo sapiens; identical to SEQ ID NO: 16214
  chr9:90492074-90492105
  hypo

SEQ ID NO: 47691 - DNA, 31 bp, Homo sapiens; identical to SEQ ID NO: 16215
  chr9:90500051-90500082
  hypo

SEQ ID NO: 47692 - DNA, 38 bp, Homo sapiens; identical to SEQ ID NO: 16216
  chr9:90583823-90583861
  hypo

SEQ ID NO: 47693 - DNA, 31 bp, Homo sapiens; identical to SEQ ID NO: 16218
  chr9:90849822-90849853
  hypo

SEQ ID NO: 47694 - DNA, 31 bp, Homo sapiens; identical to SEQ ID NO: 16219
  chr9:91114317-91114348
  hypo

SEQ ID NO: 47695 - DNA, 31 bp, Homo sapiens; identical to SEQ ID NO: 16220
  chr9:91119033-91119064
  hypo

SEQ ID NO: 47696 - DNA, 31 bp, Homo sapiens; identical to SEQ ID NO: 16221
  chr9:91119079-91119110
  hypo

SEQ ID NO: 47697 - DNA, 47 bp, Homo sapiens; identical to SEQ ID NO: 16222
  chr9:91119146-91119193
  hypo

SEQ ID NO: 47698 - DNA, 31 bp, Homo sapiens; identical to SEQ ID NO: 16223
  chr9:91119249-91119280
  hypo

SEQ ID NO: 47699 - DNA, 31 bp, Homo sapiens; identical to SEQ ID NO: 16224
  chr9:91119294-91119325
  hypo

SEQ ID NO: 47700 - DNA, 31 bp, Homo sapiens; identical to SEQ ID NO: 16225
  chr9:91138736-91138767
  hypo

SEQ ID NO: 47701 - DNA, 48 bp, Homo sapiens; identical to SEQ ID NO: 16226
  chr9:91140237-91140285
  hypo

SEQ ID NO: 47702 - DNA, 31 bp, Homo sapiens; identical to SEQ ID NO: 16227
  chr9:91366824-91366855
  hypo

SEQ ID NO: 47703 - DNA, 87 bp, Homo sapiens; identical to SEQ ID NO: 16228
  chr9:91614961-91615048
  hypo

SEQ ID NO: 47704 - DNA, 110 bp, Homo sapiens; identical to SEQ ID NO: 16229
  chr9:91616950-91617060
  hypo

SEQ ID NO: 47705 - DNA, 34 bp, Homo sapiens; identical to SEQ ID NO: 16230
  chr9:91617284-91617318
  hypo

SEQ ID NO: 47706 - DNA, 31 bp, Homo sapiens; identical to SEQ ID NO: 16231
  chr9:91781635-91781666
  hypo

SEQ ID NO: 47707 - DNA, 31 bp, Homo sapiens; identical to SEQ ID NO: 16232
  chr9:91943296-91943327
  hypo

SEQ ID NO: 47708 - DNA, 37 bp, Homo sapiens; identical to SEQ ID NO: 16233
  chr9:91997125-91997162
  hypo

SEQ ID NO: 47709 - DNA, 31 bp, Homo sapiens; identical to SEQ ID NO: 16234
  chr9:91997530-91997561
  hypo

SEQ ID NO: 47710 - DNA, 31 bp, Homo sapiens; identical to SEQ ID NO: 16235
  chr9:91997742-91997773
  hypo

SEQ ID NO: 47711 - DNA, 31 bp, Homo sapiens; identical to SEQ ID NO: 16237
  chr9:92238057-92238088
  hypo

SEQ ID NO: 47712 - DNA, 58 bp, Homo sapiens; identical to SEQ ID NO: 16238
  chr9:92249013-92249071
  hypo

SEQ ID NO: 47713 - DNA, 31 bp, Homo sapiens; identical to SEQ ID NO: 16239
  chr9:92249113-92249144
  hypo

SEQ ID NO: 47714 - DNA, 54 bp, Homo sapiens; identical to SEQ ID NO: 16240
  chr9:92249172-92249226
  hypo

SEQ ID NO: 47715 - DNA, 31 bp, Homo sapiens; identical to SEQ ID NO: 16241
  chr9:92720565-92720596
  hypo

SEQ ID NO: 47716 - DNA, 58 bp, Homo sapiens; identical to SEQ ID NO: 16242
  chr9:92725473-92725531
  hypo

SEQ ID NO: 47717 - DNA, 31 bp, Homo sapiens; identical to SEQ ID NO: 16243
  chr9:92725558-92725589
  hypo

SEQ ID NO: 47718 - DNA, 31 bp, Homo sapiens; identical to SEQ ID NO: 16244
  chr9:92725643-92725674
  hypo

SEQ ID NO: 47719 - DNA, 31 bp, Homo sapiens; identical to SEQ ID NO: 3622
  chr9:92859700-92859731
  hypo

SEQ ID NO: 47720 - DNA, 31 bp, Homo sapiens; identical to SEQ ID NO: 16247
  chr9:92929514-92929545
  hypo

SEQ ID NO: 47721 - DNA, 222 bp, Homo sapiens; identical to SEQ ID NO: 3623
  chr9:93955658-93955880
  hypo

SEQ ID NO: 47722 - DNA, 49 bp, Homo sapiens; identical to SEQ ID NO: 37568
  chr9:93956177-93956226
  hypo

SEQ ID NO: 47723 - DNA, 86 bp, Homo sapiens; identical to SEQ ID NO: 3627
  chr9:93956242-93956328
  hypo

SEQ ID NO: 47724 - DNA, 16 bp, Homo sapiens
  chr9:93956429-93956445
  hypo
ttacaaccccccaccc

SEQ ID NO: 47725 - DNA, 55 bp, Homo sapiens; identical to SEQ ID NO: 16254
  chr9:94904616-94904671
  hypo

SEQ ID NO: 47726 - DNA, 31 bp, Homo sapiens; identical to SEQ ID NO: 16255
  chr9:94904676-94904707
  hypo

SEQ ID NO: 47727 - DNA, 31 bp, Homo sapiens; identical to SEQ ID NO: 16256
  chr9:94904725-94904756
  hypo

SEQ ID NO: 47728 - DNA, 45 bp, Homo sapiens; identical to SEQ ID NO: 16257
  chr9:94904782-94904827
  hypo

SEQ ID NO: 47729 - DNA, 31 bp, Homo sapiens; identical to SEQ ID NO: 16258
  chr9:95381362-95381393
  hypo

SEQ ID NO: 47730 - DNA, 2 bp, Homo sapiens
  chr9:95417481-95417483
  hypo
gc

SEQ ID NO: 47731 - DNA, 31 bp, Homo sapiens; identical to SEQ ID NO: 16262
  chr9:95482914-95482945
  hypo

SEQ ID NO: 47732 - DNA, 46 bp, Homo sapiens; identical to SEQ ID NO: 16263
  chr9:95492297-95492343
  hypo

SEQ ID NO: 47733 - DNA, 31 bp, Homo sapiens; identical to SEQ ID NO: 16264
  chr9:95492385-95492416
  hypo

SEQ ID NO: 47734 - DNA, 31 bp, Homo sapiens; identical to SEQ ID NO: 16265
  chr9:95492421-95492452
  hypo

SEQ ID NO: 47735 - DNA, 34 bp, Homo sapiens; identical to SEQ ID NO: 16266
  chr9:95501275-95501309
  hypo

SEQ ID NO: 47736 - DNA, 2 bp, Homo sapiens
  chr9:95501325-95501327
  hypo
cc

SEQ ID NO: 47737 - DNA, 34 bp, Homo sapiens; identical to SEQ ID NO: 16268
  chr9:95501421-95501455
  hypo

SEQ ID NO: 47738 - DNA, 70 bp, Homo sapiens; identical to SEQ ID NO: 16270
  chr9:95687861-95687931
  hypo

SEQ ID NO: 47739 - DNA, 31 bp, Homo sapiens; identical to SEQ ID NO: 16271
  chr9:95687989-95688020
  hypo

SEQ ID NO: 47740 - DNA, 31 bp, Homo sapiens; identical to SEQ ID NO: 16272
  chr9:95688034-95688065
  hypo

SEQ ID NO: 47741 - DNA, 31 bp, Homo sapiens; identical to SEQ ID NO: 16274
  chr9:95707428-95707459
  hypo

SEQ ID NO: 47742 - DNA, 31 bp, Homo sapiens; identical to SEQ ID NO: 16275
  chr9:95771842-95771873
  hypo

SEQ ID NO: 47743 - DNA, 31 bp, Homo sapiens; identical to SEQ ID NO: 16276
  chr9:95913666-95913697
  hypo

SEQ ID NO: 47744 - DNA, 35 bp, Homo sapiens; identical to SEQ ID NO: 16277
  chr9:95952713-95952748
  hypo

SEQ ID NO: 47745 - DNA, 35 bp, Homo sapiens; identical to SEQ ID NO: 16278
  chr9:96070698-96070733
  hypo

SEQ ID NO: 47746 - DNA, 31 bp, Homo sapiens; identical to SEQ ID NO: 16279
  chr9:96081613-96081644
  hypo

SEQ ID NO: 47747 - DNA, 2 bp, Homo sapiens
  chr9:96230168-96230170
  hypo
tc

SEQ ID NO: 47748 - DNA, 14 bp, Homo sapiens
  chr9:96230192-96230206
  hypo
cgctcttgtcgccc

SEQ ID NO: 47749 - DNA, 37 bp, Homo sapiens; identical to SEQ ID NO: 16282
  chr9:96687052-96687089
  hypo

SEQ ID NO: 47750 - DNA, 31 bp, Homo sapiens; identical to SEQ ID NO: 16283
  chr9:96688196-96688227
  hypo

SEQ ID NO: 47751 - DNA, 31 bp, Homo sapiens; identical to SEQ ID NO: 16284
  chr9:97087289-97087320
  hypo

SEQ ID NO: 47752 - DNA, 31 bp, Homo sapiens; identical to SEQ ID NO: 16285
  chr9:97088741-97088772
  hypo

SEQ ID NO: 47753 - DNA, 42 bp, Homo sapiens; identical to SEQ ID NO: 16286
  chr9:97107979-97108021
  hypo

SEQ ID NO: 47754 - DNA, 31 bp, Homo sapiens; identical to SEQ ID NO: 16287
  chr9:97162004-97162035
  hypo

SEQ ID NO: 47755 - DNA, 2 bp, Homo sapiens
  chr9:97317330-97317332
  hypo
ca

SEQ ID NO: 47756 - DNA, 40 bp, Homo sapiens
  chr9:97317672-97317712
  hypo
aggaggagaaggcgttgcaaaaagacgatggggaaaagat

SEQ ID NO: 47757 - DNA, 31 bp, Homo sapiens; identical to SEQ ID NO: 16291
  chr9:97367816-97367847
  hypo

SEQ ID NO: 47758 - DNA, 31 bp, Homo sapiens; identical to SEQ ID NO: 16292
  chr9:97474709-97474740
  hypo

SEQ ID NO: 47759 - DNA, 88 bp, Homo sapiens; identical to SEQ ID NO: 16293
  chr9:97474834-97474922
  hypo

SEQ ID NO: 47760 - DNA, 2 bp, Homo sapiens
  chr9:97674943-97674945
  hypo
ta

SEQ ID NO: 47761 - DNA, 70 bp, Homo sapiens; identical to SEQ ID NO: 16296
  chr9:97674989-97675059
  hypo

SEQ ID NO: 47762 - DNA, 31 bp, Homo sapiens; identical to SEQ ID NO: 16297
  chr9:97679313-97679344
  hypo

SEQ ID NO: 47763 - DNA, 65 bp, Homo sapiens; identical to SEQ ID NO: 16298
  chr9:97679411-97679476
  hypo

SEQ ID NO: 47764 - DNA, 2 bp, Homo sapiens
  chr9:97679481-97679483
  hypo
tc

SEQ ID NO: 47765 - DNA, 31 bp, Homo sapiens; identical to SEQ ID NO: 16300
  chr9:97719454-97719485
  hypo

SEQ ID NO: 47766 - DNA, 113 bp, Homo sapiens; identical to SEQ ID NO: 3634
  chr9:97767418-97767531
  hypo

SEQ ID NO: 47767 - DNA, 92 bp, Homo sapiens; identical to SEQ ID NO: 3635
  chr9:97767681-97767773
  hypo

SEQ ID NO: 47768 - DNA, 54 bp, Homo sapiens; identical to SEQ ID NO: 16304
  chr9:97847399-97847453
  hypo

SEQ ID NO: 47769 - DNA, 31 bp, Homo sapiens; identical to SEQ ID NO: 16305
  chr9:97848253-97848284
  hypo

SEQ ID NO: 47770 - DNA, 34 bp, Homo sapiens; identical to SEQ ID NO: 16306
  chr9:97848638-97848672
  hypo

SEQ ID NO: 47771 - DNA, 2 bp, Homo sapiens
  chr9:97863867-97863869
  hypo
ca

SEQ ID NO: 47772 - DNA, 37 bp, Homo sapiens; identical to SEQ ID NO: 16310
  chr9:97867403-97867440
  hypo

SEQ ID NO: 47773 - DNA, 2 bp, Homo sapiens
  chr9:97891725-97891727
  hypo
tc

SEQ ID NO: 47774 - DNA, 51 bp, Homo sapiens; identical to SEQ ID NO: 16312
  chr9:97891774-97891825
  hypo

SEQ ID NO: 47775 - DNA, 55 bp, Homo sapiens; identical to SEQ ID NO: 16313
  chr9:97891828-97891883
  hypo

SEQ ID NO: 47776 - DNA, 47 bp, Homo sapiens; identical to SEQ ID NO: 3637
  chr9:98268139-98268186
  hypo

SEQ ID NO: 47777 - DNA, 117 bp, Homo sapiens; identical to SEQ ID NO: 3638
  chr9:98273073-98273190
  hypo

SEQ ID NO: 47778 - DNA, 59 bp, Homo sapiens; identical to SEQ ID NO: 3639
  chr9:98273462-98273521
  hypo

SEQ ID NO: 47779 - DNA, 31 bp, Homo sapiens; identical to SEQ ID NO: 3640
  chr9:98273570-98273601
  hypo

SEQ ID NO: 47780 - DNA, 56 bp, Homo sapiens; identical to SEQ ID NO: 3641
  chr9:98273637-98273693
  hypo

SEQ ID NO: 47781 - DNA, 31 bp, Homo sapiens; identical to SEQ ID NO: 16321
  chr9:98356425-98356456
  hypo

SEQ ID NO: 47782 - DNA, 31 bp, Homo sapiens; identical to SEQ ID NO: 16322
  chr9:98369372-98369403
  hypo

SEQ ID NO: 47783 - DNA, 31 bp, Homo sapiens; identical to SEQ ID NO: 3643
  chr9:99145683-99145714
  hypo

SEQ ID NO: 47784 - DNA, 31 bp, Homo sapiens; identical to SEQ ID NO: 16324
  chr9:99199880-99199911
  hypo

SEQ ID NO: 47785 - DNA, 37 bp, Homo sapiens; identical to SEQ ID NO: 3651
  chr9:99416949-99416986
  hypo

SEQ ID NO: 47786 - DNA, 31 bp, Homo sapiens; identical to SEQ ID NO: 3652
  chr9:99417008-99417039
  hypo

SEQ ID NO: 47787 - DNA, 31 bp, Homo sapiens; identical to SEQ ID NO: 3653
  chr9:99417052-99417083
  hypo

SEQ ID NO: 47788 - DNA, 38 bp, Homo sapiens; identical to SEQ ID NO: 3654
  chr9:99417086-99417124
  hypo

SEQ ID NO: 47789 - DNA, 31 bp, Homo sapiens; identical to SEQ ID NO: 3655
  chr9:99417159-99417190
  hypo

SEQ ID NO: 47790 - DNA, 174 bp, Homo sapiens; identical to SEQ ID NO: 3656
  chr9:99417396-99417570
  hypo

SEQ ID NO: 47791 - DNA, 31 bp, Homo sapiens; identical to SEQ ID NO: 16331
  chr9:99803892-99803923
  hypo

SEQ ID NO: 47792 - DNA, 85 bp, Homo sapiens; identical to SEQ ID NO: 16332
  chr9:100297535-100297620
  hypo

SEQ ID NO: 47793 - DNA, 31 bp, Homo sapiens; identical to SEQ ID NO: 16333
  chr9:100297637-100297668
  hypo

SEQ ID NO: 47794 - DNA, 31 bp, Homo sapiens; identical to SEQ ID NO: 16334
  chr9:100297685-100297716
  hypo

SEQ ID NO: 47795 - DNA, 31 bp, Homo sapiens; identical to SEQ ID NO: 16335
  chr9:100308891-100308922
  hypo

SEQ ID NO: 47796 - DNA, 31 bp, Homo sapiens; identical to SEQ ID NO: 16336
  chr9:100308937-100308968
  hypo

SEQ ID NO: 47797 - DNA, 19 bp, Homo sapiens
  chr9:100397712-100397731
  hypo
gagacggagtgtcattctt

SEQ ID NO: 47798 - DNA, 2 bp, Homo sapiens
  chr9:100397978-100397980
  hypo
ca

SEQ ID NO: 47799 - DNA, 40 bp, Homo sapiens; identical to SEQ ID NO: 3661
  chr9:100565761-100565801
  hypo

SEQ ID NO: 47800 - DNA, 220 bp, Homo sapiens; identical to SEQ ID NO: 3662
  chr9:100565845-100566065
  hypo

SEQ ID NO: 47801 - DNA, 31 bp, Homo sapiens; identical to SEQ ID NO: 16343
  chr9:100820495-100820526
  hypo

SEQ ID NO: 47802 - DNA, 33 bp, Homo sapiens
  chr9:100843257-100843290
  hypo
agcctggagaactggccgagctggtgcggtcag

SEQ ID NO: 47803 - DNA, 50 bp, Homo sapiens; identical to SEQ ID NO: 16346
  chr9:100890702-100890752
  hypo

SEQ ID NO: 47804 - DNA, 76 bp, Homo sapiens; identical to SEQ ID NO: 16347
  chr9:100890755-100890831
  hypo

SEQ ID NO: 47805 - DNA, 67 bp, Homo sapiens; identical to SEQ ID NO: 16348
  chr9:100933033-100933100
  hypo

SEQ ID NO: 47806 - DNA, 31 bp, Homo sapiens; identical to SEQ ID NO: 16349
  chr9:100933128-100933159
  hypo

SEQ ID NO: 47807 - DNA, 31 bp, Homo sapiens; identical to SEQ ID NO: 16350
  chr9:100933185-100933216
  hypo

SEQ ID NO: 47808 - DNA, 31 bp, Homo sapiens; identical to SEQ ID NO: 16352
  chr9:101052971-101053002
  hypo

SEQ ID NO: 47809 - DNA, 31 bp, Homo sapiens; identical to SEQ ID NO: 16353
  chr9:101053059-101053090
  hypo

SEQ ID NO: 47810 - DNA, 31 bp, Homo sapiens; identical to SEQ ID NO: 16354
  chr9:101065558-101065589
  hypo

SEQ ID NO: 47811 - DNA, 31 bp, Homo sapiens; identical to SEQ ID NO: 16355
  chr9:101280571-101280602
  hypo

SEQ ID NO: 47812 - DNA, 31 bp, Homo sapiens; identical to SEQ ID NO: 16356
  chr9:101280697-101280728
  hypo

SEQ ID NO: 47813 - DNA, 62 bp, Homo sapiens; identical to SEQ ID NO: 16357
  chr9:101557773-101557835
  hypo

SEQ ID NO: 47814 - DNA, 43 bp, Homo sapiens; identical to SEQ ID NO: 16358
  chr9:101557886-101557929
  hypo

SEQ ID NO: 47815 - DNA, 2 bp, Homo sapiens
  chr9:101557938-101557940
  hypo
ca

SEQ ID NO: 47816 - DNA, 31 bp, Homo sapiens; identical to SEQ ID NO: 16360
  chr9:102591226-102591257
  hypo

SEQ ID NO: 47817 - DNA, 6 bp, Homo sapiens
  chr9:103174700-103174706
  hypo
aaacaa

SEQ ID NO: 47818 - DNA, 31 bp, Homo sapiens
  chr9:103174754-103174785
  hypo
caaaatgtggtatatacggaaccttattcag

SEQ ID NO: 47819 - DNA, 31 bp, Homo sapiens; identical to SEQ ID NO: 16363
  chr9:104365591-104365622
  hypo

SEQ ID NO: 47820 - DNA, 40 bp, Homo sapiens; identical to SEQ ID NO: 16364
  chr9:104365644-104365684
  hypo

SEQ ID NO: 47821 - DNA, 31 bp, Homo sapiens; identical to SEQ ID NO: 16365
  chr9:104365704-104365735
  hypo

SEQ ID NO: 47822 - DNA, 31 bp, Homo sapiens; identical to SEQ ID NO: 16366
  chr9:104365748-104365779
  hypo

SEQ ID NO: 47823 - DNA, 36 bp, Homo sapiens; identical to SEQ ID NO: 16368
  chr9:107144261-107144297
  hypo

SEQ ID NO: 47824 - DNA, 31 bp, Homo sapiens; identical to SEQ ID NO: 16369
  chr9:109606635-109606666
  hypo

SEQ ID NO: 47825 - DNA, 31 bp, Homo sapiens; identical to SEQ ID NO: 16370
  chr9:109686799-109686830
  hypo

SEQ ID NO: 47826 - DNA, 31 bp, Homo sapiens; identical to SEQ ID NO: 16372
  chr9:109865316-109865347
  hypo

SEQ ID NO: 47827 - DNA, 42 bp, Homo sapiens; identical to SEQ ID NO: 16373
  chr9:109894934-109894976
  hypo

SEQ ID NO: 47828 - DNA, 31 bp, Homo sapiens; identical to SEQ ID NO: 16374
  chr9:109895285-109895316
  hypo

SEQ ID NO: 47829 - DNA, 35 bp, Homo sapiens; identical to SEQ ID NO: 16376
  chr9:110160587-110160622
  hypo

SEQ ID NO: 47830 - DNA, 31 bp, Homo sapiens; identical to SEQ ID NO: 16377
  chr9:110177580-110177611
  hypo

SEQ ID NO: 47831 - DNA, 31 bp, Homo sapiens; identical to SEQ ID NO: 16379
  chr9:110328591-110328622
  hypo

SEQ ID NO: 47832 - DNA, 31 bp, Homo sapiens; identical to SEQ ID NO: 16380
  chr9:110335014-110335045
  hypo

SEQ ID NO: 47833 - DNA, 77 bp, Homo sapiens; identical to SEQ ID NO: 16382
  chr9:110478887-110478964
  hypo

SEQ ID NO: 47834 - DNA, 60 bp, Homo sapiens; identical to SEQ ID NO: 16383
  chr9:110531374-110531434
  hypo

SEQ ID NO: 47835 - DNA, 31 bp, Homo sapiens; identical to SEQ ID NO: 16384
  chr9:110531442-110531473
  hypo

SEQ ID NO: 47836 - DNA, 55 bp, Homo sapiens; identical to SEQ ID NO: 16385
  chr9:110531503-110531558
  hypo

SEQ ID NO: 47837 - DNA, 31 bp, Homo sapiens; identical to SEQ ID NO: 16386
  chr9:110558849-110558880
  hypo

SEQ ID NO: 47838 - DNA, 31 bp, Homo sapiens; identical to SEQ ID NO: 16387
  chr9:110780063-110780094
  hypo

SEQ ID NO: 47839 - DNA, 38 bp, Homo sapiens; identical to SEQ ID NO: 16388
  chr9:110842927-110842965
  hypo

SEQ ID NO: 47840 - DNA, 31 bp, Homo sapiens; identical to SEQ ID NO: 16389
  chr9:110842976-110843007
  hypo

SEQ ID NO: 47841 - DNA, 73 bp, Homo sapiens; identical to SEQ ID NO: 16390
  chr9:110843040-110843113
  hypo

SEQ ID NO: 47842 - DNA, 31 bp, Homo sapiens; identical to SEQ ID NO: 16392
  chr9:111212068-111212099
  hypo

SEQ ID NO: 47843 - DNA, 31 bp, Homo sapiens; identical to SEQ ID NO: 16393
  chr9:111446305-111446336
  hypo

SEQ ID NO: 47844 - DNA, 50 bp, Homo sapiens; identical to SEQ ID NO: 16394
  chr9:111617455-111617505
  hypo

SEQ ID NO: 47845 - DNA, 67 bp, Homo sapiens; identical to SEQ ID NO: 16395
  chr9:111617923-111617990
  hypo

SEQ ID NO: 47846 - DNA, 31 bp, Homo sapiens; identical to SEQ ID NO: 16396
  chr9:111951146-111951177
  hypo

SEQ ID NO: 47847 - DNA, 60 bp, Homo sapiens; identical to SEQ ID NO: 16397
  chr9:111951208-111951268
  hypo

SEQ ID NO: 47848 - DNA, 42 bp, Homo sapiens; identical to SEQ ID NO: 16398
  chr9:111951292-111951334
  hypo

SEQ ID NO: 47849 - DNA, 59 bp, Homo sapiens; identical to SEQ ID NO: 16399
  chr9:111952370-111952429
  hypo

SEQ ID NO: 47850 - DNA, 31 bp, Homo sapiens; identical to SEQ ID NO: 16400
  chr9:112029751-112029782
  hypo

SEQ ID NO: 47851 - DNA, 40 bp, Homo sapiens; identical to SEQ ID NO: 16401
  chr9:112040327-112040367
  hypo

SEQ ID NO: 47852 - DNA, 51 bp, Homo sapiens; identical to SEQ ID NO: 16402
  chr9:112040374-112040425
  hypo

SEQ ID NO: 47853 - DNA, 44 bp, Homo sapiens; identical to SEQ ID NO: 16403
  chr9:112040444-112040488
  hypo

SEQ ID NO: 47854 - DNA, 31 bp, Homo sapiens; identical to SEQ ID NO: 16404
  chr9:112040495-112040526
  hypo

SEQ ID NO: 47855 - DNA, 31 bp, Homo sapiens; identical to SEQ ID NO: 16405
  chr9:112040564-112040595
  hypo

SEQ ID NO: 47856 - DNA, 493 bp, Homo sapiens; identical to SEQ ID NO: 3672
  chr9:112082580-112083073
  hypo

SEQ ID NO: 47857 - DNA, 249 bp, Homo sapiens; identical to SEQ ID NO: 3673
  chr9:112083164-112083413
  hypo

SEQ ID NO: 47858 - DNA, 79 bp, Homo sapiens; identical to SEQ ID NO: 3674
  chr9:112083423-112083502
  hypo

SEQ ID NO: 47859 - DNA, 31 bp, Homo sapiens; identical to SEQ ID NO: 16411
  chr9:114320409-114320440
  hypo

SEQ ID NO: 47860 - DNA, 31 bp, Homo sapiens; identical to SEQ ID NO: 16413
  chr9:114352193-114352224
  hypo

SEQ ID NO: 47861 - DNA, 31 bp, Homo sapiens; identical to SEQ ID NO: 16418
  chr9:114802062-114802093
  hypo

SEQ ID NO: 47862 - DNA, 31 bp, Homo sapiens; identical to SEQ ID NO: 16419
  chr9:114830991-114831022
  hypo

SEQ ID NO: 47863 - DNA, 41 bp, Homo sapiens; identical to SEQ ID NO: 16420
  chr9:114831080-114831121
  hypo

SEQ ID NO: 47864 - DNA, 55 bp, Homo sapiens; identical to SEQ ID NO: 16421
  chr9:114831139-114831194
  hypo

SEQ ID NO: 47865 - DNA, 31 bp, Homo sapiens; identical to SEQ ID NO: 16422
  chr9:114889345-114889376
  hypo

SEQ ID NO: 47866 - DNA, 2 bp, Homo sapiens
  chr9:114931838-114931840
  hypo
ga

SEQ ID NO: 47867 - DNA, 2 bp, Homo sapiens
  chr9:115067925-115067927
  hypo
ta

SEQ ID NO: 47868 - DNA, 31 bp, Homo sapiens; identical to SEQ ID NO: 16426
  chr9:115087415-115087446
  hypo

SEQ ID NO: 47869 - DNA, 31 bp, Homo sapiens; identical to SEQ ID NO: 16427
  chr9:115087449-115087480
  hypo

SEQ ID NO: 47870 - DNA, 2 bp, Homo sapiens
  chr9:115478931-115478933
  hypo
aa

SEQ ID NO: 47871 - DNA, 31 bp, Homo sapiens; identical to SEQ ID NO: 16429
  chr9:115479325-115479356
  hypo

SEQ ID NO: 47872 - DNA, 36 bp, Homo sapiens; identical to SEQ ID NO: 16430
  chr9:116076766-116076802
  hypo

SEQ ID NO: 47873 - DNA, 31 bp, Homo sapiens; identical to SEQ ID NO: 16431
  chr9:116091907-116091938
  hypo

SEQ ID NO: 47874 - DNA, 31 bp, Homo sapiens; identical to SEQ ID NO: 16432
  chr9:116104971-116105002
  hypo

SEQ ID NO: 47875 - DNA, 31 bp, Homo sapiens; identical to SEQ ID NO: 16433
  chr9:116118819-116118850
  hypo

SEQ ID NO: 47876 - DNA, 54 bp, Homo sapiens; identical to SEQ ID NO: 16434
  chr9:116269882-116269936
  hypo

SEQ ID NO: 47877 - DNA, 55 bp, Homo sapiens; identical to SEQ ID NO: 3685
  chr9:116639070-116639125
  hypo

SEQ ID NO: 47878 - DNA, 31 bp, Homo sapiens; identical to SEQ ID NO: 16436
  chr9:116671456-116671487
  hypo

SEQ ID NO: 47879 - DNA, 43 bp, Homo sapiens; identical to SEQ ID NO: 16437
  chr9:116671495-116671538
  hypo

SEQ ID NO: 47880 - DNA, 31 bp, Homo sapiens; identical to SEQ ID NO: 16438
  chr9:116671887-116671918
  hypo

SEQ ID NO: 47881 - DNA, 67 bp, Homo sapiens; identical to SEQ ID NO: 16439
  chr9:116671958-116672025
  hypo

SEQ ID NO: 47882 - DNA, 31 bp, Homo sapiens; identical to SEQ ID NO: 16440
  chr9:116698062-116698093
  hypo

SEQ ID NO: 47883 - DNA, 31 bp, Homo sapiens; identical to SEQ ID NO: 16441
  chr9:116708991-116709022
  hypo

SEQ ID NO: 47884 - DNA, 31 bp, Homo sapiens; identical to SEQ ID NO: 16442
  chr9:116728290-116728321
  hypo

SEQ ID NO: 47885 - DNA, 31 bp, Homo sapiens; identical to SEQ ID NO: 16443
  chr9:116730184-116730215
  hypo

SEQ ID NO: 47886 - DNA, 31 bp, Homo sapiens; identical to SEQ ID NO: 16444
  chr9:116750071-116750102
  hypo

SEQ ID NO: 47887 - DNA, 37 bp, Homo sapiens; identical to SEQ ID NO: 16445
  chr9:116750815-116750852
  hypo

SEQ ID NO: 47888 - DNA, 39 bp, Homo sapiens; identical to SEQ ID NO: 16446
  chr9:116750915-116750954
  hypo

SEQ ID NO: 47889 - DNA, 42 bp, Homo sapiens; identical to SEQ ID NO: 16447
  chr9:116761524-116761566
  hypo

SEQ ID NO: 47890 - DNA, 55 bp, Homo sapiens; identical to SEQ ID NO: 16448
  chr9:116761570-116761625
  hypo

SEQ ID NO: 47891 - DNA, 31 bp, Homo sapiens; identical to SEQ ID NO: 16449
  chr9:116761657-116761688
  hypo

SEQ ID NO: 47892 - DNA, 31 bp, Homo sapiens; identical to SEQ ID NO: 16450
  chr9:116762417-116762448
  hypo

SEQ ID NO: 47893 - DNA, 31 bp, Homo sapiens; identical to SEQ ID NO: 16451
  chr9:116762623-116762654
  hypo

SEQ ID NO: 47894 - DNA, 31 bp, Homo sapiens; identical to SEQ ID NO: 16452
  chr9:116770636-116770667
  hypo

SEQ ID NO: 47895 - DNA, 131 bp, Homo sapiens; identical to SEQ ID NO: 16453
  chr9:116770723-116770854
  hypo

SEQ ID NO: 47896 - DNA, 152 bp, Homo sapiens; identical to SEQ ID NO: 16454
  chr9:116791110-116791262
  hypo

SEQ ID NO: 47897 - DNA, 31 bp, Homo sapiens; identical to SEQ ID NO: 16455
  chr9:116797924-116797955
  hypo

SEQ ID NO: 47898 - DNA, 50 bp, Homo sapiens; identical to SEQ ID NO: 16456
  chr9:116798286-116798336
  hypo

SEQ ID NO: 47899 - DNA, 77 bp, Homo sapiens; identical to SEQ ID NO: 16457
  chr9:116798415-116798492
  hypo

SEQ ID NO: 47900 - DNA, 58 bp, Homo sapiens; identical to SEQ ID NO: 16458
  chr9:116798519-116798577
  hypo

SEQ ID NO: 47901 - DNA, 31 bp, Homo sapiens; identical to SEQ ID NO: 16459
  chr9:116798579-116798610
  hypo

SEQ ID NO: 47902 - DNA, 57 bp, Homo sapiens; identical to SEQ ID NO: 16460
  chr9:116800990-116801047
  hypo

SEQ ID NO: 47903 - DNA, 31 bp, Homo sapiens; identical to SEQ ID NO: 16461
  chr9:116801056-116801087
  hypo

SEQ ID NO: 47904 - DNA, 31 bp, Homo sapiens; identical to SEQ ID NO: 16462
  chr9:116801088-116801119
  hypo

SEQ ID NO: 47905 - DNA, 59 bp, Homo sapiens; identical to SEQ ID NO: 16463
  chr9:116810951-116811010
  hypo

SEQ ID NO: 47906 - DNA, 225 bp, Homo sapiens; identical to SEQ ID NO: 16464
  chr9:116811490-116811715
  hypo

SEQ ID NO: 47907 - DNA, 31 bp, Homo sapiens; identical to SEQ ID NO: 16465
  chr9:116812103-116812134
  hypo

SEQ ID NO: 47908 - DNA, 35 bp, Homo sapiens; identical to SEQ ID NO: 16466
  chr9:116823828-116823863
  hypo

SEQ ID NO: 47909 - DNA, 44 bp, Homo sapiens; identical to SEQ ID NO: 16467
  chr9:116832917-116832961
  hypo

SEQ ID NO: 47910 - DNA, 60 bp, Homo sapiens; identical to SEQ ID NO: 16468
  chr9:116856484-116856544
  hypo

SEQ ID NO: 47911 - DNA, 34 bp, Homo sapiens; identical to SEQ ID NO: 16469
  chr9:116856651-116856685
  hypo

SEQ ID NO: 47912 - DNA, 31 bp, Homo sapiens; identical to SEQ ID NO: 16470
  chr9:116857251-116857282
  hypo

SEQ ID NO: 47913 - DNA, 64 bp, Homo sapiens; identical to SEQ ID NO: 16471
  chr9:116857302-116857366
  hypo

SEQ ID NO: 47914 - DNA, 31 bp, Homo sapiens; identical to SEQ ID NO: 16472
  chr9:116857381-116857412
  hypo

SEQ ID NO: 47915 - DNA, 31 bp, Homo sapiens; identical to SEQ ID NO: 16473
  chr9:116857414-116857445
  hypo

SEQ ID NO: 47916 - DNA, 31 bp, Homo sapiens; identical to SEQ ID NO: 16474
  chr9:116857466-116857497
  hypo

SEQ ID NO: 47917 - DNA, 31 bp, Homo sapiens; identical to SEQ ID NO: 16475
  chr9:116894967-116894998
  hypo

SEQ ID NO: 47918 - DNA, 31 bp, Homo sapiens; identical to SEQ ID NO: 16476
  chr9:116930483-116930514
  hypo

SEQ ID NO: 47919 - DNA, 41 bp, Homo sapiens; identical to SEQ ID NO: 16477
  chr9:116971681-116971722
  hypo

SEQ ID NO: 47920 - DNA, 31 bp, Homo sapiens; identical to SEQ ID NO: 16478
  chr9:116971908-116971939
  hypo

SEQ ID NO: 47921 - DNA, 31 bp, Homo sapiens; identical to SEQ ID NO: 16479
  chr9:116971964-116971995
  hypo

SEQ ID NO: 47922 - DNA, 68 bp, Homo sapiens; identical to SEQ ID NO: 16480
  chr9:116973313-116973381
  hypo

SEQ ID NO: 47923 - DNA, 31 bp, Homo sapiens; identical to SEQ ID NO: 16481
  chr9:116973413-116973444
  hypo

SEQ ID NO: 47924 - DNA, 34 bp, Homo sapiens; identical to SEQ ID NO: 16482
  chr9:116973455-116973489
  hypo

SEQ ID NO: 47925 - DNA, 31 bp, Homo sapiens; identical to SEQ ID NO: 16483
  chr9:116995057-116995088
  hypo

SEQ ID NO: 47926 - DNA, 31 bp, Homo sapiens; identical to SEQ ID NO: 16484
  chr9:117031993-117032024
  hypo

SEQ ID NO: 47927 - DNA, 31 bp, Homo sapiens; identical to SEQ ID NO: 16485
  chr9:117038569-117038600
  hypo

SEQ ID NO: 47928 - DNA, 31 bp, Homo sapiens; identical to SEQ ID NO: 16486
  chr9:118222147-118222178
  hypo

SEQ ID NO: 47929 - DNA, 31 bp, Homo sapiens; identical to SEQ ID NO: 16487
  chr9:123150786-123150817
  hypo

SEQ ID NO: 47930 - DNA, 31 bp, Homo sapiens; identical to SEQ ID NO: 16488
  chr9:123150827-123150858
  hypo

SEQ ID NO: 47931 - DNA, 99 bp, Homo sapiens; identical to SEQ ID NO: 16489
  chr9:123176126-123176225
  hypo

SEQ ID NO: 47932 - DNA, 31 bp, Homo sapiens; identical to SEQ ID NO: 16490
  chr9:123176251-123176282
  hypo

SEQ ID NO: 47933 - DNA, 72 bp, Homo sapiens; identical to SEQ ID NO: 16491
  chr9:123295276-123295348
  hypo

SEQ ID NO: 47934 - DNA, 31 bp, Homo sapiens; identical to SEQ ID NO: 16492
  chr9:123367535-123367566
  hypo

SEQ ID NO: 47935 - DNA, 60 bp, Homo sapiens; identical to SEQ ID NO: 16493
  chr9:123367600-123367660
  hypo

SEQ ID NO: 47936 - DNA, 31 bp, Homo sapiens; identical to SEQ ID NO: 16494
  chr9:123965026-123965057
  hypo

SEQ ID NO: 47937 - DNA, 65 bp, Homo sapiens; identical to SEQ ID NO: 16496
  chr9:124095119-124095184
  hypo

SEQ ID NO: 47938 - DNA, 31 bp, Homo sapiens; identical to SEQ ID NO: 16497
  chr9:124422090-124422121
  hypo

SEQ ID NO: 47939 - DNA, 31 bp, Homo sapiens; identical to SEQ ID NO: 16498
  chr9:124422130-124422161
  hypo

SEQ ID NO: 47940 - DNA, 31 bp, Homo sapiens; identical to SEQ ID NO: 16499
  chr9:124422197-124422228
  hypo

SEQ ID NO: 47941 - DNA, 37 bp, Homo sapiens; identical to SEQ ID NO: 16500
  chr9:124422259-124422296
  hypo

SEQ ID NO: 47942 - DNA, 31 bp, Homo sapiens; identical to SEQ ID NO: 16501
  chr9:124443386-124443417
  hypo

SEQ ID NO: 47943 - DNA, 44 bp, Homo sapiens; identical to SEQ ID NO: 16502
  chr9:124443434-124443478
  hypo

SEQ ID NO: 47944 - DNA, 31 bp, Homo sapiens; identical to SEQ ID NO: 16503
  chr9:124443505-124443536
  hypo

SEQ ID NO: 47945 - DNA, 39 bp, Homo sapiens; identical to SEQ ID NO: 16504
  chr9:124443546-124443585
  hypo

SEQ ID NO: 47946 - DNA, 54 bp, Homo sapiens; identical to SEQ ID NO: 16505
  chr9:124545861-124545915
  hypo

SEQ ID NO: 47947 - DNA, 31 bp, Homo sapiens; identical to SEQ ID NO: 16506
  chr9:124548589-124548620
  hypo

SEQ ID NO: 47948 - DNA, 31 bp, Homo sapiens; identical to SEQ ID NO: 16507
  chr9:124548653-124548684
  hypo

SEQ ID NO: 47949 - DNA, 75 bp, Homo sapiens; identical to SEQ ID NO: 16508
  chr9:124548699-124548774
  hypo

SEQ ID NO: 47950 - DNA, 31 bp, Homo sapiens; identical to SEQ ID NO: 16509
  chr9:124549334-124549365
  hypo

SEQ ID NO: 47951 - DNA, 31 bp, Homo sapiens; identical to SEQ ID NO: 16510
  chr9:124549368-124549399
  hypo

SEQ ID NO: 47952 - DNA, 69 bp, Homo sapiens; identical to SEQ ID NO: 16511
  chr9:124549445-124549514
  hypo

SEQ ID NO: 47953 - DNA, 31 bp, Homo sapiens; identical to SEQ ID NO: 16512
  chr9:124581115-124581146
  hypo

SEQ ID NO: 47954 - DNA, 31 bp, Homo sapiens; identical to SEQ ID NO: 16513
  chr9:124581147-124581178
  hypo

SEQ ID NO: 47955 - DNA, 31 bp, Homo sapiens; identical to SEQ ID NO: 3691
  chr9:124622035-124622066
  hypo

SEQ ID NO: 47956 - DNA, 31 bp, Homo sapiens; identical to SEQ ID NO: 3692
  chr9:124622092-124622123
  hypo

SEQ ID NO: 47957 - DNA, 71 bp, Homo sapiens; identical to SEQ ID NO: 3693
  chr9:124622146-124622217
  hypo

SEQ ID NO: 47958 - DNA, 31 bp, Homo sapiens; identical to SEQ ID NO: 16518
  chr9:124961781-124961812
  hypo

SEQ ID NO: 47959 - DNA, 31 bp, Homo sapiens; identical to SEQ ID NO: 3694
  chr9:125587779-125587810
  hypo

SEQ ID NO: 47960 - DNA, 58 bp, Homo sapiens; identical to SEQ ID NO: 16521
  chr9:125870567-125870625
  hypo

SEQ ID NO: 47961 - DNA, 31 bp, Homo sapiens; identical to SEQ ID NO: 16523
  chr9:126092517-126092548
  hypo

SEQ ID NO: 47962 - DNA, 53 bp, Homo sapiens; identical to SEQ ID NO: 16524
  chr9:126100874-126100927
  hypo

SEQ ID NO: 47963 - DNA, 31 bp, Homo sapiens; identical to SEQ ID NO: 16525
  chr9:126100999-126101030
  hypo

SEQ ID NO: 47964 - DNA, 31 bp, Homo sapiens; identical to SEQ ID NO: 16526
  chr9:126101039-126101070
  hypo

SEQ ID NO: 47965 - DNA, 41 bp, Homo sapiens; identical to SEQ ID NO: 16528
  chr9:126162176-126162217
  hypo

SEQ ID NO: 47966 - DNA, 31 bp, Homo sapiens; identical to SEQ ID NO: 16529
  chr9:126162230-126162261
  hypo

SEQ ID NO: 47967 - DNA, 45 bp, Homo sapiens; identical to SEQ ID NO: 16530
  chr9:126162288-126162333
  hypo

SEQ ID NO: 47968 - DNA, 31 bp, Homo sapiens; identical to SEQ ID NO: 16531
  chr9:126169182-126169213
  hypo

SEQ ID NO: 47969 - DNA, 2 bp, Homo sapiens
  chr9:126169371-126169373
  hypo
tg

SEQ ID NO: 47970 - DNA, 45 bp, Homo sapiens; identical to SEQ ID NO: 16534
  chr9:126348945-126348990
  hypo

SEQ ID NO: 47971 - DNA, 2 bp, Homo sapiens
  chr9:126349143-126349145
  hypo
gg

SEQ ID NO: 47972 - DNA, 31 bp, Homo sapiens; identical to SEQ ID NO: 3695
  chr9:127061459-127061490
  hypo

SEQ ID NO: 47973 - DNA, 31 bp, Homo sapiens; identical to SEQ ID NO: 16537
  chr9:127230036-127230067
  hypo

SEQ ID NO: 47974 - DNA, 52 bp, Homo sapiens; identical to SEQ ID NO: 16538
  chr9:127230410-127230462
  hypo

SEQ ID NO: 47975 - DNA, 37 bp, Homo sapiens; identical to SEQ ID NO: 16539
  chr9:127237565-127237602
  hypo

SEQ ID NO: 47976 - DNA, 31 bp, Homo sapiens; identical to SEQ ID NO: 16540
  chr9:127260203-127260234
  hypo

SEQ ID NO: 47977 - DNA, 31 bp, Homo sapiens; identical to SEQ ID NO: 16541
  chr9:127262947-127262978
  hypo

SEQ ID NO: 47978 - DNA, 31 bp, Homo sapiens; identical to SEQ ID NO: 16542
  chr9:127270139-127270170
  hypo

SEQ ID NO: 47979 - DNA, 31 bp, Homo sapiens; identical to SEQ ID NO: 16543
  chr9:127282290-127282321
  hypo

SEQ ID NO: 47980 - DNA, 56 bp, Homo sapiens; identical to SEQ ID NO: 16544
  chr9:127308401-127308457
  hypo

SEQ ID NO: 47981 - DNA, 31 bp, Homo sapiens; identical to SEQ ID NO: 16545
  chr9:127312606-127312637
  hypo

SEQ ID NO: 47982 - DNA, 62 bp, Homo sapiens; identical to SEQ ID NO: 16546
  chr9:127361828-127361890
  hypo

SEQ ID NO: 47983 - DNA, 31 bp, Homo sapiens; identical to SEQ ID NO: 16547
  chr9:127420614-127420645
  hypo

SEQ ID NO: 47984 - DNA, 31 bp, Homo sapiens; identical to SEQ ID NO: 16548
  chr9:127420683-127420714
  hypo

SEQ ID NO: 47985 - DNA, 31 bp, Homo sapiens; identical to SEQ ID NO: 16549
  chr9:127420718-127420749
  hypo

SEQ ID NO: 47986 - DNA, 31 bp, Homo sapiens; identical to SEQ ID NO: 16551
  chr9:127481036-127481067
  hypo

SEQ ID NO: 47987 - DNA, 31 bp, Homo sapiens; identical to SEQ ID NO: 16552
  chr9:127481334-127481365
  hypo

SEQ ID NO: 47988 - DNA, 31 bp, Homo sapiens; identical to SEQ ID NO: 16553
  chr9:127481369-127481400
  hypo

SEQ ID NO: 47989 - DNA, 31 bp, Homo sapiens; identical to SEQ ID NO: 16555
  chr9:127482310-127482341
  hypo

SEQ ID NO: 47990 - DNA, 32 bp, Homo sapiens; identical to SEQ ID NO: 16556
  chr9:127500845-127500877
  hypo

SEQ ID NO: 47991 - DNA, 94 bp, Homo sapiens; identical to SEQ ID NO: 3696
  chr9:127534415-127534509
  hypo

SEQ ID NO: 47992 - DNA, 31 bp, Homo sapiens; identical to SEQ ID NO: 16560
  chr9:127538142-127538173
  hypo

SEQ ID NO: 47993 - DNA, 31 bp, Homo sapiens; identical to SEQ ID NO: 16561
  chr9:127570204-127570235
  hypo

SEQ ID NO: 47994 - DNA, 31 bp, Homo sapiens; identical to SEQ ID NO: 16562
  chr9:127570241-127570272
  hypo

SEQ ID NO: 47995 - DNA, 31 bp, Homo sapiens; identical to SEQ ID NO: 16563
  chr9:127571889-127571920
  hypo

SEQ ID NO: 47996 - DNA, 37 bp, Homo sapiens; identical to SEQ ID NO: 16564
  chr9:127572287-127572324
  hypo

SEQ ID NO: 47997 - DNA, 232 bp, Homo sapiens; identical to SEQ ID NO: 16565
  chr9:127572392-127572624
  hypo

SEQ ID NO: 47998 - DNA, 31 bp, Homo sapiens; identical to SEQ ID NO: 16566
  chr9:127573454-127573485
  hypo

SEQ ID NO: 47999 - DNA, 40 bp, Homo sapiens; identical to SEQ ID NO: 16567
  chr9:127577753-127577793
  hypo

SEQ ID NO: 48000 - DNA, 31 bp, Homo sapiens; identical to SEQ ID NO: 16568
  chr9:127577921-127577952
  hypo

SEQ ID NO: 48001 - DNA, 37 bp, Homo sapiens; identical to SEQ ID NO: 16569
  chr9:127623916-127623953
  hypo

SEQ ID NO: 48002 - DNA, 78 bp, Homo sapiens; identical to SEQ ID NO: 16570
  chr9:127657865-127657943
  hypo

SEQ ID NO: 48003 - DNA, 34 bp, Homo sapiens; identical to SEQ ID NO: 16571
  chr9:127955074-127955108
  hypo

SEQ ID NO: 48004 - DNA, 31 bp, Homo sapiens; identical to SEQ ID NO: 3697
  chr9:128024544-128024575
  hypo

SEQ ID NO: 48005 - DNA, 31 bp, Homo sapiens; identical to SEQ ID NO: 3698
  chr9:128138375-128138406
  hypo

SEQ ID NO: 48006 - DNA, 46 bp, Homo sapiens; identical to SEQ ID NO: 16574
  chr9:128168026-128168072
  hypo

SEQ ID NO: 48007 - DNA, 35 bp, Homo sapiens; identical to SEQ ID NO: 16575
  chr9:128168151-128168186
  hypo

SEQ ID NO: 48008 - DNA, 31 bp, Homo sapiens; identical to SEQ ID NO: 16576
  chr9:128173739-128173770
  hypo

SEQ ID NO: 48009 - DNA, 31 bp, Homo sapiens; identical to SEQ ID NO: 16577
  chr9:128178251-128178282
  hypo

SEQ ID NO: 48010 - DNA, 31 bp, Homo sapiens; identical to SEQ ID NO: 16578
  chr9:128186652-128186683
  hypo

SEQ ID NO: 48011 - DNA, 41 bp, Homo sapiens; identical to SEQ ID NO: 16579
  chr9:128274067-128274108
  hypo

SEQ ID NO: 48012 - DNA, 34 bp, Homo sapiens; identical to SEQ ID NO: 16580
  chr9:128274145-128274179
  hypo

SEQ ID NO: 48013 - DNA, 31 bp, Homo sapiens; identical to SEQ ID NO: 16581
  chr9:128274205-128274236
  hypo

SEQ ID NO: 48014 - DNA, 31 bp, Homo sapiens; identical to SEQ ID NO: 16582
  chr9:128399988-128400019
  hypo

SEQ ID NO: 48015 - DNA, 47 bp, Homo sapiens; identical to SEQ ID NO: 16584
  chr9:128407605-128407652
  hypo

SEQ ID NO: 48016 - DNA, 39 bp, Homo sapiens; identical to SEQ ID NO: 16585
  chr9:128407726-128407765
  hypo

SEQ ID NO: 48017 - DNA, 31 bp, Homo sapiens; identical to SEQ ID NO: 16586
  chr9:128479563-128479594
  hypo

SEQ ID NO: 48018 - DNA, 41 bp, Homo sapiens; identical to SEQ ID NO: 16588
  chr9:128752497-128752538
  hypo

SEQ ID NO: 48019 - DNA, 31 bp, Homo sapiens; identical to SEQ ID NO: 16589
  chr9:128757172-128757203
  hypo

SEQ ID NO: 48020 - DNA, 112 bp, Homo sapiens; identical to SEQ ID NO: 16590
  chr9:128925325-128925437
  hypo

SEQ ID NO: 48021 - DNA, 36 bp, Homo sapiens; identical to SEQ ID NO: 16591
  chr9:128926860-128926896
  hypo

SEQ ID NO: 48022 - DNA, 31 bp, Homo sapiens; identical to SEQ ID NO: 16592
  chr9:129219830-129219861
  hypo

SEQ ID NO: 48023 - DNA, 31 bp, Homo sapiens; identical to SEQ ID NO: 16593
  chr9:129222036-129222067
  hypo

SEQ ID NO: 48024 - DNA, 31 bp, Homo sapiens; identical to SEQ ID NO: 16594
  chr9:129224279-129224310
  hypo

SEQ ID NO: 48025 - DNA, 31 bp, Homo sapiens; identical to SEQ ID NO: 16595
  chr9:129242473-129242504
  hypo

SEQ ID NO: 48026 - DNA, 31 bp, Homo sapiens; identical to SEQ ID NO: 16596
  chr9:129265131-129265162
  hypo

SEQ ID NO: 48027 - DNA, 31 bp, Homo sapiens; identical to SEQ ID NO: 16597
  chr9:129265612-129265643
  hypo

SEQ ID NO: 48028 - DNA, 31 bp, Homo sapiens; identical to SEQ ID NO: 16598
  chr9:129266741-129266772
  hypo

SEQ ID NO: 48029 - DNA, 31 bp, Homo sapiens; identical to SEQ ID NO: 16599
  chr9:129267624-129267655
  hypo

SEQ ID NO: 48030 - DNA, 31 bp, Homo sapiens; identical to SEQ ID NO: 16600
  chr9:129287199-129287230
  hypo

SEQ ID NO: 48031 - DNA, 31 bp, Homo sapiens; identical to SEQ ID NO: 16601
  chr9:129316509-129316540
  hypo

SEQ ID NO: 48032 - DNA, 31 bp, Homo sapiens; identical to SEQ ID NO: 16602
  chr9:129316558-129316589
  hypo

SEQ ID NO: 48033 - DNA, 31 bp, Homo sapiens; identical to SEQ ID NO: 16603
  chr9:129423386-129423417
  hypo

SEQ ID NO: 48034 - DNA, 31 bp, Homo sapiens; identical to SEQ ID NO: 16604
  chr9:129455945-129455976
  hypo

SEQ ID NO: 48035 - DNA, 31 bp, Homo sapiens; identical to SEQ ID NO: 16605
  chr9:129562213-129562244
  hypo

SEQ ID NO: 48036 - DNA, 31 bp, Homo sapiens; identical to SEQ ID NO: 16606
  chr9:129562269-129562300
  hypo

SEQ ID NO: 48037 - DNA, 31 bp, Homo sapiens; identical to SEQ ID NO: 16607
  chr9:129633596-129633627
  hypo

SEQ ID NO: 48038 - DNA, 41 bp, Homo sapiens; identical to SEQ ID NO: 16609
  chr9:129834458-129834499
  hypo

SEQ ID NO: 48039 - DNA, 63 bp, Homo sapiens; identical to SEQ ID NO: 3703
  chr9:130159224-130159287
  hypo

SEQ ID NO: 48040 - DNA, 141 bp, Homo sapiens; identical to SEQ ID NO: 3704
  chr9:130159302-130159443
  hypo

SEQ ID NO: 48041 - DNA, 31 bp, Homo sapiens; identical to SEQ ID NO: 16612
  chr9:130241845-130241876
  hypo

SEQ ID NO: 48042 - DNA, 31 bp, Homo sapiens; identical to SEQ ID NO: 16614
  chr9:130265600-130265631
  hypo

SEQ ID NO: 48043 - DNA, 31 bp, Homo sapiens; identical to SEQ ID NO: 16615
  chr9:130265673-130265704
  hypo

SEQ ID NO: 48044 - DNA, 36 bp, Homo sapiens; identical to SEQ ID NO: 16616
  chr9:130265721-130265757
  hypo

SEQ ID NO: 48045 - DNA, 31 bp, Homo sapiens; identical to SEQ ID NO: 16617
  chr9:130265760-130265791
  hypo

SEQ ID NO: 48046 - DNA, 40 bp, Homo sapiens; identical to SEQ ID NO: 16618
  chr9:130269316-130269356
  hypo

SEQ ID NO: 48047 - DNA, 96 bp, Homo sapiens; identical to SEQ ID NO: 16619
  chr9:130269494-130269590
  hypo

SEQ ID NO: 48048 - DNA, 31 bp, Homo sapiens; identical to SEQ ID NO: 16620
  chr9:130270527-130270558
  hypo

SEQ ID NO: 48049 - DNA, 31 bp, Homo sapiens; identical to SEQ ID NO: 16621
  chr9:130270566-130270597
  hypo

SEQ ID NO: 48050 - DNA, 31 bp, Homo sapiens; identical to SEQ ID NO: 16622
  chr9:130270619-130270650
  hypo

SEQ ID NO: 48051 - DNA, 85 bp, Homo sapiens; identical to SEQ ID NO: 16623
  chr9:130271242-130271327
  hypo

SEQ ID NO: 48052 - DNA, 35 bp, Homo sapiens; identical to SEQ ID NO: 16624
  chr9:130272562-130272597
  hypo

SEQ ID NO: 48053 - DNA, 40 bp, Homo sapiens; identical to SEQ ID NO: 16625
  chr9:130272604-130272644
  hypo

SEQ ID NO: 48054 - DNA, 31 bp, Homo sapiens; identical to SEQ ID NO: 16627
  chr9:130278829-130278860
  hypo

SEQ ID NO: 48055 - DNA, 31 bp, Homo sapiens; identical to SEQ ID NO: 16628
  chr9:130278870-130278901
  hypo

SEQ ID NO: 48056 - DNA, 70 bp, Homo sapiens; identical to SEQ ID NO: 16629
  chr9:130279230-130279300
  hypo

SEQ ID NO: 48057 - DNA, 31 bp, Homo sapiens; identical to SEQ ID NO: 16630
  chr9:130279562-130279593
  hypo

SEQ ID NO: 48058 - DNA, 31 bp, Homo sapiens; identical to SEQ ID NO: 16631
  chr9:130279873-130279904
  hypo

SEQ ID NO: 48059 - DNA, 43 bp, Homo sapiens; identical to SEQ ID NO: 16632
  chr9:130279920-130279963
  hypo

SEQ ID NO: 48060 - DNA, 37 bp, Homo sapiens; identical to SEQ ID NO: 16633
  chr9:130279985-130280022
  hypo

SEQ ID NO: 48061 - DNA, 31 bp, Homo sapiens; identical to SEQ ID NO: 16634
  chr9:130290388-130290419
  hypo

SEQ ID NO: 48062 - DNA, 58 bp, Homo sapiens; identical to SEQ ID NO: 16635
  chr9:130296358-130296416
  hypo

SEQ ID NO: 48063 - DNA, 31 bp, Homo sapiens; identical to SEQ ID NO: 16636
  chr9:130297781-130297812
  hypo

SEQ ID NO: 48064 - DNA, 59 bp, Homo sapiens; identical to SEQ ID NO: 16637
  chr9:130297839-130297898
  hypo

SEQ ID NO: 48065 - DNA, 56 bp, Homo sapiens; identical to SEQ ID NO: 16638
  chr9:130297929-130297985
  hypo

SEQ ID NO: 48066 - DNA, 31 bp, Homo sapiens; identical to SEQ ID NO: 16639
  chr9:130305368-130305399
  hypo

SEQ ID NO: 48067 - DNA, 31 bp, Homo sapiens; identical to SEQ ID NO: 16640
  chr9:130311543-130311574
  hypo

SEQ ID NO: 48068 - DNA, 31 bp, Homo sapiens; identical to SEQ ID NO: 16641
  chr9:130327792-130327823
  hypo

SEQ ID NO: 48069 - DNA, 36 bp, Homo sapiens; identical to SEQ ID NO: 3707
  chr9:130331223-130331259
  hypo

SEQ ID NO: 48070 - DNA, 159 bp, Homo sapiens; identical to SEQ ID NO: 3708
  chr9:130374195-130374354
  hypo

SEQ ID NO: 48071 - DNA, 37 bp, Homo sapiens; identical to SEQ ID NO: 3709
  chr9:130374656-130374693
  hypo

SEQ ID NO: 48072 - DNA, 31 bp, Homo sapiens; identical to SEQ ID NO: 16645
  chr9:130415924-130415955
  hypo

SEQ ID NO: 48073 - DNA, 35 bp, Homo sapiens; identical to SEQ ID NO: 16646
  chr9:130444668-130444703
  hypo

SEQ ID NO: 48074 - DNA, 31 bp, Homo sapiens; identical to SEQ ID NO: 16647
  chr9:130444800-130444831
  hypo

SEQ ID NO: 48075 - DNA, 31 bp, Homo sapiens; identical to SEQ ID NO: 16648
  chr9:130446344-130446375
  hypo

SEQ ID NO: 48076 - DNA, 49 bp, Homo sapiens; identical to SEQ ID NO: 16649
  chr9:130446401-130446450
  hypo

SEQ ID NO: 48077 - DNA, 56 bp, Homo sapiens; identical to SEQ ID NO: 16650
  chr9:130446480-130446536
  hypo

SEQ ID NO: 48078 - DNA, 34 bp, Homo sapiens; identical to SEQ ID NO: 16651
  chr9:130448209-130448243
  hypo

SEQ ID NO: 48079 - DNA, 31 bp, Homo sapiens; identical to SEQ ID NO: 16652
  chr9:130467717-130467748
  hypo

SEQ ID NO: 48080 - DNA, 40 bp, Homo sapiens; identical to SEQ ID NO: 16653
  chr9:130494891-130494931
  hypo

SEQ ID NO: 48081 - DNA, 52 bp, Homo sapiens; identical to SEQ ID NO: 16654
  chr9:130550915-130550967
  hypo

SEQ ID NO: 48082 - DNA, 31 bp, Homo sapiens; identical to SEQ ID NO: 16655
  chr9:130551135-130551166
  hypo

SEQ ID NO: 48083 - DNA, 31 bp, Homo sapiens; identical to SEQ ID NO: 16656
  chr9:130561819-130561850
  hypo

SEQ ID NO: 48084 - DNA, 31 bp, Homo sapiens; identical to SEQ ID NO: 16657
  chr9:130563063-130563094
  hypo

SEQ ID NO: 48085 - DNA, 31 bp, Homo sapiens; identical to SEQ ID NO: 16658
  chr9:130570904-130570935
  hypo

SEQ ID NO: 48086 - DNA, 41 bp, Homo sapiens; identical to SEQ ID NO: 16659
  chr9:130589224-130589265
  hypo

SEQ ID NO: 48087 - DNA, 94 bp, Homo sapiens; identical to SEQ ID NO: 16661
  chr9:130630678-130630772
  hypo

SEQ ID NO: 48088 - DNA, 31 bp, Homo sapiens; identical to SEQ ID NO: 16662
  chr9:130634873-130634904
  hypo

SEQ ID NO: 48089 - DNA, 52 bp, Homo sapiens; identical to SEQ ID NO: 16663
  chr9:130635123-130635175
  hypo

SEQ ID NO: 48090 - DNA, 31 bp, Homo sapiens; identical to SEQ ID NO: 16664
  chr9:130635228-130635259
  hypo

SEQ ID NO: 48091 - DNA, 39 bp, Homo sapiens; identical to SEQ ID NO: 16665
  chr9:130635270-130635309
  hypo

SEQ ID NO: 48092 - DNA, 31 bp, Homo sapiens; identical to SEQ ID NO: 16666
  chr9:130637315-130637346
  hypo

SEQ ID NO: 48093 - DNA, 113 bp, Homo sapiens; identical to SEQ ID NO: 37642
  chr9:130639866-130639979
  hypo

SEQ ID NO: 48094 - DNA, 18 bp, Homo sapiens
  chr9:130640012-130640030
  hypo
cggcgttcccgaaggcag

SEQ ID NO: 48095 - DNA, 31 bp, Homo sapiens; identical to SEQ ID NO: 3713
  chr9:130674858-130674889
  hypo

SEQ ID NO: 48096 - DNA, 46 bp, Homo sapiens; identical to SEQ ID NO: 16669
  chr9:130868764-130868810
  hypo

SEQ ID NO: 48097 - DNA, 36 bp, Homo sapiens; identical to SEQ ID NO: 16670
  chr9:130868853-130868889
  hypo

SEQ ID NO: 48098 - DNA, 52 bp, Homo sapiens; identical to SEQ ID NO: 16671
  chr9:130906606-130906658
  hypo

SEQ ID NO: 48099 - DNA, 47 bp, Homo sapiens; identical to SEQ ID NO: 16672
  chr9:130906702-130906749
  hypo

SEQ ID NO: 48100 - DNA, 31 bp, Homo sapiens; identical to SEQ ID NO: 16673
  chr9:130907015-130907046
  hypo

SEQ ID NO: 48101 - DNA, 85 bp, Homo sapiens; identical to SEQ ID NO: 16674
  chr9:130907048-130907133
  hypo

SEQ ID NO: 48102 - DNA, 31 bp, Homo sapiens; identical to SEQ ID NO: 16675
  chr9:130907137-130907168
  hypo

SEQ ID NO: 48103 - DNA, 61 bp, Homo sapiens; identical to SEQ ID NO: 16676
  chr9:130907173-130907234
  hypo

SEQ ID NO: 48104 - DNA, 31 bp, Homo sapiens; identical to SEQ ID NO: 16677
  chr9:130907247-130907278
  hypo

SEQ ID NO: 48105 - DNA, 31 bp, Homo sapiens; identical to SEQ ID NO: 16678
  chr9:130910752-130910783
  hypo

SEQ ID NO: 48106 - DNA, 31 bp, Homo sapiens; identical to SEQ ID NO: 16679
  chr9:130914349-130914380
  hypo

SEQ ID NO: 48107 - DNA, 31 bp, Homo sapiens; identical to SEQ ID NO: 16680
  chr9:130914489-130914520
  hypo

SEQ ID NO: 48108 - DNA, 76 bp, Homo sapiens; identical to SEQ ID NO: 16681
  chr9:130914527-130914603
  hypo

SEQ ID NO: 48109 - DNA, 31 bp, Homo sapiens; identical to SEQ ID NO: 16682
  chr9:130914636-130914667
  hypo

SEQ ID NO: 48110 - DNA, 31 bp, Homo sapiens; identical to SEQ ID NO: 16683
  chr9:130915766-130915797
  hypo

SEQ ID NO: 48111 - DNA, 31 bp, Homo sapiens; identical to SEQ ID NO: 16684
  chr9:130917060-130917091
  hypo

SEQ ID NO: 48112 - DNA, 31 bp, Homo sapiens; identical to SEQ ID NO: 16686
  chr9:131060976-131061007
  hypo

SEQ ID NO: 48113 - DNA, 31 bp, Homo sapiens; identical to SEQ ID NO: 16688
  chr9:131196570-131196601
  hypo

SEQ ID NO: 48114 - DNA, 2 bp, Homo sapiens
  chr9:131217227-131217229
  hypo
ca

SEQ ID NO: 48115 - DNA, 31 bp, Homo sapiens; identical to SEQ ID NO: 16692
  chr9:131411488-131411519
  hypo

SEQ ID NO: 48116 - DNA, 31 bp, Homo sapiens; identical to SEQ ID NO: 16693
  chr9:131477221-131477252
  hypo

SEQ ID NO: 48117 - DNA, 31 bp, Homo sapiens; identical to SEQ ID NO: 16694
  chr9:131483896-131483927
  hypo

SEQ ID NO: 48118 - DNA, 62 bp, Homo sapiens; identical to SEQ ID NO: 16695
  chr9:131483954-131484016
  hypo

SEQ ID NO: 48119 - DNA, 69 bp, Homo sapiens; identical to SEQ ID NO: 16696
  chr9:131484025-131484094
  hypo

SEQ ID NO: 48120 - DNA, 80 bp, Homo sapiens; identical to SEQ ID NO: 16699
  chr9:131600338-131600418
  hypo

SEQ ID NO: 48121 - DNA, 31 bp, Homo sapiens; identical to SEQ ID NO: 16700
  chr9:131600482-131600513
  hypo

SEQ ID NO: 48122 - DNA, 31 bp, Homo sapiens; identical to SEQ ID NO: 16701
  chr9:131604667-131604698
  hypo

SEQ ID NO: 48123 - DNA, 2 bp, Homo sapiens
  chr9:131652715-131652717
  hypo
tc

SEQ ID NO: 48124 - DNA, 38 bp, Homo sapiens; identical to SEQ ID NO: 3716
  chr9:131709587-131709625
  hypo

SEQ ID NO: 48125 - DNA, 31 bp, Homo sapiens; identical to SEQ ID NO: 16704
  chr9:131796484-131796515
  hypo

SEQ ID NO: 48126 - DNA, 43 bp, Homo sapiens; identical to SEQ ID NO: 37651
  chr9:131842946-131842989
  hypo

SEQ ID NO: 48127 - DNA, 101 bp, Homo sapiens; identical to SEQ ID NO: 3719
  chr9:131842992-131843093
  hypo

SEQ ID NO: 48128 - DNA, 31 bp, Homo sapiens; identical to SEQ ID NO: 16711
  chr9:131919403-131919434
  hypo

SEQ ID NO: 48129 - DNA, 31 bp, Homo sapiens; identical to SEQ ID NO: 16712
  chr9:131919437-131919468
  hypo

SEQ ID NO: 48130 - DNA, 59 bp, Homo sapiens; identical to SEQ ID NO: 16713
  chr9:131919474-131919533
  hypo

SEQ ID NO: 48131 - DNA, 68 bp, Homo sapiens; identical to SEQ ID NO: 3720
  chr9:131940268-131940336
  hypo

SEQ ID NO: 48132 - DNA, 94 bp, Homo sapiens; identical to SEQ ID NO: 3721
  chr9:131940343-131940437
  hypo

SEQ ID NO: 48133 - DNA, 100 bp, Homo sapiens; identical to SEQ ID NO: 3722
  chr9:131940695-131940795
  hypo

SEQ ID NO: 48134 - DNA, 31 bp, Homo sapiens; identical to SEQ ID NO: 16717
  chr9:131978870-131978901
  hypo

SEQ ID NO: 48135 - DNA, 31 bp, Homo sapiens; identical to SEQ ID NO: 16718
  chr9:131987004-131987035
  hypo

SEQ ID NO: 48136 - DNA, 31 bp, Homo sapiens; identical to SEQ ID NO: 16719
  chr9:132004479-132004510
  hypo

SEQ ID NO: 48137 - DNA, 31 bp, Homo sapiens; identical to SEQ ID NO: 16720
  chr9:132004676-132004707
  hypo

SEQ ID NO: 48138 - DNA, 31 bp, Homo sapiens; identical to SEQ ID NO: 16721
  chr9:132089110-132089141
  hypo

SEQ ID NO: 48139 - DNA, 31 bp, Homo sapiens; identical to SEQ ID NO: 16722
  chr9:132112538-132112569
  hypo

SEQ ID NO: 48140 - DNA, 39 bp, Homo sapiens; identical to SEQ ID NO: 16723
  chr9:132112574-132112613
  hypo

SEQ ID NO: 48141 - DNA, 53 bp, Homo sapiens; identical to SEQ ID NO: 16724
  chr9:132112682-132112735
  hypo

SEQ ID NO: 48142 - DNA, 31 bp, Homo sapiens; identical to SEQ ID NO: 16725
  chr9:132142032-132142063
  hypo

SEQ ID NO: 48143 - DNA, 69 bp, Homo sapiens; identical to SEQ ID NO: 3726
  chr9:132145664-132145733
  hypo

SEQ ID NO: 48144 - DNA, 59 bp, Homo sapiens; identical to SEQ ID NO: 16727
  chr9:132163278-132163337
  hypo

SEQ ID NO: 48145 - DNA, 31 bp, Homo sapiens; identical to SEQ ID NO: 16728
  chr9:132163339-132163370
  hypo

SEQ ID NO: 48146 - DNA, 40 bp, Homo sapiens; identical to SEQ ID NO: 16729
  chr9:132163422-132163462
  hypo

SEQ ID NO: 48147 - DNA, 31 bp, Homo sapiens; identical to SEQ ID NO: 16730
  chr9:132163466-132163497
  hypo

SEQ ID NO: 48148 - DNA, 31 bp, Homo sapiens; identical to SEQ ID NO: 16731
  chr9:132166917-132166948
  hypo

SEQ ID NO: 48149 - DNA, 31 bp, Homo sapiens; identical to SEQ ID NO: 16732
  chr9:132166951-132166982
  hypo

SEQ ID NO: 48150 - DNA, 31 bp, Homo sapiens; identical to SEQ ID NO: 16733
  chr9:132166986-132167017
  hypo

SEQ ID NO: 48151 - DNA, 31 bp, Homo sapiens; identical to SEQ ID NO: 16734
  chr9:132167031-132167062
  hypo

SEQ ID NO: 48152 - DNA, 31 bp, Homo sapiens; identical to SEQ ID NO: 16735
  chr9:132167065-132167096
  hypo

SEQ ID NO: 48153 - DNA, 31 bp, Homo sapiens; identical to SEQ ID NO: 16736
  chr9:132167158-132167189
  hypo

SEQ ID NO: 48154 - DNA, 52 bp, Homo sapiens; identical to SEQ ID NO: 16737
  chr9:132189583-132189635
  hypo

SEQ ID NO: 48155 - DNA, 31 bp, Homo sapiens; identical to SEQ ID NO: 16738
  chr9:132189722-132189753
  hypo

SEQ ID NO: 48156 - DNA, 31 bp, Homo sapiens; identical to SEQ ID NO: 16739
  chr9:132204052-132204083
  hypo

SEQ ID NO: 48157 - DNA, 48 bp, Homo sapiens; identical to SEQ ID NO: 16740
  chr9:132211771-132211819
  hypo

SEQ ID NO: 48158 - DNA, 35 bp, Homo sapiens; identical to SEQ ID NO: 3729
  chr9:132222863-132222898
  hypo

SEQ ID NO: 48159 - DNA, 31 bp, Homo sapiens; identical to SEQ ID NO: 16742
  chr9:132230760-132230791
  hypo

SEQ ID NO: 48160 - DNA, 31 bp, Homo sapiens; identical to SEQ ID NO: 16743
  chr9:132230955-132230986
  hypo

SEQ ID NO: 48161 - DNA, 31 bp, Homo sapiens; identical to SEQ ID NO: 16744
  chr9:132230991-132231022
  hypo

SEQ ID NO: 48162 - DNA, 31 bp, Homo sapiens; identical to SEQ ID NO: 16745
  chr9:132231041-132231072
  hypo

SEQ ID NO: 48163 - DNA, 34 bp, Homo sapiens; identical to SEQ ID NO: 16746
  chr9:132231092-132231126
  hypo

SEQ ID NO: 48164 - DNA, 31 bp, Homo sapiens; identical to SEQ ID NO: 16747
  chr9:132231192-132231223
  hypo

SEQ ID NO: 48165 - DNA, 34 bp, Homo sapiens; identical to SEQ ID NO: 16746
  chr9:132231256-132231290
  hypo

SEQ ID NO: 48166 - DNA, 78 bp, Homo sapiens; identical to SEQ ID NO: 3735
  chr9:132245407-132245485
  hypo

SEQ ID NO: 48167 - DNA, 57 bp, Homo sapiens; identical to SEQ ID NO: 3736
  chr9:132250697-132250754
  hypo

SEQ ID NO: 48168 - DNA, 41 bp, Homo sapiens; identical to SEQ ID NO: 3737
  chr9:132258285-132258326
  hypo

SEQ ID NO: 48169 - DNA, 80 bp, Homo sapiens; identical to SEQ ID NO: 3738
  chr9:132258337-132258417
  hypo

SEQ ID NO: 48170 - DNA, 44 bp, Homo sapiens; identical to SEQ ID NO: 3739
  chr9:132258503-132258547
  hypo

SEQ ID NO: 48171 - DNA, 56 bp, Homo sapiens; identical to SEQ ID NO: 3740
  chr9:132258618-132258674
  hypo

SEQ ID NO: 48172 - DNA, 188 bp, Homo sapiens; identical to SEQ ID NO: 3741
  chr9:132258690-132258878
  hypo

SEQ ID NO: 48173 - DNA, 39 bp, Homo sapiens; identical to SEQ ID NO: 3742
  chr9:132258891-132258930
  hypo

SEQ ID NO: 48174 - DNA, 37 bp, Homo sapiens; identical to SEQ ID NO: 16757
  chr9:132285634-132285671
  hypo

SEQ ID NO: 48175 - DNA, 78 bp, Homo sapiens; identical to SEQ ID NO: 3743
  chr9:132331031-132331109
  hypo

SEQ ID NO: 48176 - DNA, 44 bp, Homo sapiens; identical to SEQ ID NO: 3744
  chr9:132331472-132331516
  hypo

SEQ ID NO: 48177 - DNA, 31 bp, Homo sapiens; identical to SEQ ID NO: 16760
  chr9:132378412-132378443
  hypo

SEQ ID NO: 48178 - DNA, 31 bp, Homo sapiens; identical to SEQ ID NO: 16761
  chr9:132381768-132381799
  hypo

SEQ ID NO: 48179 - DNA, 31 bp, Homo sapiens; identical to SEQ ID NO: 16763
  chr9:132401945-132401976
  hypo

SEQ ID NO: 48180 - DNA, 31 bp, Homo sapiens; identical to SEQ ID NO: 16765
  chr9:132411515-132411546
  hypo

SEQ ID NO: 48181 - DNA, 31 bp, Homo sapiens; identical to SEQ ID NO: 16766
  chr9:132411576-132411607
  hypo

SEQ ID NO: 48182 - DNA, 52 bp, Homo sapiens; identical to SEQ ID NO: 16767
  chr9:132411632-132411684
  hypo

SEQ ID NO: 48183 - DNA, 31 bp, Homo sapiens; identical to SEQ ID NO: 16768
  chr9:132482544-132482575
  hypo

SEQ ID NO: 48184 - DNA, 31 bp, Homo sapiens; identical to SEQ ID NO: 16769
  chr9:132501745-132501776
  hypo

SEQ ID NO: 48185 - DNA, 34 bp, Homo sapiens; identical to SEQ ID NO: 16770
  chr9:132501823-132501857
  hypo

SEQ ID NO: 48186 - DNA, 31 bp, Homo sapiens; identical to SEQ ID NO: 16771
  chr9:132509499-132509530
  hypo

SEQ ID NO: 48187 - DNA, 31 bp, Homo sapiens; identical to SEQ ID NO: 16772
  chr9:132574946-132574977
  hypo

SEQ ID NO: 48188 - DNA, 95 bp, Homo sapiens; identical to SEQ ID NO: 16773
  chr9:132604071-132604166
  hypo

SEQ ID NO: 48189 - DNA, 31 bp, Homo sapiens; identical to SEQ ID NO: 16774
  chr9:132661151-132661182
  hypo

SEQ ID NO: 48190 - DNA, 31 bp, Homo sapiens; identical to SEQ ID NO: 16775
  chr9:132750114-132750145
  hypo

SEQ ID NO: 48191 - DNA, 31 bp, Homo sapiens; identical to SEQ ID NO: 3748
  chr9:132804331-132804362
  hypo

SEQ ID NO: 48192 - DNA, 31 bp, Homo sapiens; identical to SEQ ID NO: 3749
  chr9:132804366-132804397
  hypo

SEQ ID NO: 48193 - DNA, 64 bp, Homo sapiens; identical to SEQ ID NO: 16778
  chr9:133223967-133224031
  hypo

SEQ ID NO: 48194 - DNA, 31 bp, Homo sapiens; identical to SEQ ID NO: 16779
  chr9:133238734-133238765
  hypo

SEQ ID NO: 48195 - DNA, 31 bp, Homo sapiens; identical to SEQ ID NO: 16780
  chr9:133264507-133264538
  hypo

SEQ ID NO: 48196 - DNA, 31 bp, Homo sapiens; identical to SEQ ID NO: 16781
  chr9:133266639-133266670
  hypo

SEQ ID NO: 48197 - DNA, 31 bp, Homo sapiens; identical to SEQ ID NO: 16782
  chr9:133267499-133267530
  hypo

SEQ ID NO: 48198 - DNA, 31 bp, Homo sapiens; identical to SEQ ID NO: 16783
  chr9:133274947-133274978
  hypo

SEQ ID NO: 48199 - DNA, 31 bp, Homo sapiens; identical to SEQ ID NO: 16784
  chr9:133303021-133303052
  hypo

SEQ ID NO: 48200 - DNA, 31 bp, Homo sapiens; identical to SEQ ID NO: 16785
  chr9:133303705-133303736
  hypo

SEQ ID NO: 48201 - DNA, 43 bp, Homo sapiens; identical to SEQ ID NO: 16786
  chr9:133304500-133304543
  hypo

SEQ ID NO: 48202 - DNA, 81 bp, Homo sapiens; identical to SEQ ID NO: 16787
  chr9:133305059-133305140
  hypo

SEQ ID NO: 48203 - DNA, 31 bp, Homo sapiens; identical to SEQ ID NO: 16788
  chr9:133305961-133305992
  hypo

SEQ ID NO: 48204 - DNA, 38 bp, Homo sapiens; identical to SEQ ID NO: 16789
  chr9:133314398-133314436
  hypo

SEQ ID NO: 48205 - DNA, 31 bp, Homo sapiens; identical to SEQ ID NO: 16790
  chr9:133314479-133314510
  hypo

SEQ ID NO: 48206 - DNA, 31 bp, Homo sapiens; identical to SEQ ID NO: 16791
  chr9:133337714-133337745
  hypo

SEQ ID NO: 48207 - DNA, 44 bp, Homo sapiens; identical to SEQ ID NO: 16792
  chr9:133345458-133345502
  hypo

SEQ ID NO: 48208 - DNA, 31 bp, Homo sapiens; identical to SEQ ID NO: 16793
  chr9:133351149-133351180
  hypo

SEQ ID NO: 48209 - DNA, 31 bp, Homo sapiens; identical to SEQ ID NO: 16794
  chr9:133352248-133352279
  hypo

SEQ ID NO: 48210 - DNA, 31 bp, Homo sapiens; identical to SEQ ID NO: 16795
  chr9:133364355-133364386
  hypo

SEQ ID NO: 48211 - DNA, 31 bp, Homo sapiens; identical to SEQ ID NO: 16796
  chr9:133364922-133364953
  hypo

SEQ ID NO: 48212 - DNA, 31 bp, Homo sapiens; identical to SEQ ID NO: 16797
  chr9:133365220-133365251
  hypo

SEQ ID NO: 48213 - DNA, 31 bp, Homo sapiens; identical to SEQ ID NO: 16798
  chr9:133367502-133367533
  hypo

SEQ ID NO: 48214 - DNA, 31 bp, Homo sapiens; identical to SEQ ID NO: 16799
  chr9:133370322-133370353
  hypo

SEQ ID NO: 48215 - DNA, 31 bp, Homo sapiens; identical to SEQ ID NO: 16800
  chr9:133376591-133376622
  hypo

SEQ ID NO: 48216 - DNA, 31 bp, Homo sapiens; identical to SEQ ID NO: 16802
  chr9:133408938-133408969
  hypo

SEQ ID NO: 48217 - DNA, 31 bp, Homo sapiens; identical to SEQ ID NO: 16803
  chr9:133421533-133421564
  hypo

SEQ ID NO: 48218 - DNA, 31 bp, Homo sapiens; identical to SEQ ID NO: 16804
  chr9:133450276-133450307
  hypo

SEQ ID NO: 48219 - DNA, 459 bp, Homo sapiens; identical to SEQ ID NO: 3756
  chr9:133710381-133710840
  hypo

SEQ ID NO: 48220 - DNA, 41 bp, Homo sapiens; identical to SEQ ID NO: 16806
  chr9:133738194-133738235
  hypo

SEQ ID NO: 48221 - DNA, 35 bp, Homo sapiens; identical to SEQ ID NO: 16807
  chr9:133755898-133755933
  hypo

SEQ ID NO: 48222 - DNA, 31 bp, Homo sapiens; identical to SEQ ID NO: 16808
  chr9:133761341-133761372
  hypo

SEQ ID NO: 48223 - DNA, 31 bp, Homo sapiens; identical to SEQ ID NO: 16810
  chr9:133773571-133773602
  hypo

SEQ ID NO: 48224 - DNA, 31 bp, Homo sapiens; identical to SEQ ID NO: 16812
  chr9:133799330-133799361
  hypo

SEQ ID NO: 48225 - DNA, 31 bp, Homo sapiens; identical to SEQ ID NO: 16813
  chr9:133799382-133799413
  hypo

SEQ ID NO: 48226 - DNA, 31 bp, Homo sapiens; identical to SEQ ID NO: 16814
  chr9:133799467-133799498
  hypo

SEQ ID NO: 48227 - DNA, 31 bp, Homo sapiens; identical to SEQ ID NO: 16815
  chr9:133800540-133800571
  hypo

SEQ ID NO: 48228 - DNA, 31 bp, Homo sapiens; identical to SEQ ID NO: 16816
  chr9:133802285-133802316
  hypo

SEQ ID NO: 48229 - DNA, 31 bp, Homo sapiens; identical to SEQ ID NO: 16817
  chr9:133914586-133914617
  hypo

SEQ ID NO: 48230 - DNA, 31 bp, Homo sapiens; identical to SEQ ID NO: 16818
  chr9:133927487-133927518
  hypo

SEQ ID NO: 48231 - DNA, 55 bp, Homo sapiens; identical to SEQ ID NO: 16819
  chr9:133951049-133951104
  hypo

SEQ ID NO: 48232 - DNA, 51 bp, Homo sapiens; identical to SEQ ID NO: 16822
  chr9:134126757-134126808
  hypo

SEQ ID NO: 48233 - DNA, 32 bp, Homo sapiens; identical to SEQ ID NO: 16823
  chr9:134132751-134132783
  hypo

SEQ ID NO: 48234 - DNA, 2 bp, Homo sapiens
  chr9:134136230-134136232
  hypo
ac

SEQ ID NO: 48235 - DNA, 31 bp, Homo sapiens; identical to SEQ ID NO: 16825
  chr9:134146005-134146036
  hypo

SEQ ID NO: 48236 - DNA, 31 bp, Homo sapiens; identical to SEQ ID NO: 16828
  chr9:134190317-134190348
  hypo

SEQ ID NO: 48237 - DNA, 31 bp, Homo sapiens; identical to SEQ ID NO: 16829
  chr9:134195947-134195978
  hypo

SEQ ID NO: 48238 - DNA, 56 bp, Homo sapiens; identical to SEQ ID NO: 16830
  chr9:134400375-134400431
  hypo

SEQ ID NO: 48239 - DNA, 54 bp, Homo sapiens; identical to SEQ ID NO: 16831
  chr9:134406194-134406248
  hypo

SEQ ID NO: 48240 - DNA, 113 bp, Homo sapiens; identical to SEQ ID NO: 16832
  chr9:134746533-134746646
  hypo

SEQ ID NO: 48241 - DNA, 31 bp, Homo sapiens; identical to SEQ ID NO: 16833
  chr9:134929559-134929590
  hypo

SEQ ID NO: 48242 - DNA, 31 bp, Homo sapiens; identical to SEQ ID NO: 16834
  chr9:135021247-135021278
  hypo

SEQ ID NO: 48243 - DNA, 31 bp, Homo sapiens; identical to SEQ ID NO: 16838
  chr9:135338501-135338532
  hypo

SEQ ID NO: 48244 - DNA, 54 bp, Homo sapiens; identical to SEQ ID NO: 16839
  chr9:135338538-135338592
  hypo

SEQ ID NO: 48245 - DNA, 31 bp, Homo sapiens; identical to SEQ ID NO: 16840
  chr9:135338680-135338711
  hypo

SEQ ID NO: 48246 - DNA, 34 bp, Homo sapiens; identical to SEQ ID NO: 3769
  chr9:135395348-135395382
  hypo

SEQ ID NO: 48247 - DNA, 31 bp, Homo sapiens; identical to SEQ ID NO: 3770
  chr9:135395479-135395510
  hypo

SEQ ID NO: 48248 - DNA, 35 bp, Homo sapiens; identical to SEQ ID NO: 16843
  chr9:135447835-135447870
  hypo

SEQ ID NO: 48249 - DNA, 20 bp, Homo sapiens
  chr9:135513114-135513134
  hypo
ggagccgccaaaaaactggc

SEQ ID NO: 48250 - DNA, 36 bp, Homo sapiens; identical to SEQ ID NO: 16848
  chr9:135600715-135600751
  hypo

SEQ ID NO: 48251 - DNA, 31 bp, Homo sapiens; identical to SEQ ID NO: 16849
  chr9:135624733-135624764
  hypo

SEQ ID NO: 48252 - DNA, 64 bp, Homo sapiens; identical to SEQ ID NO: 16850
  chr9:135624938-135625002
  hypo

SEQ ID NO: 48253 - DNA, 31 bp, Homo sapiens; identical to SEQ ID NO: 16851
  chr9:135625105-135625136
  hypo

SEQ ID NO: 48254 - DNA, 50 bp, Homo sapiens; identical to SEQ ID NO: 16852
  chr9:135626042-135626092
  hypo

SEQ ID NO: 48255 - DNA, 31 bp, Homo sapiens; identical to SEQ ID NO: 16853
  chr9:135626134-135626165
  hypo

SEQ ID NO: 48256 - DNA, 43 bp, Homo sapiens; identical to SEQ ID NO: 16854
  chr9:135626203-135626246
  hypo

SEQ ID NO: 48257 - DNA, 31 bp, Homo sapiens; identical to SEQ ID NO: 16855
  chr9:135653270-135653301
  hypo

SEQ ID NO: 48258 - DNA, 31 bp, Homo sapiens; identical to SEQ ID NO: 16856
  chr9:135654706-135654737
  hypo

SEQ ID NO: 48259 - DNA, 31 bp, Homo sapiens; identical to SEQ ID NO: 16857
  chr9:135713051-135713082
  hypo

SEQ ID NO: 48260 - DNA, 34 bp, Homo sapiens; identical to SEQ ID NO: 16858
  chr9:135735332-135735366
  hypo

SEQ ID NO: 48261 - DNA, 31 bp, Homo sapiens; identical to SEQ ID NO: 16859
  chr9:135735367-135735398
  hypo

SEQ ID NO: 48262 - DNA, 31 bp, Homo sapiens; identical to SEQ ID NO: 16860
  chr9:135744759-135744790
  hypo

SEQ ID NO: 48263 - DNA, 31 bp, Homo sapiens; identical to SEQ ID NO: 16861
  chr9:135781270-135781301
  hypo

SEQ ID NO: 48264 - DNA, 31 bp, Homo sapiens; identical to SEQ ID NO: 16862
  chr9:135862918-135862949
  hypo

SEQ ID NO: 48265 - DNA, 31 bp, Homo sapiens; identical to SEQ ID NO: 16864
  chr9:135908015-135908046
  hypo

SEQ ID NO: 48266 - DNA, 31 bp, Homo sapiens; identical to SEQ ID NO: 16865
  chr9:135908049-135908080
  hypo

SEQ ID NO: 48267 - DNA, 45 bp, Homo sapiens
  chr9:135908099-135908144
  hypo
atgatacaacatcctacgagaataaacacgtttattacaatggca

SEQ ID NO: 48268 - DNA, 33 bp, Homo sapiens
  chr9:135908199-135908232
  hypo
ttagatcagtgaagagatcgtttatcccagaat

SEQ ID NO: 48269 - DNA, 31 bp, Homo sapiens; identical to SEQ ID NO: 16867
  chr9:135908535-135908566
  hypo

SEQ ID NO: 48270 - DNA, 100 bp, Homo sapiens; identical to SEQ ID NO: 16868
  chr9:135908578-135908678
  hypo

SEQ ID NO: 48271 - DNA, 149 bp, Homo sapiens; identical to SEQ ID NO: 16869
  chr9:135945846-135945995
  hypo

SEQ ID NO: 48272 - DNA, 31 bp, Homo sapiens; identical to SEQ ID NO: 16870
  chr9:135946053-135946084
  hypo

SEQ ID NO: 48273 - DNA, 54 bp, Homo sapiens; identical to SEQ ID NO: 16871
  chr9:135962403-135962457
  hypo

SEQ ID NO: 48274 - DNA, 31 bp, Homo sapiens; identical to SEQ ID NO: 16872
  chr9:135978311-135978342
  hypo

SEQ ID NO: 48275 - DNA, 35 bp, Homo sapiens; identical to SEQ ID NO: 16873
  chr9:135979101-135979136
  hypo

SEQ ID NO: 48276 - DNA, 58 bp, Homo sapiens; identical to SEQ ID NO: 16874
  chr9:135979158-135979216
  hypo

SEQ ID NO: 48277 - DNA, 31 bp, Homo sapiens; identical to SEQ ID NO: 16876
  chr9:136376887-136376918
  hypo

SEQ ID NO: 48278 - DNA, 31 bp, Homo sapiens; identical to SEQ ID NO: 16877
  chr9:136376927-136376958
  hypo

SEQ ID NO: 48279 - DNA, 31 bp, Homo sapiens; identical to SEQ ID NO: 16878
  chr9:136377821-136377852
  hypo

SEQ ID NO: 48280 - DNA, 43 bp, Homo sapiens; identical to SEQ ID NO: 16879
  chr9:136575548-136575591
  hypo

SEQ ID NO: 48281 - DNA, 75 bp, Homo sapiens; identical to SEQ ID NO: 16880
  chr9:136641168-136641243
  hypo

SEQ ID NO: 48282 - DNA, 31 bp, Homo sapiens; identical to SEQ ID NO: 16881
  chr9:136642035-136642066
  hypo

SEQ ID NO: 48283 - DNA, 37 bp, Homo sapiens; identical to SEQ ID NO: 16882
  chr9:136645035-136645072
  hypo

SEQ ID NO: 48284 - DNA, 38 bp, Homo sapiens; identical to SEQ ID NO: 16883
  chr9:136645112-136645150
  hypo

SEQ ID NO: 48285 - DNA, 31 bp, Homo sapiens; identical to SEQ ID NO: 16884
  chr9:136645201-136645232
  hypo

SEQ ID NO: 48286 - DNA, 31 bp, Homo sapiens; identical to SEQ ID NO: 16885
  chr9:136646294-136646325
  hypo

SEQ ID NO: 48287 - DNA, 31 bp, Homo sapiens; identical to SEQ ID NO: 16886
  chr9:136648155-136648186
  hypo

SEQ ID NO: 48288 - DNA, 53 bp, Homo sapiens; identical to SEQ ID NO: 16887
  chr9:136648223-136648276
  hypo

SEQ ID NO: 48289 - DNA, 31 bp, Homo sapiens; identical to SEQ ID NO: 16888
  chr9:136648297-136648328
  hypo

SEQ ID NO: 48290 - DNA, 93 bp, Homo sapiens; identical to SEQ ID NO: 16889
  chr9:136655687-136655780
  hypo

SEQ ID NO: 48291 - DNA, 70 bp, Homo sapiens; identical to SEQ ID NO: 16890
  chr9:136655857-136655927
  hypo

SEQ ID NO: 48292 - DNA, 31 bp, Homo sapiens; identical to SEQ ID NO: 16891
  chr9:136656439-136656470
  hypo

SEQ ID NO: 48293 - DNA, 75 bp, Homo sapiens; identical to SEQ ID NO: 16892
  chr9:136664523-136664598
  hypo

SEQ ID NO: 48294 - DNA, 31 bp, Homo sapiens; identical to SEQ ID NO: 16893
  chr9:136664612-136664643
  hypo

SEQ ID NO: 48295 - DNA, 31 bp, Homo sapiens; identical to SEQ ID NO: 16894
  chr9:136664656-136664687
  hypo

SEQ ID NO: 48296 - DNA, 34 bp, Homo sapiens; identical to SEQ ID NO: 16895
  chr9:136669112-136669146
  hypo

SEQ ID NO: 48297 - DNA, 172 bp, Homo sapiens; identical to SEQ ID NO: 16896
  chr9:136672018-136672190
  hypo

SEQ ID NO: 48298 - DNA, 31 bp, Homo sapiens; identical to SEQ ID NO: 16897
  chr9:136672213-136672244
  hypo

SEQ ID NO: 48299 - DNA, 31 bp, Homo sapiens; identical to SEQ ID NO: 16898
  chr9:136672779-136672810
  hypo

SEQ ID NO: 48300 - DNA, 31 bp, Homo sapiens; identical to SEQ ID NO: 16899
  chr9:136674468-136674499
  hypo

SEQ ID NO: 48301 - DNA, 31 bp, Homo sapiens; identical to SEQ ID NO: 16900
  chr9:136675284-136675315
  hypo

SEQ ID NO: 48302 - DNA, 31 bp, Homo sapiens; identical to SEQ ID NO: 16901
  chr9:136676240-136676271
  hypo

SEQ ID NO: 48303 - DNA, 31 bp, Homo sapiens; identical to SEQ ID NO: 16902
  chr9:136677204-136677235
  hypo

SEQ ID NO: 48304 - DNA, 251 bp, Homo sapiens; identical to SEQ ID NO: 16903
  chr9:136677254-136677505
  hypo

SEQ ID NO: 48305 - DNA, 35 bp, Homo sapiens; identical to SEQ ID NO: 16904
  chr9:136680292-136680327
  hypo

SEQ ID NO: 48306 - DNA, 31 bp, Homo sapiens; identical to SEQ ID NO: 16905
  chr9:136680459-136680490
  hypo

SEQ ID NO: 48307 - DNA, 31 bp, Homo sapiens; identical to SEQ ID NO: 16906
  chr9:136680541-136680572
  hypo

SEQ ID NO: 48308 - DNA, 36 bp, Homo sapiens; identical to SEQ ID NO: 16907
  chr9:136680575-136680611
  hypo

SEQ ID NO: 48309 - DNA, 31 bp, Homo sapiens; identical to SEQ ID NO: 16908
  chr9:136680616-136680647
  hypo

SEQ ID NO: 48310 - DNA, 31 bp, Homo sapiens; identical to SEQ ID NO: 16909
  chr9:136686468-136686499
  hypo

SEQ ID NO: 48311 - DNA, 31 bp, Homo sapiens; identical to SEQ ID NO: 16910
  chr9:136691770-136691801
  hypo

SEQ ID NO: 48312 - DNA, 31 bp, Homo sapiens; identical to SEQ ID NO: 16911
  chr9:136691855-136691886
  hypo

SEQ ID NO: 48313 - DNA, 55 bp, Homo sapiens; identical to SEQ ID NO: 16912
  chr9:136694924-136694979
  hypo

SEQ ID NO: 48314 - DNA, 31 bp, Homo sapiens; identical to SEQ ID NO: 16913
  chr9:136696894-136696925
  hypo

SEQ ID NO: 48315 - DNA, 37 bp, Homo sapiens; identical to SEQ ID NO: 16914
  chr9:136698780-136698817
  hypo

SEQ ID NO: 48316 - DNA, 31 bp, Homo sapiens; identical to SEQ ID NO: 16915
  chr9:136698869-136698900
  hypo

SEQ ID NO: 48317 - DNA, 110 bp, Homo sapiens; identical to SEQ ID NO: 16916
  chr9:136699683-136699793
  hypo

SEQ ID NO: 48318 - DNA, 31 bp, Homo sapiens; identical to SEQ ID NO: 16917
  chr9:136699827-136699858
  hypo

SEQ ID NO: 48319 - DNA, 31 bp, Homo sapiens; identical to SEQ ID NO: 16918
  chr9:136714184-136714215
  hypo

SEQ ID NO: 48320 - DNA, 31 bp, Homo sapiens; identical to SEQ ID NO: 16919
  chr9:136714226-136714257
  hypo

SEQ ID NO: 48321 - DNA, 41 bp, Homo sapiens; identical to SEQ ID NO: 16920
  chr9:136714452-136714493
  hypo

SEQ ID NO: 48322 - DNA, 31 bp, Homo sapiens; identical to SEQ ID NO: 16921
  chr9:136719371-136719402
  hypo

SEQ ID NO: 48323 - DNA, 63 bp, Homo sapiens; identical to SEQ ID NO: 16922
  chr9:136722068-136722131
  hypo

SEQ ID NO: 48324 - DNA, 31 bp, Homo sapiens; identical to SEQ ID NO: 16923
  chr9:136722226-136722257
  hypo

SEQ ID NO: 48325 - DNA, 46 bp, Homo sapiens; identical to SEQ ID NO: 16924
  chr9:136723289-136723335
  hypo

SEQ ID NO: 48326 - DNA, 31 bp, Homo sapiens; identical to SEQ ID NO: 16925
  chr9:136723369-136723400
  hypo

SEQ ID NO: 48327 - DNA, 49 bp, Homo sapiens; identical to SEQ ID NO: 16926
  chr9:136723420-136723469
  hypo

SEQ ID NO: 48328 - DNA, 31 bp, Homo sapiens; identical to SEQ ID NO: 16927
  chr9:136723744-136723775
  hypo

SEQ ID NO: 48329 - DNA, 41 bp, Homo sapiens; identical to SEQ ID NO: 16929
  chr9:136725494-136725535
  hypo

SEQ ID NO: 48330 - DNA, 31 bp, Homo sapiens; identical to SEQ ID NO: 16930
  chr9:136729691-136729722
  hypo

SEQ ID NO: 48331 - DNA, 31 bp, Homo sapiens; identical to SEQ ID NO: 16931
  chr9:136729726-136729757
  hypo

SEQ ID NO: 48332 - DNA, 48 bp, Homo sapiens; identical to SEQ ID NO: 16932
  chr9:136729988-136730036
  hypo

SEQ ID NO: 48333 - DNA, 36 bp, Homo sapiens; identical to SEQ ID NO: 16933
  chr9:136731600-136731636
  hypo

SEQ ID NO: 48334 - DNA, 60 bp, Homo sapiens; identical to SEQ ID NO: 16934
  chr9:136732401-136732461
  hypo

SEQ ID NO: 48335 - DNA, 58 bp, Homo sapiens; identical to SEQ ID NO: 16935
  chr9:136732516-136732574
  hypo

SEQ ID NO: 48336 - DNA, 49 bp, Homo sapiens; identical to SEQ ID NO: 16936
  chr9:136733333-136733382
  hypo

SEQ ID NO: 48337 - DNA, 125 bp, Homo sapiens; identical to SEQ ID NO: 16937
  chr9:136733577-136733702
  hypo

SEQ ID NO: 48338 - DNA, 31 bp, Homo sapiens; identical to SEQ ID NO: 16938
  chr9:136733709-136733740
  hypo

SEQ ID NO: 48339 - DNA, 31 bp, Homo sapiens; identical to SEQ ID NO: 16939
  chr9:136733758-136733789
  hypo

SEQ ID NO: 48340 - DNA, 31 bp, Homo sapiens; identical to SEQ ID NO: 16940
  chr9:136737402-136737433
  hypo

SEQ ID NO: 48341 - DNA, 31 bp, Homo sapiens; identical to SEQ ID NO: 16941
  chr9:136737612-136737643
  hypo

SEQ ID NO: 48342 - DNA, 31 bp, Homo sapiens; identical to SEQ ID NO: 16942
  chr9:136737646-136737677
  hypo

SEQ ID NO: 48343 - DNA, 31 bp, Homo sapiens; identical to SEQ ID NO: 16943
  chr9:136737707-136737738
  hypo

SEQ ID NO: 48344 - DNA, 65 bp, Homo sapiens; identical to SEQ ID NO: 16944
  chr9:136743437-136743502
  hypo

SEQ ID NO: 48345 - DNA, 31 bp, Homo sapiens; identical to SEQ ID NO: 16945
  chr9:136743507-136743538
  hypo

SEQ ID NO: 48346 - DNA, 48 bp, Homo sapiens; identical to SEQ ID NO: 16946
  chr9:136743949-136743997
  hypo

SEQ ID NO: 48347 - DNA, 31 bp, Homo sapiens; identical to SEQ ID NO: 16947
  chr9:136758976-136759007
  hypo

SEQ ID NO: 48348 - DNA, 62 bp, Homo sapiens; identical to SEQ ID NO: 16948
  chr9:136759016-136759078
  hypo

SEQ ID NO: 48349 - DNA, 31 bp, Homo sapiens; identical to SEQ ID NO: 16949
  chr9:136759083-136759114
  hypo

SEQ ID NO: 48350 - DNA, 78 bp, Homo sapiens; identical to SEQ ID NO: 16950
  chr9:136762225-136762303
  hypo

SEQ ID NO: 48351 - DNA, 60 bp, Homo sapiens; identical to SEQ ID NO: 16951
  chr9:136763772-136763832
  hypo

SEQ ID NO: 48352 - DNA, 31 bp, Homo sapiens; identical to SEQ ID NO: 16952
  chr9:136766706-136766737
  hypo

SEQ ID NO: 48353 - DNA, 61 bp, Homo sapiens; identical to SEQ ID NO: 16953
  chr9:136766739-136766800
  hypo

SEQ ID NO: 48354 - DNA, 31 bp, Homo sapiens; identical to SEQ ID NO: 16954
  chr9:136766864-136766895
  hypo

SEQ ID NO: 48355 - DNA, 31 bp, Homo sapiens; identical to SEQ ID NO: 16955
  chr9:136766908-136766939
  hypo

SEQ ID NO: 48356 - DNA, 36 bp, Homo sapiens; identical to SEQ ID NO: 16956
  chr9:136766942-136766978
  hypo

SEQ ID NO: 48357 - DNA, 31 bp, Homo sapiens; identical to SEQ ID NO: 16957
  chr9:136766979-136767010
  hypo

SEQ ID NO: 48358 - DNA, 31 bp, Homo sapiens; identical to SEQ ID NO: 16958
  chr9:136771808-136771839
  hypo

SEQ ID NO: 48359 - DNA, 31 bp, Homo sapiens; identical to SEQ ID NO: 16959
  chr9:136771861-136771892
  hypo

SEQ ID NO: 48360 - DNA, 54 bp, Homo sapiens; identical to SEQ ID NO: 16960
  chr9:136772078-136772132
  hypo

SEQ ID NO: 48361 - DNA, 31 bp, Homo sapiens; identical to SEQ ID NO: 16961
  chr9:136772146-136772177
  hypo

SEQ ID NO: 48362 - DNA, 73 bp, Homo sapiens; identical to SEQ ID NO: 16962
  chr9:136773824-136773897
  hypo

SEQ ID NO: 48363 - DNA, 49 bp, Homo sapiens; identical to SEQ ID NO: 16963
  chr9:136773902-136773951
  hypo

SEQ ID NO: 48364 - DNA, 31 bp, Homo sapiens; identical to SEQ ID NO: 16964
  chr9:136777464-136777495
  hypo

SEQ ID NO: 48365 - DNA, 58 bp, Homo sapiens; identical to SEQ ID NO: 16965
  chr9:136785102-136785160
  hypo

SEQ ID NO: 48366 - DNA, 40 bp, Homo sapiens; identical to SEQ ID NO: 16966
  chr9:136786009-136786049
  hypo

SEQ ID NO: 48367 - DNA, 58 bp, Homo sapiens; identical to SEQ ID NO: 16967
  chr9:136802013-136802071
  hypo

SEQ ID NO: 48368 - DNA, 51 bp, Homo sapiens; identical to SEQ ID NO: 16968
  chr9:136802124-136802175
  hypo

SEQ ID NO: 48369 - DNA, 31 bp, Homo sapiens; identical to SEQ ID NO: 16969
  chr9:136808205-136808236
  hypo

SEQ ID NO: 48370 - DNA, 31 bp, Homo sapiens; identical to SEQ ID NO: 16971
  chr9:136852076-136852107
  hypo

SEQ ID NO: 48371 - DNA, 37 bp, Homo sapiens; identical to SEQ ID NO: 16972
  chr9:136852628-136852665
  hypo

SEQ ID NO: 48372 - DNA, 31 bp, Homo sapiens; identical to SEQ ID NO: 16973
  chr9:136852711-136852742
  hypo

SEQ ID NO: 48373 - DNA, 79 bp, Homo sapiens; identical to SEQ ID NO: 16974
  chr9:136852746-136852825
  hypo

SEQ ID NO: 48374 - DNA, 31 bp, Homo sapiens; identical to SEQ ID NO: 3773
  chr9:136856910-136856941
  hypo

SEQ ID NO: 48375 - DNA, 31 bp, Homo sapiens; identical to SEQ ID NO: 16976
  chr9:136911190-136911221
  hypo

SEQ ID NO: 48376 - DNA, 31 bp, Homo sapiens; identical to SEQ ID NO: 16977
  chr9:136915348-136915379
  hypo

SEQ ID NO: 48377 - DNA, 35 bp, Homo sapiens; identical to SEQ ID NO: 16978
  chr9:136915610-136915645
  hypo

SEQ ID NO: 48378 - DNA, 37 bp, Homo sapiens; identical to SEQ ID NO: 16979
  chr9:136993425-136993462
  hypo

SEQ ID NO: 48379 - DNA, 35 bp, Homo sapiens; identical to SEQ ID NO: 16980
  chr9:136993475-136993510
  hypo

SEQ ID NO: 48380 - DNA, 2 bp, Homo sapiens
  chr9:136999527-136999529
  hypo
ga

SEQ ID NO: 48381 - DNA, 108 bp, Homo sapiens; identical to SEQ ID NO: 16982
  chr9:137287804-137287912
  hypo

SEQ ID NO: 48382 - DNA, 37 bp, Homo sapiens; identical to SEQ ID NO: 16983
  chr9:137583039-137583076
  hypo

SEQ ID NO: 48383 - DNA, 31 bp, Homo sapiens; identical to SEQ ID NO: 16984
  chr9:137599728-137599759
  hypo

SEQ ID NO: 48384 - DNA, 31 bp, Homo sapiens; identical to SEQ ID NO: 16985
  chr9:137609683-137609714
  hypo

SEQ ID NO: 48385 - DNA, 31 bp, Homo sapiens; identical to SEQ ID NO: 16986
  chr9:137609798-137609829
  hypo

SEQ ID NO: 48386 - DNA, 38 bp, Homo sapiens; identical to SEQ ID NO: 16987
  chr9:137609845-137609883
  hypo

SEQ ID NO: 48387 - DNA, 31 bp, Homo sapiens; identical to SEQ ID NO: 16988
  chr9:137621458-137621489
  hypo

SEQ ID NO: 48388 - DNA, 31 bp, Homo sapiens; identical to SEQ ID NO: 16990
  chr9:137693755-137693786
  hypo

SEQ ID NO: 48389 - DNA, 31 bp, Homo sapiens; identical to SEQ ID NO: 16991
  chr9:137698684-137698715
  hypo

SEQ ID NO: 48390 - DNA, 34 bp, Homo sapiens; identical to SEQ ID NO: 16992
  chr9:137727554-137727588
  hypo

SEQ ID NO: 48391 - DNA, 31 bp, Homo sapiens; identical to SEQ ID NO: 16993
  chr9:138156950-138156981
  hypo

SEQ ID NO: 48392 - DNA, 31 bp, Homo sapiens; identical to SEQ ID NO: 16994
  chr9:138357660-138357691
  hypo

SEQ ID NO: 48393 - DNA, 94 bp, Homo sapiens; identical to SEQ ID NO: 3779
  chr9:138372194-138372288
  hypo

SEQ ID NO: 48394 - DNA, 45 bp, Homo sapiens; identical to SEQ ID NO: 16996
  chr9:138507284-138507329
  hypo

SEQ ID NO: 48395 - DNA, 31 bp, Homo sapiens; identical to SEQ ID NO: 16997
  chr9:138547729-138547760
  hypo

SEQ ID NO: 48396 - DNA, 38 bp, Homo sapiens; identical to SEQ ID NO: 16998
  chr9:138654777-138654815
  hypo

SEQ ID NO: 48397 - DNA, 31 bp, Homo sapiens; identical to SEQ ID NO: 17000
  chr9:138712991-138713022
  hypo

SEQ ID NO: 48398 - DNA, 2 bp, Homo sapiens
  chr9:138743696-138743698
  hypo
tc

SEQ ID NO: 48399 - DNA, 31 bp, Homo sapiens; identical to SEQ ID NO: 17003
  chr9:138774202-138774233
  hypo

SEQ ID NO: 48400 - DNA, 31 bp, Homo sapiens; identical to SEQ ID NO: 17005
  chr9:138836302-138836333
  hypo

SEQ ID NO: 48401 - DNA, 59 bp, Homo sapiens; identical to SEQ ID NO: 17006
  chr9:138836347-138836406
  hypo

SEQ ID NO: 48402 - DNA, 74 bp, Homo sapiens; identical to SEQ ID NO: 17007
  chr9:138836414-138836488
  hypo

SEQ ID NO: 48403 - DNA, 44 bp, Homo sapiens; identical to SEQ ID NO: 17008
  chr9:138877591-138877635
  hypo

SEQ ID NO: 48404 - DNA, 31 bp, Homo sapiens; identical to SEQ ID NO: 17009
  chr9:138877673-138877704
  hypo

SEQ ID NO: 48405 - DNA, 31 bp, Homo sapiens; identical to SEQ ID NO: 17010
  chr9:138877811-138877842
  hypo

SEQ ID NO: 48406 - DNA, 45 bp, Homo sapiens; identical to SEQ ID NO: 17011
  chr9:138878498-138878543
  hypo

SEQ ID NO: 48407 - DNA, 31 bp, Homo sapiens; identical to SEQ ID NO: 17012
  chr9:138888187-138888218
  hypo

SEQ ID NO: 48408 - DNA, 44 bp, Homo sapiens; identical to SEQ ID NO: 17013
  chr9:138901583-138901627
  hypo

SEQ ID NO: 48409 - DNA, 123 bp, Homo sapiens; identical to SEQ ID NO: 17014
  chr9:138902148-138902271
  hypo

SEQ ID NO: 48410 - DNA, 49 bp, Homo sapiens; identical to SEQ ID NO: 17015
  chr9:138906091-138906140
  hypo

SEQ ID NO: 48411 - DNA, 56 bp, Homo sapiens; identical to SEQ ID NO: 17016
  chr9:138907130-138907186
  hypo

SEQ ID NO: 48412 - DNA, 31 bp, Homo sapiens; identical to SEQ ID NO: 17017
  chr9:138908323-138908354
  hypo

SEQ ID NO: 48413 - DNA, 31 bp, Homo sapiens; identical to SEQ ID NO: 17018
  chr9:138908900-138908931
  hypo

SEQ ID NO: 48414 - DNA, 40 bp, Homo sapiens; identical to SEQ ID NO: 17019
  chr9:138909963-138910003
  hypo

SEQ ID NO: 48415 - DNA, 31 bp, Homo sapiens; identical to SEQ ID NO: 17020
  chr9:138910982-138911013
  hypo

SEQ ID NO: 48416 - DNA, 40 bp, Homo sapiens; identical to SEQ ID NO: 17021
  chr9:138911045-138911085
  hypo

SEQ ID NO: 48417 - DNA, 31 bp, Homo sapiens; identical to SEQ ID NO: 17022
  chr9:138911086-138911117
  hypo

SEQ ID NO: 48418 - DNA, 31 bp, Homo sapiens; identical to SEQ ID NO: 17023
  chr9:138911136-138911167
  hypo

SEQ ID NO: 48419 - DNA, 31 bp, Homo sapiens; identical to SEQ ID NO: 17024
  chr9:138911433-138911464
  hypo

SEQ ID NO: 48420 - DNA, 44 bp, Homo sapiens; identical to SEQ ID NO: 17025
  chr9:138911466-138911510
  hypo

SEQ ID NO: 48421 - DNA, 31 bp, Homo sapiens; identical to SEQ ID NO: 17026
  chr9:138911817-138911848
  hypo

SEQ ID NO: 48422 - DNA, 32 bp, Homo sapiens; identical to SEQ ID NO: 17027
  chr9:138922160-138922192
  hypo

SEQ ID NO: 48423 - DNA, 31 bp, Homo sapiens; identical to SEQ ID NO: 17028
  chr9:138950819-138950850
  hypo

SEQ ID NO: 48424 - DNA, 31 bp, Homo sapiens; identical to SEQ ID NO: 17029
  chr9:138950893-138950924
  hypo

SEQ ID NO: 48425 - DNA, 86 bp, Homo sapiens; identical to SEQ ID NO: 17030
  chr9:138954963-138955049
  hypo

SEQ ID NO: 48426 - DNA, 37 bp, Homo sapiens; identical to SEQ ID NO: 17031
  chr9:138970474-138970511
  hypo

SEQ ID NO: 48427 - DNA, 45 bp, Homo sapiens; identical to SEQ ID NO: 17032
  chr9:138976373-138976418
  hypo

SEQ ID NO: 48428 - DNA, 38 bp, Homo sapiens; identical to SEQ ID NO: 17033
  chr9:138976594-138976632
  hypo

SEQ ID NO: 48429 - DNA, 31 bp, Homo sapiens; identical to SEQ ID NO: 17034
  chr9:138979535-138979566
  hypo

SEQ ID NO: 48430 - DNA, 31 bp, Homo sapiens; identical to SEQ ID NO: 17035
  chr9:138979873-138979904
  hypo

SEQ ID NO: 48431 - DNA, 235 bp, Homo sapiens; identical to SEQ ID NO: 3781
  chr9:138986453-138986688
  hypo

SEQ ID NO: 48432 - DNA, 464 bp, Homo sapiens; identical to SEQ ID NO: 3782
  chr9:138986692-138987156
  hypo

SEQ ID NO: 48433 - DNA, 32 bp, Homo sapiens; identical to SEQ ID NO: 3783
  chr9:138987167-138987199
  hypo

SEQ ID NO: 48434 - DNA, 143 bp, Homo sapiens; identical to SEQ ID NO: 3784
  chr9:138987368-138987511
  hypo

SEQ ID NO: 48435 - DNA, 35 bp, Homo sapiens; identical to SEQ ID NO: 3785
  chr9:138987585-138987620
  hypo

SEQ ID NO: 48436 - DNA, 51 bp, Homo sapiens; identical to SEQ ID NO: 3786
  chr9:138987676-138987727
  hypo

SEQ ID NO: 48437 - DNA, 60 bp, Homo sapiens; identical to SEQ ID NO: 17043
  chr9:139043907-139043967
  hypo

SEQ ID NO: 48438 - DNA, 31 bp, Homo sapiens; identical to SEQ ID NO: 17044
  chr9:139044755-139044786
  hypo

SEQ ID NO: 48439 - DNA, 31 bp, Homo sapiens; identical to SEQ ID NO: 17045
  chr9:139044791-139044822
  hypo

SEQ ID NO: 48440 - DNA, 35 bp, Homo sapiens; identical to SEQ ID NO: 17046
  chr9:139103913-139103948
  hypo

SEQ ID NO: 48441 - DNA, 47 bp, Homo sapiens; identical to SEQ ID NO: 17049
  chr9:139111393-139111440
  hypo

SEQ ID NO: 48442 - DNA, 31 bp, Homo sapiens; identical to SEQ ID NO: 17050
  chr9:139111448-139111479
  hypo

SEQ ID NO: 48443 - DNA, 31 bp, Homo sapiens; identical to SEQ ID NO: 17051
  chr9:139114782-139114813
  hypo

SEQ ID NO: 48444 - DNA, 31 bp, Homo sapiens; identical to SEQ ID NO: 17052
  chr9:139115298-139115329
  hypo

SEQ ID NO: 48445 - DNA, 90 bp, Homo sapiens; identical to SEQ ID NO: 17053
  chr9:139130638-139130728
  hypo

SEQ ID NO: 48446 - DNA, 31 bp, Homo sapiens; identical to SEQ ID NO: 17054
  chr9:139133519-139133550
  hypo

SEQ ID NO: 48447 - DNA, 31 bp, Homo sapiens; identical to SEQ ID NO: 17055
  chr9:139253100-139253131
  hypo

SEQ ID NO: 48448 - DNA, 31 bp, Homo sapiens; identical to SEQ ID NO: 17056
  chr9:139261466-139261497
  hypo

SEQ ID NO: 48449 - DNA, 81 bp, Homo sapiens; identical to SEQ ID NO: 17057
  chr9:139264124-139264205
  hypo

SEQ ID NO: 48450 - DNA, 31 bp, Homo sapiens; identical to SEQ ID NO: 17058
  chr9:139273917-139273948
  hypo

SEQ ID NO: 48451 - DNA, 31 bp, Homo sapiens; identical to SEQ ID NO: 3788
  chr9:139294770-139294801
  hypo

SEQ ID NO: 48452 - DNA, 31 bp, Homo sapiens; identical to SEQ ID NO: 17060
  chr9:139300479-139300510
  hypo

SEQ ID NO: 48453 - DNA, 31 bp, Homo sapiens; identical to SEQ ID NO: 17061
  chr9:139302238-139302269
  hypo

SEQ ID NO: 48454 - DNA, 59 bp, Homo sapiens; identical to SEQ ID NO: 3789
  chr9:139334258-139334317
  hypo

SEQ ID NO: 48455 - DNA, 9 bp, Homo sapiens
  chr9:139375863-139375872
  hypo
acaggcatg

SEQ ID NO: 48456 - DNA, 90 bp, Homo sapiens; identical to SEQ ID NO: 17065
  chr9:139384887-139384977
  hypo

SEQ ID NO: 48457 - DNA, 31 bp, Homo sapiens; identical to SEQ ID NO: 17066
  chr9:139388144-139388175
  hypo

SEQ ID NO: 48458 - DNA, 53 bp, Homo sapiens; identical to SEQ ID NO: 17067
  chr9:139421771-139421824
  hypo

SEQ ID NO: 48459 - DNA, 1 bp, Homo sapiens
  chr9:139421894-139421895
  hypo
g

SEQ ID NO: 48460 - DNA, 52 bp, Homo sapiens; identical to SEQ ID NO: 3790
  chr9:139440853-139440905
  hypo

SEQ ID NO: 48461 - DNA, 31 bp, Homo sapiens; identical to SEQ ID NO: 17071
  chr9:139449119-139449150
  hypo

SEQ ID NO: 48462 - DNA, 31 bp, Homo sapiens; identical to SEQ ID NO: 17072
  chr9:139465108-139465139
  hypo

SEQ ID NO: 48463 - DNA, 31 bp, Homo sapiens; identical to SEQ ID NO: 17073
  chr9:139484034-139484065
  hypo

SEQ ID NO: 48464 - DNA, 40 bp, Homo sapiens; identical to SEQ ID NO: 17074
  chr9:139484146-139484186
  hypo

SEQ ID NO: 48465 - DNA, 72 bp, Homo sapiens; identical to SEQ ID NO: 17075
  chr9:139484212-139484284
  hypo

SEQ ID NO: 48466 - DNA, 31 bp, Homo sapiens; identical to SEQ ID NO: 17076
  chr9:139501901-139501932
  hypo

SEQ ID NO: 48467 - DNA, 2 bp, Homo sapiens
  chr9:139501990-139501992
  hypo
ca

SEQ ID NO: 48468 - DNA, 73 bp, Homo sapiens; identical to SEQ ID NO: 17079
  chr9:139509480-139509553
  hypo

SEQ ID NO: 48469 - DNA, 59 bp, Homo sapiens; identical to SEQ ID NO: 17080
  chr9:139509595-139509654
  hypo

SEQ ID NO: 48470 - DNA, 31 bp, Homo sapiens; identical to SEQ ID NO: 17081
  chr9:139570934-139570965
  hypo

SEQ ID NO: 48471 - DNA, 38 bp, Homo sapiens; identical to SEQ ID NO: 17082
  chr9:139571843-139571881
  hypo

SEQ ID NO: 48472 - DNA, 45 bp, Homo sapiens; identical to SEQ ID NO: 17083
  chr9:139571891-139571936
  hypo

SEQ ID NO: 48473 - DNA, 31 bp, Homo sapiens; identical to SEQ ID NO: 17084
  chr9:139579045-139579076
  hypo

SEQ ID NO: 48474 - DNA, 31 bp, Homo sapiens; identical to SEQ ID NO: 3793
  chr9:139580673-139580704
  hypo

SEQ ID NO: 48475 - DNA, 97 bp, Homo sapiens; identical to SEQ ID NO: 3794
  chr9:139581778-139581875
  hypo

SEQ ID NO: 48476 - DNA, 31 bp, Homo sapiens; identical to SEQ ID NO: 17087
  chr9:139586083-139586114
  hypo

SEQ ID NO: 48477 - DNA, 58 bp, Homo sapiens; identical to SEQ ID NO: 17088
  chr9:139586515-139586573
  hypo

SEQ ID NO: 48478 - DNA, 31 bp, Homo sapiens; identical to SEQ ID NO: 17089
  chr9:139586604-139586635
  hypo

SEQ ID NO: 48479 - DNA, 31 bp, Homo sapiens; identical to SEQ ID NO: 17090
  chr9:139586679-139586710
  hypo

SEQ ID NO: 48480 - DNA, 103 bp, Homo sapiens; identical to SEQ ID NO: 17091
  chr9:139586958-139587061
  hypo

SEQ ID NO: 48481 - DNA, 110 bp, Homo sapiens; identical to SEQ ID NO: 17092
  chr9:139587088-139587198
  hypo

SEQ ID NO: 48482 - DNA, 85 bp, Homo sapiens; identical to SEQ ID NO: 17093
  chr9:139598242-139598327
  hypo

SEQ ID NO: 48483 - DNA, 31 bp, Homo sapiens; identical to SEQ ID NO: 17094
  chr9:139598329-139598360
  hypo

SEQ ID NO: 48484 - DNA, 31 bp, Homo sapiens; identical to SEQ ID NO: 17095
  chr9:139598371-139598402
  hypo

SEQ ID NO: 48485 - DNA, 31 bp, Homo sapiens; identical to SEQ ID NO: 17096
  chr9:139641115-139641146
  hypo

SEQ ID NO: 48486 - DNA, 32 bp, Homo sapiens; identical to SEQ ID NO: 17097
  chr9:139666884-139666916
  hypo

SEQ ID NO: 48487 - DNA, 2 bp, Homo sapiens
  chr9:139698657-139698659
  hypo
ag

SEQ ID NO: 48488 - DNA, 42 bp, Homo sapiens; identical to SEQ ID NO: 17102
  chr9:139703928-139703970
  hypo

SEQ ID NO: 48489 - DNA, 31 bp, Homo sapiens; identical to SEQ ID NO: 17106
  chr9:139705002-139705033
  hypo

SEQ ID NO: 48490 - DNA, 31 bp, Homo sapiens; identical to SEQ ID NO: 17108
  chr9:139735214-139735245
  hypo

SEQ ID NO: 48491 - DNA, 2 bp, Homo sapiens
  chr9:139735531-139735533
  hypo
ac

SEQ ID NO: 48492 - DNA, 31 bp, Homo sapiens; identical to SEQ ID NO: 17112
  chr9:139846908-139846939
  hypo

SEQ ID NO: 48493 - DNA, 53 bp, Homo sapiens; identical to SEQ ID NO: 17113
  chr9:139846983-139847036
  hypo

SEQ ID NO: 48494 - DNA, 31 bp, Homo sapiens; identical to SEQ ID NO: 17114
  chr9:139847038-139847069
  hypo

SEQ ID NO: 48495 - DNA, 31 bp, Homo sapiens; identical to SEQ ID NO: 17116
  chr9:139858923-139858954
  hypo

SEQ ID NO: 48496 - DNA, 44 bp, Homo sapiens; identical to SEQ ID NO: 17122
  chr9:139910703-139910747
  hypo

SEQ ID NO: 48497 - DNA, 31 bp, Homo sapiens; identical to SEQ ID NO: 17123
  chr9:139934674-139934705
  hypo

SEQ ID NO: 48498 - DNA, 31 bp, Homo sapiens; identical to SEQ ID NO: 17124
  chr9:139945423-139945454
  hypo

SEQ ID NO: 48499 - DNA, 34 bp, Homo sapiens; identical to SEQ ID NO: 3798
  chr9:139948372-139948406
  hypo

SEQ ID NO: 48500 - DNA, 55 bp, Homo sapiens; identical to SEQ ID NO: 3799
  chr9:139948416-139948471
  hypo

SEQ ID NO: 48501 - DNA, 26 bp, Homo sapiens
  chr9:140024587-140024613
  hypo
ctggccgcgtggtcaccggcaagaag

SEQ ID NO: 48502 - DNA, 34 bp, Homo sapiens; identical to SEQ ID NO: 17130
  chr9:140078704-140078738
  hypo

SEQ ID NO: 48503 - DNA, 31 bp, Homo sapiens; identical to SEQ ID NO: 17131
  chr9:140081899-140081930
  hypo

SEQ ID NO: 48504 - DNA, 31 bp, Homo sapiens; identical to SEQ ID NO: 17132
  chr9:140088446-140088477
  hypo

SEQ ID NO: 48505 - DNA, 31 bp, Homo sapiens; identical to SEQ ID NO: 17134
  chr9:140124090-140124121
  hypo

SEQ ID NO: 48506 - DNA, 39 bp, Homo sapiens; identical to SEQ ID NO: 17135
  chr9:140137587-140137626
  hypo

SEQ ID NO: 48507 - DNA, 55 bp, Homo sapiens; identical to SEQ ID NO: 17136
  chr9:140218252-140218307
  hypo

SEQ ID NO: 48508 - DNA, 31 bp, Homo sapiens; identical to SEQ ID NO: 17137
  chr9:140244415-140244446
  hypo

SEQ ID NO: 48509 - DNA, 31 bp, Homo sapiens; identical to SEQ ID NO: 17138
  chr9:140260841-140260872
  hypo

SEQ ID NO: 48510 - DNA, 47 bp, Homo sapiens; identical to SEQ ID NO: 17139
  chr9:140263677-140263724
  hypo

SEQ ID NO: 48511 - DNA, 31 bp, Homo sapiens; identical to SEQ ID NO: 17140
  chr9:140263734-140263765
  hypo

SEQ ID NO: 48512 - DNA, 31 bp, Homo sapiens; identical to SEQ ID NO: 17141
  chr9:140269908-140269939
  hypo

SEQ ID NO: 48513 - DNA, 31 bp, Homo sapiens; identical to SEQ ID NO: 17142
  chr9:140361288-140361319
  hypo

SEQ ID NO: 48514 - DNA, 31 bp, Homo sapiens; identical to SEQ ID NO: 17143
  chr9:140373388-140373419
  hypo

SEQ ID NO: 48515 - DNA, 31 bp, Homo sapiens; identical to SEQ ID NO: 17144
  chr9:140375091-140375122
  hypo

SEQ ID NO: 48516 - DNA, 31 bp, Homo sapiens; identical to SEQ ID NO: 17145
  chr9:140378940-140378971
  hypo

SEQ ID NO: 48517 - DNA, 31 bp, Homo sapiens; identical to SEQ ID NO: 17149
  chr9:140396804-140396835
  hypo

SEQ ID NO: 48518 - DNA, 31 bp, Homo sapiens; identical to SEQ ID NO: 17150
  chr9:140396838-140396869
  hypo

SEQ ID NO: 48519 - DNA, 31 bp, Homo sapiens; identical to SEQ ID NO: 17151
  chr9:140396891-140396922
  hypo

SEQ ID NO: 48520 - DNA, 2 bp, Homo sapiens
  chr9:140396981-140396983
  hypo
gc

SEQ ID NO: 48521 - DNA, 31 bp, Homo sapiens; identical to SEQ ID NO: 17155
  chr9:140416957-140416988
  hypo

SEQ ID NO: 48522 - DNA, 38 bp, Homo sapiens; identical to SEQ ID NO: 17156
  chr9:140418787-140418825
  hypo

SEQ ID NO: 48523 - DNA, 31 bp, Homo sapiens; identical to SEQ ID NO: 3809
  chr9:140445801-140445832
  hypo

SEQ ID NO: 48524 - DNA, 191 bp, Homo sapiens; identical to SEQ ID NO: 3810
  chr9:140445936-140446127
  hypo

SEQ ID NO: 48525 - DNA, 69 bp, Homo sapiens; identical to SEQ ID NO: 3812
  chr9:140473436-140473505
  hypo

SEQ ID NO: 48526 - DNA, 31 bp, Homo sapiens; identical to SEQ ID NO: 3813
  chr9:140473528-140473559
  hypo

SEQ ID NO: 48527 - DNA, 31 bp, Homo sapiens; identical to SEQ ID NO: 17161
  chr9:140507427-140507458
  hypo

SEQ ID NO: 48528 - DNA, 31 bp, Homo sapiens; identical to SEQ ID NO: 17162
  chr9:140538197-140538228
  hypo

SEQ ID NO: 48529 - DNA, 31 bp, Homo sapiens; identical to SEQ ID NO: 17164
  chr9:140587421-140587452
  hypo

SEQ ID NO: 48530 - DNA, 31 bp, Homo sapiens; identical to SEQ ID NO: 17165
  chr9:140592396-140592427
  hypo

SEQ ID NO: 48531 - DNA, 37 bp, Homo sapiens; identical to SEQ ID NO: 17166
  chr9:140592629-140592666
  hypo

SEQ ID NO: 48532 - DNA, 31 bp, Homo sapiens; identical to SEQ ID NO: 17167
  chr9:140592679-140592710
  hypo

SEQ ID NO: 48533 - DNA, 87 bp, Homo sapiens; identical to SEQ ID NO: 17168
  chr9:140606077-140606164
  hypo

SEQ ID NO: 48534 - DNA, 31 bp, Homo sapiens; identical to SEQ ID NO: 17169
  chr9:140606166-140606197
  hypo

SEQ ID NO: 48535 - DNA, 31 bp, Homo sapiens; identical to SEQ ID NO: 17170
  chr9:140611203-140611234
  hypo

SEQ ID NO: 48536 - DNA, 38 bp, Homo sapiens; identical to SEQ ID NO: 17171
  chr9:140611243-140611281
  hypo

SEQ ID NO: 48537 - DNA, 31 bp, Homo sapiens; identical to SEQ ID NO: 17172
  chr9:140611412-140611443
  hypo

SEQ ID NO: 48538 - DNA, 36 bp, Homo sapiens; identical to SEQ ID NO: 17173
  chr9:140612586-140612622
  hypo

SEQ ID NO: 48539 - DNA, 31 bp, Homo sapiens; identical to SEQ ID NO: 17174
  chr9:140612707-140612738
  hypo

SEQ ID NO: 48540 - DNA, 31 bp, Homo sapiens; identical to SEQ ID NO: 17176
  chr9:140620042-140620073
  hypo

SEQ ID NO: 48541 - DNA, 31 bp, Homo sapiens; identical to SEQ ID NO: 17177
  chr9:140620769-140620800
  hypo

SEQ ID NO: 48542 - DNA, 31 bp, Homo sapiens; identical to SEQ ID NO: 17178
  chr9:140620805-140620836
  hypo

SEQ ID NO: 48543 - DNA, 67 bp, Homo sapiens; identical to SEQ ID NO: 17179
  chr9:140620837-140620904
  hypo

SEQ ID NO: 48544 - DNA, 31 bp, Homo sapiens; identical to SEQ ID NO: 17180
  chr9:140653936-140653967
  hypo

SEQ ID NO: 48545 - DNA, 31 bp, Homo sapiens; identical to SEQ ID NO: 17181
  chr9:140654116-140654147
  hypo

SEQ ID NO: 48546 - DNA, 55 bp, Homo sapiens; identical to SEQ ID NO: 17182
  chr9:140654329-140654384
  hypo

SEQ ID NO: 48547 - DNA, 2 bp, Homo sapiens
  chr9:140708691-140708693
  hypo
cc

SEQ ID NO: 48548 - DNA, 31 bp, Homo sapiens; identical to SEQ ID NO: 17191
  chr9:140852045-140852076
  hypo

SEQ ID NO: 48549 - DNA, 31 bp, Homo sapiens; identical to SEQ ID NO: 17192
  chr9:140938683-140938714
  hypo

SEQ ID NO: 48550 - DNA, 31 bp, Homo sapiens; identical to SEQ ID NO: 17193
  chr9:141015037-141015068
  hypo

SEQ ID NO: 48551 - DNA, 31 bp, Homo sapiens; identical to SEQ ID NO: 17195
  chr9:141069526-141069557
  hypo

SEQ ID NO: 48552 - DNA, 31 bp, Homo sapiens; identical to SEQ ID NO: 17196
  chr9:141069670-141069701
  hypo

SEQ ID NO: 48553 - DNA, 31 bp, Homo sapiens; identical to SEQ ID NO: 17197
  chr9:141069702-141069733
  hypo

SEQ ID NO: 48554 - DNA, 31 bp, Homo sapiens; identical to SEQ ID NO: 17198
  chr9:141070600-141070631
  hypo

SEQ ID NO: 48555 - DNA, 31 bp, Homo sapiens; identical to SEQ ID NO: 17199
  chr10:326506-326537
  hypo

SEQ ID NO: 48556 - DNA, 31 bp, Homo sapiens; identical to SEQ ID NO: 17200
  chr10:327401-327432
  hypo

SEQ ID NO: 48557 - DNA, 31 bp, Homo sapiens; identical to SEQ ID NO: 17201
  chr10:338152-338183
  hypo

SEQ ID NO: 48558 - DNA, 31 bp, Homo sapiens; identical to SEQ ID NO: 17202
  chr10:387526-387557
  hypo

SEQ ID NO: 48559 - DNA, 31 bp, Homo sapiens; identical to SEQ ID NO: 17203
  chr10:391367-391398
  hypo

SEQ ID NO: 48560 - DNA, 31 bp, Homo sapiens; identical to SEQ ID NO: 17204
  chr10:410433-410464
  hypo

SEQ ID NO: 48561 - DNA, 31 bp, Homo sapiens; identical to SEQ ID NO: 17205
  chr10:431729-431760
  hypo

SEQ ID NO: 48562 - DNA, 45 bp, Homo sapiens; identical to SEQ ID NO: 17206
  chr10:463656-463701
  hypo

SEQ ID NO: 48563 - DNA, 45 bp, Homo sapiens; identical to SEQ ID NO: 17207
  chr10:545442-545487
  hypo

SEQ ID NO: 48564 - DNA, 31 bp, Homo sapiens; identical to SEQ ID NO: 17208
  chr10:545533-545564
  hypo

SEQ ID NO: 48565 - DNA, 31 bp, Homo sapiens; identical to SEQ ID NO: 17209
  chr10:545570-545601
  hypo

SEQ ID NO: 48566 - DNA, 55 bp, Homo sapiens; identical to SEQ ID NO: 17210
  chr10:583335-583390
  hypo

SEQ ID NO: 48567 - DNA, 31 bp, Homo sapiens; identical to SEQ ID NO: 17211
  chr10:583424-583455
  hypo

SEQ ID NO: 48568 - DNA, 31 bp, Homo sapiens; identical to SEQ ID NO: 17212
  chr10:583487-583518
  hypo

SEQ ID NO: 48569 - DNA, 50 bp, Homo sapiens; identical to SEQ ID NO: 17213
  chr10:583713-583763
  hypo

SEQ ID NO: 48570 - DNA, 69 bp, Homo sapiens; identical to SEQ ID NO: 17214
  chr10:603005-603074
  hypo

SEQ ID NO: 48571 - DNA, 64 bp, Homo sapiens; identical to SEQ ID NO: 17215
  chr10:603122-603186
  hypo

SEQ ID NO: 48572 - DNA, 78 bp, Homo sapiens; identical to SEQ ID NO: 17216
  chr10:630293-630371
  hypo

SEQ ID NO: 48573 - DNA, 31 bp, Homo sapiens; identical to SEQ ID NO: 17217
  chr10:630561-630592
  hypo

SEQ ID NO: 48574 - DNA, 31 bp, Homo sapiens; identical to SEQ ID NO: 17218
  chr10:644048-644079
  hypo

SEQ ID NO: 48575 - DNA, 31 bp, Homo sapiens; identical to SEQ ID NO: 17219
  chr10:661289-661320
  hypo

SEQ ID NO: 48576 - DNA, 31 bp, Homo sapiens; identical to SEQ ID NO: 17220
  chr10:682647-682678
  hypo

SEQ ID NO: 48577 - DNA, 71 bp, Homo sapiens; identical to SEQ ID NO: 17221
  chr10:685211-685282
  hypo

SEQ ID NO: 48578 - DNA, 80 bp, Homo sapiens; identical to SEQ ID NO: 17222
  chr10:685291-685371
  hypo

SEQ ID NO: 48579 - DNA, 31 bp, Homo sapiens; identical to SEQ ID NO: 17223
  chr10:685731-685762
  hypo

SEQ ID NO: 48580 - DNA, 76 bp, Homo sapiens; identical to SEQ ID NO: 17226
  chr10:851601-851677
  hypo

SEQ ID NO: 48581 - DNA, 31 bp, Homo sapiens; identical to SEQ ID NO: 17227
  chr10:868645-868676
  hypo

SEQ ID NO: 48582 - DNA, 31 bp, Homo sapiens; identical to SEQ ID NO: 17228
  chr10:868742-868773
  hypo

SEQ ID NO: 48583 - DNA, 47 bp, Homo sapiens; identical to SEQ ID NO: 17229
  chr10:868779-868826
  hypo

SEQ ID NO: 48584 - DNA, 53 bp, Homo sapiens; identical to SEQ ID NO: 17230
  chr10:1007454-1007507
  hypo

SEQ ID NO: 48585 - DNA, 31 bp, Homo sapiens; identical to SEQ ID NO: 17231
  chr10:1148513-1148544
  hypo

SEQ ID NO: 48586 - DNA, 31 bp, Homo sapiens; identical to SEQ ID NO: 17233
  chr10:1671647-1671678
  hypo

SEQ ID NO: 48587 - DNA, 55 bp, Homo sapiens; identical to SEQ ID NO: 17234
  chr10:3146042-3146097
  hypo

SEQ ID NO: 48588 - DNA, 31 bp, Homo sapiens; identical to SEQ ID NO: 17235
  chr10:3150920-3150951
  hypo

SEQ ID NO: 48589 - DNA, 45 bp, Homo sapiens; identical to SEQ ID NO: 17236
  chr10:3151619-3151664
  hypo

SEQ ID NO: 48590 - DNA, 31 bp, Homo sapiens; identical to SEQ ID NO: 17237
  chr10:3192624-3192655
  hypo

SEQ ID NO: 48591 - DNA, 31 bp, Homo sapiens; identical to SEQ ID NO: 17239
  chr10:3277175-3277206
  hypo

SEQ ID NO: 48592 - DNA, 31 bp, Homo sapiens; identical to SEQ ID NO: 17240
  chr10:3277209-3277240
  hypo

SEQ ID NO: 48593 - DNA, 56 bp, Homo sapiens; identical to SEQ ID NO: 17241
  chr10:3277259-3277315
  hypo

SEQ ID NO: 48594 - DNA, 31 bp, Homo sapiens; identical to SEQ ID NO: 17242
  chr10:3277333-3277364
  hypo

SEQ ID NO: 48595 - DNA, 31 bp, Homo sapiens; identical to SEQ ID NO: 17243
  chr10:3641660-3641691
  hypo

SEQ ID NO: 48596 - DNA, 54 bp, Homo sapiens; identical to SEQ ID NO: 17244
  chr10:3712902-3712956
  hypo

SEQ ID NO: 48597 - DNA, 48 bp, Homo sapiens; identical to SEQ ID NO: 17245
  chr10:3712977-3713025
  hypo

SEQ ID NO: 48598 - DNA, 31 bp, Homo sapiens; identical to SEQ ID NO: 17246
  chr10:4500574-4500605
  hypo

SEQ ID NO: 48599 - DNA, 31 bp, Homo sapiens; identical to SEQ ID NO: 17247
  chr10:5512031-5512062
  hypo

SEQ ID NO: 48600 - DNA, 31 bp, Homo sapiens; identical to SEQ ID NO: 17249
  chr10:5527429-5527460
  hypo

SEQ ID NO: 48601 - DNA, 31 bp, Homo sapiens; identical to SEQ ID NO: 17250
  chr10:5527499-5527530
  hypo

SEQ ID NO: 48602 - DNA, 66 bp, Homo sapiens; identical to SEQ ID NO: 17251
  chr10:5527539-5527605
  hypo

SEQ ID NO: 48603 - DNA, 48 bp, Homo sapiens; identical to SEQ ID NO: 17252
  chr10:5530662-5530710
  hypo

SEQ ID NO: 48604 - DNA, 31 bp, Homo sapiens; identical to SEQ ID NO: 17255
  chr10:5536562-5536593
  hypo

SEQ ID NO: 48605 - DNA, 61 bp, Homo sapiens; identical to SEQ ID NO: 17256
  chr10:5536598-5536659
  hypo

SEQ ID NO: 48606 - DNA, 31 bp, Homo sapiens; identical to SEQ ID NO: 17257
  chr10:5537075-5537106
  hypo

SEQ ID NO: 48607 - DNA, 31 bp, Homo sapiens; identical to SEQ ID NO: 17258
  chr10:5537147-5537178
  hypo

SEQ ID NO: 48608 - DNA, 31 bp, Homo sapiens; identical to SEQ ID NO: 17259
  chr10:5549565-5549596
  hypo

SEQ ID NO: 48609 - DNA, 31 bp, Homo sapiens; identical to SEQ ID NO: 17260
  chr10:5571209-5571240
  hypo

SEQ ID NO: 48610 - DNA, 31 bp, Homo sapiens; identical to SEQ ID NO: 17261
  chr10:5640942-5640973
  hypo

SEQ ID NO: 48611 - DNA, 41 bp, Homo sapiens; identical to SEQ ID NO: 17262
  chr10:5680698-5680739
  hypo

SEQ ID NO: 48612 - DNA, 59 bp, Homo sapiens; identical to SEQ ID NO: 17263
  chr10:5681053-5681112
  hypo

SEQ ID NO: 48613 - DNA, 83 bp, Homo sapiens; identical to SEQ ID NO: 3820
  chr10:5708184-5708267
  hypo

SEQ ID NO: 48614 - DNA, 56 bp, Homo sapiens; identical to SEQ ID NO: 3821
  chr10:5708425-5708481
  hypo

SEQ ID NO: 48615 - DNA, 66 bp, Homo sapiens; identical to SEQ ID NO: 3822
  chr10:5708499-5708565
  hypo

SEQ ID NO: 48616 - DNA, 31 bp, Homo sapiens; identical to SEQ ID NO: 17267
  chr10:5796212-5796243
  hypo

SEQ ID NO: 48617 - DNA, 31 bp, Homo sapiens; identical to SEQ ID NO: 17268
  chr10:5863341-5863372
  hypo

SEQ ID NO: 48618 - DNA, 31 bp, Homo sapiens; identical to SEQ ID NO: 17270
  chr10:5962671-5962702
  hypo

SEQ ID NO: 48619 - DNA, 31 bp, Homo sapiens; identical to SEQ ID NO: 17271
  chr10:5962710-5962741
  hypo

SEQ ID NO: 48620 - DNA, 54 bp, Homo sapiens; identical to SEQ ID NO: 17272
  chr10:5962786-5962840
  hypo

SEQ ID NO: 48621 - DNA, 2 bp, Homo sapiens
  chr10:6003401-6003403
  hypo
tg

SEQ ID NO: 48622 - DNA, 31 bp, Homo sapiens; identical to SEQ ID NO: 3825
  chr10:6019532-6019563
  hypo

SEQ ID NO: 48623 - DNA, 31 bp, Homo sapiens; identical to SEQ ID NO: 17277
  chr10:6024477-6024508
  hypo

SEQ ID NO: 48624 - DNA, 38 bp, Homo sapiens
  chr10:6024544-6024582
  hypo
ggtgatgccaatcatccgcagatgttcacgtgggtgac

SEQ ID NO: 48625 - DNA, 31 bp, Homo sapiens; identical to SEQ ID NO: 17279
  chr10:6041768-6041799
  hypo

SEQ ID NO: 48626 - DNA, 49 bp, Homo sapiens; identical to SEQ ID NO: 17280
  chr10:6135598-6135647
  hypo

SEQ ID NO: 48627 - DNA, 31 bp, Homo sapiens; identical to SEQ ID NO: 17282
  chr10:6161977-6162008
  hypo

SEQ ID NO: 48628 - DNA, 2 bp, Homo sapiens
  chr10:6162137-6162139
  hypo
gt

SEQ ID NO: 48629 - DNA, 31 bp, Homo sapiens; identical to SEQ ID NO: 17284
  chr10:6164389-6164420
  hypo

SEQ ID NO: 48630 - DNA, 2 bp, Homo sapiens
  chr10:7216520-7216522
  hypo
tt

SEQ ID NO: 48631 - DNA, 31 bp, Homo sapiens; identical to SEQ ID NO: 17291
  chr10:7236486-7236517
  hypo

SEQ ID NO: 48632 - DNA, 31 bp, Homo sapiens; identical to SEQ ID NO: 17292
  chr10:7236532-7236563
  hypo

SEQ ID NO: 48633 - DNA, 31 bp, Homo sapiens; identical to SEQ ID NO: 17293
  chr10:7239773-7239804
  hypo

SEQ ID NO: 48634 - DNA, 46 bp, Homo sapiens; identical to SEQ ID NO: 17294
  chr10:7239812-7239858
  hypo

SEQ ID NO: 48635 - DNA, 31 bp, Homo sapiens; identical to SEQ ID NO: 17295
  chr10:7239868-7239899
  hypo

SEQ ID NO: 48636 - DNA, 31 bp, Homo sapiens; identical to SEQ ID NO: 17296
  chr10:7239920-7239951
  hypo

SEQ ID NO: 48637 - DNA, 31 bp, Homo sapiens; identical to SEQ ID NO: 17297
  chr10:7246892-7246923
  hypo

SEQ ID NO: 48638 - DNA, 2 bp, Homo sapiens
  chr10:7290468-7290470
  hypo
ac

SEQ ID NO: 48639 - DNA, 31 bp, Homo sapiens; identical to SEQ ID NO: 17300
  chr10:7381914-7381945
  hypo

SEQ ID NO: 48640 - DNA, 31 bp, Homo sapiens; identical to SEQ ID NO: 17301
  chr10:7381964-7381995
  hypo

SEQ ID NO: 48641 - DNA, 31 bp, Homo sapiens; identical to SEQ ID NO: 17302
  chr10:7382017-7382048
  hypo

SEQ ID NO: 48642 - DNA, 2 bp, Homo sapiens
  chr10:7401230-7401232
  hypo
ga

SEQ ID NO: 48643 - DNA, 16 bp, Homo sapiens
  chr10:7453081-7453097
  hypo
gtgcgtgcgcgtgcag

SEQ ID NO: 48644 - DNA, 23 bp, Homo sapiens
  chr10:7985138-7985161
  hypo
ccagcgctgcctttgccgttgcc

SEQ ID NO: 48645 - DNA, 31 bp, Homo sapiens; identical to SEQ ID NO: 17325
  chr10:11520400-11520431
  hypo

SEQ ID NO: 48646 - DNA, 31 bp, Homo sapiens; identical to SEQ ID NO: 17326
  chr10:11870931-11870962
  hypo

SEQ ID NO: 48647 - DNA, 69 bp, Homo sapiens; identical to SEQ ID NO: 17327
  chr10:11871015-11871084
  hypo

SEQ ID NO: 48648 - DNA, 31 bp, Homo sapiens; identical to SEQ ID NO: 17328
  chr10:11871094-11871125
  hypo

SEQ ID NO: 48649 - DNA, 36 bp, Homo sapiens; identical to SEQ ID NO: 17329
  chr10:11878793-11878829
  hypo

SEQ ID NO: 48650 - DNA, 42 bp, Homo sapiens; identical to SEQ ID NO: 17331
  chr10:11894967-11895009
  hypo

SEQ ID NO: 48651 - DNA, 47 bp, Homo sapiens; identical to SEQ ID NO: 17333
  chr10:11898438-11898485
  hypo

SEQ ID NO: 48652 - DNA, 31 bp, Homo sapiens; identical to SEQ ID NO: 17335
  chr10:11914997-11915028
  hypo

SEQ ID NO: 48653 - DNA, 31 bp, Homo sapiens; identical to SEQ ID NO: 17336
  chr10:11920972-11921003
  hypo

SEQ ID NO: 48654 - DNA, 78 bp, Homo sapiens; identical to SEQ ID NO: 17337
  chr10:11921011-11921089
  hypo

SEQ ID NO: 48655 - DNA, 31 bp, Homo sapiens; identical to SEQ ID NO: 17338
  chr10:11923031-11923062
  hypo

SEQ ID NO: 48656 - DNA, 38 bp, Homo sapiens; identical to SEQ ID NO: 17339
  chr10:11923065-11923103
  hypo

SEQ ID NO: 48657 - DNA, 31 bp, Homo sapiens; identical to SEQ ID NO: 17340
  chr10:11923152-11923183
  hypo

SEQ ID NO: 48658 - DNA, 51 bp, Homo sapiens; identical to SEQ ID NO: 17341
  chr10:11941265-11941316
  hypo

SEQ ID NO: 48659 - DNA, 31 bp, Homo sapiens; identical to SEQ ID NO: 17342
  chr10:11951074-11951105
  hypo

SEQ ID NO: 48660 - DNA, 61 bp, Homo sapiens; identical to SEQ ID NO: 37750
  chr10:12390765-12390826
  hypo

SEQ ID NO: 48661 - DNA, 15 bp, Homo sapiens
  chr10:12390995-12391010
  hypo
cgaatgagctcccgc

SEQ ID NO: 48662 - DNA, 67 bp, Homo sapiens; identical to SEQ ID NO: 17347
  chr10:12485159-12485226
  hypo

SEQ ID NO: 48663 - DNA, 31 bp, Homo sapiens; identical to SEQ ID NO: 17348
  chr10:12545390-12545421
  hypo

SEQ ID NO: 48664 - DNA, 31 bp, Homo sapiens; identical to SEQ ID NO: 17349
  chr10:12545453-12545484
  hypo

SEQ ID NO: 48665 - DNA, 43 bp, Homo sapiens; identical to SEQ ID NO: 17350
  chr10:12671579-12671622
  hypo

SEQ ID NO: 48666 - DNA, 31 bp, Homo sapiens; identical to SEQ ID NO: 3864
  chr10:13341451-13341482
  hypo

SEQ ID NO: 48667 - DNA, 67 bp, Homo sapiens; identical to SEQ ID NO: 3865
  chr10:13341505-13341572
  hypo

SEQ ID NO: 48668 - DNA, 36 bp, Homo sapiens; identical to SEQ ID NO: 17353
  chr10:13516621-13516657
  hypo

SEQ ID NO: 48669 - DNA, 31 bp, Homo sapiens; identical to SEQ ID NO: 17354
  chr10:13531358-13531389
  hypo

SEQ ID NO: 48670 - DNA, 31 bp, Homo sapiens; identical to SEQ ID NO: 17355
  chr10:13630040-13630071
  hypo

SEQ ID NO: 48671 - DNA, 2 bp, Homo sapiens
  chr10:13715560-13715562
  hypo
tg

SEQ ID NO: 48672 - DNA, 31 bp, Homo sapiens; identical to SEQ ID NO: 17357
  chr10:13735187-13735218
  hypo

SEQ ID NO: 48673 - DNA, 31 bp, Homo sapiens; identical to SEQ ID NO: 17358
  chr10:13737502-13737533
  hypo

SEQ ID NO: 48674 - DNA, 31 bp, Homo sapiens; identical to SEQ ID NO: 17359
  chr10:13741937-13741968
  hypo

SEQ ID NO: 48675 - DNA, 38 bp, Homo sapiens; identical to SEQ ID NO: 17360
  chr10:13769491-13769529
  hypo

SEQ ID NO: 48676 - DNA, 72 bp, Homo sapiens; identical to SEQ ID NO: 3869
  chr10:14646261-14646333
  hypo

SEQ ID NO: 48677 - DNA, 101 bp, Homo sapiens; identical to SEQ ID NO: 3870
  chr10:14646653-14646754
  hypo

SEQ ID NO: 48678 - DNA, 2 bp, Homo sapiens
  chr10:14966087-14966089
  hypo
gg

SEQ ID NO: 48679 - DNA, 31 bp, Homo sapiens; identical to SEQ ID NO: 17366
  chr10:15000458-15000489
  hypo

SEQ ID NO: 48680 - DNA, 2 bp, Homo sapiens
  chr10:15009036-15009038
  hypo
tc

SEQ ID NO: 48681 - DNA, 35 bp, Homo sapiens; identical to SEQ ID NO: 17378
  chr10:21606053-21606088
  hypo

SEQ ID NO: 48682 - DNA, 154 bp, Homo sapiens; identical to SEQ ID NO: 3882
  chr10:21805906-21806060
  hypo

SEQ ID NO: 48683 - DNA, 31 bp, Homo sapiens; identical to SEQ ID NO: 3883
  chr10:21816421-21816452
  hypo

SEQ ID NO: 48684 - DNA, 2 bp, Homo sapiens
  chr10:22033211-22033213
  hypo
gt

SEQ ID NO: 48685 - DNA, 45 bp, Homo sapiens; identical to SEQ ID NO: 17385
  chr10:22033351-22033396
  hypo

SEQ ID NO: 48686 - DNA, 42 bp, Homo sapiens; identical to SEQ ID NO: 3889
  chr10:22540629-22540671
  hypo

SEQ ID NO: 48687 - DNA, 31 bp, Homo sapiens; identical to SEQ ID NO: 3897
  chr10:22605455-22605486
  hypo

SEQ ID NO: 48688 - DNA, 2 bp, Homo sapiens
  chr10:24988588-24988590
  hypo
ac

SEQ ID NO: 48689 - DNA, 165 bp, Homo sapiens; identical to SEQ ID NO: 3898
  chr10:25012545-25012710
  hypo

SEQ ID NO: 48690 - DNA, 31 bp, Homo sapiens; identical to SEQ ID NO: 17402
  chr10:27020993-27021024
  hypo

SEQ ID NO: 48691 - DNA, 31 bp, Homo sapiens; identical to SEQ ID NO: 17403
  chr10:27021042-27021073
  hypo

SEQ ID NO: 48692 - DNA, 31 bp, Homo sapiens; identical to SEQ ID NO: 17404
  chr10:27021075-27021106
  hypo

SEQ ID NO: 48693 - DNA, 31 bp, Homo sapiens; identical to SEQ ID NO: 17405
  chr10:27021122-27021153
  hypo

SEQ ID NO: 48694 - DNA, 30 bp, Homo sapiens; identical to SEQ ID NO: 17406
  chr10:27096988-27097018
  hypo

SEQ ID NO: 48695 - DNA, 31 bp, Homo sapiens; identical to SEQ ID NO: 17408
  chr10:28557287-28557318
  hypo

SEQ ID NO: 48696 - DNA, 66 bp, Homo sapiens; identical to SEQ ID NO: 3907
  chr10:28966235-28966301
  hypo

SEQ ID NO: 48697 - DNA, 97 bp, Homo sapiens; identical to SEQ ID NO: 3908
  chr10:28966597-28966694
  hypo

SEQ ID NO: 48698 - DNA, 31 bp, Homo sapiens; identical to SEQ ID NO: 17412
  chr10:29581545-29581576
  hypo

SEQ ID NO: 48699 - DNA, 31 bp, Homo sapiens; identical to SEQ ID NO: 17413
  chr10:29581579-29581610
  hypo

SEQ ID NO: 48700 - DNA, 31 bp, Homo sapiens; identical to SEQ ID NO: 17414
  chr10:29581632-29581663
  hypo

SEQ ID NO: 48701 - DNA, 40 bp, Homo sapiens; identical to SEQ ID NO: 3910
  chr10:29738054-29738094
  hypo

SEQ ID NO: 48702 - DNA, 31 bp, Homo sapiens; identical to SEQ ID NO: 3911
  chr10:29738102-29738133
  hypo

SEQ ID NO: 48703 - DNA, 31 bp, Homo sapiens; identical to SEQ ID NO: 17417
  chr10:29784320-29784351
  hypo

SEQ ID NO: 48704 - DNA, 31 bp, Homo sapiens; identical to SEQ ID NO: 17418
  chr10:29805521-29805552
  hypo

SEQ ID NO: 48705 - DNA, 71 bp, Homo sapiens; identical to SEQ ID NO: 17419
  chr10:29805622-29805693
  hypo

SEQ ID NO: 48706 - DNA, 38 bp, Homo sapiens; identical to SEQ ID NO: 17420
  chr10:29815840-29815878
  hypo

SEQ ID NO: 48707 - DNA, 97 bp, Homo sapiens; identical to SEQ ID NO: 17421
  chr10:29815889-29815986
  hypo

SEQ ID NO: 48708 - DNA, 31 bp, Homo sapiens; identical to SEQ ID NO: 17422
  chr10:29821665-29821696
  hypo

SEQ ID NO: 48709 - DNA, 31 bp, Homo sapiens; identical to SEQ ID NO: 17423
  chr10:29821697-29821728
  hypo

SEQ ID NO: 48710 - DNA, 85 bp, Homo sapiens; identical to SEQ ID NO: 17424
  chr10:29821739-29821824
  hypo

SEQ ID NO: 48711 - DNA, 40 bp, Homo sapiens; identical to SEQ ID NO: 17425
  chr10:29840086-29840126
  hypo

SEQ ID NO: 48712 - DNA, 36 bp, Homo sapiens; identical to SEQ ID NO: 17426
  chr10:29857036-29857072
  hypo

SEQ ID NO: 48713 - DNA, 31 bp, Homo sapiens; identical to SEQ ID NO: 17427
  chr10:29884471-29884502
  hypo

SEQ ID NO: 48714 - DNA, 31 bp, Homo sapiens; identical to SEQ ID NO: 17428
  chr10:29884543-29884574
  hypo

SEQ ID NO: 48715 - DNA, 47 bp, Homo sapiens; identical to SEQ ID NO: 17429
  chr10:29884632-29884679
  hypo

SEQ ID NO: 48716 - DNA, 31 bp, Homo sapiens; identical to SEQ ID NO: 17430
  chr10:29993108-29993139
  hypo

SEQ ID NO: 48717 - DNA, 56 bp, Homo sapiens; identical to SEQ ID NO: 3912
  chr10:30025021-30025077
  hypo

SEQ ID NO: 48718 - DNA, 49 bp, Homo sapiens; identical to SEQ ID NO: 3913
  chr10:30025084-30025133
  hypo

SEQ ID NO: 48719 - DNA, 31 bp, Homo sapiens; identical to SEQ ID NO: 17433
  chr10:30102454-30102485
  hypo

SEQ ID NO: 48720 - DNA, 48 bp, Homo sapiens; identical to SEQ ID NO: 17434
  chr10:30280768-30280816
  hypo

SEQ ID NO: 48721 - DNA, 31 bp, Homo sapiens; identical to SEQ ID NO: 17435
  chr10:30336420-30336451
  hypo

SEQ ID NO: 48722 - DNA, 31 bp, Homo sapiens; identical to SEQ ID NO: 17436
  chr10:30471109-30471140
  hypo

SEQ ID NO: 48723 - DNA, 35 bp, Homo sapiens; identical to SEQ ID NO: 17438
  chr10:30981746-30981781
  hypo

SEQ ID NO: 48724 - DNA, 1 bp, Homo sapiens
  chr10:31006068-31006069
  hypo
c

SEQ ID NO: 48725 - DNA, 31 bp, Homo sapiens; identical to SEQ ID NO: 17440
  chr10:31076407-31076438
  hypo

SEQ ID NO: 48726 - DNA, 31 bp, Homo sapiens; identical to SEQ ID NO: 17441
  chr10:31137749-31137780
  hypo

SEQ ID NO: 48727 - DNA, 87 bp, Homo sapiens; identical to SEQ ID NO: 3920
  chr10:31608554-31608641
  hypo

SEQ ID NO: 48728 - DNA, 100 bp, Homo sapiens; identical to SEQ ID NO: 37782
  chr10:31608645-31608745
  hypo

SEQ ID NO: 48729 - DNA, 39 bp, Homo sapiens; identical to SEQ ID NO: 37783
  chr10:31609416-31609455
  hypo

SEQ ID NO: 48730 - DNA, 39 bp, Homo sapiens; identical to SEQ ID NO: 3923
  chr10:31609544-31609583
  hypo

SEQ ID NO: 48731 - DNA, 84 bp, Homo sapiens; identical to SEQ ID NO: 37785
  chr10:31609585-31609669
  hypo

SEQ ID NO: 48732 - DNA, 2 bp, Homo sapiens
  chr10:31892880-31892882
  hypo
tc

SEQ ID NO: 48733 - DNA, 31 bp, Homo sapiens; identical to SEQ ID NO: 17450
  chr10:32042434-32042465
  hypo

SEQ ID NO: 48734 - DNA, 31 bp, Homo sapiens; identical to SEQ ID NO: 17451
  chr10:32062806-32062837
  hypo

SEQ ID NO: 48735 - DNA, 31 bp, Homo sapiens; identical to SEQ ID NO: 17453
  chr10:33432804-33432835
  hypo

SEQ ID NO: 48736 - DNA, 31 bp, Homo sapiens; identical to SEQ ID NO: 17456
  chr10:33780120-33780151
  hypo

SEQ ID NO: 48737 - DNA, 31 bp, Homo sapiens; identical to SEQ ID NO: 17457
  chr10:34063104-34063135
  hypo

SEQ ID NO: 48738 - DNA, 31 bp, Homo sapiens; identical to SEQ ID NO: 17458
  chr10:34276836-34276867
  hypo

SEQ ID NO: 48739 - DNA, 31 bp, Homo sapiens; identical to SEQ ID NO: 17459
  chr10:34276901-34276932
  hypo

SEQ ID NO: 48740 - DNA, 42 bp, Homo sapiens; identical to SEQ ID NO: 17460
  chr10:34276936-34276978
  hypo

SEQ ID NO: 48741 - DNA, 31 bp, Homo sapiens; identical to SEQ ID NO: 17461
  chr10:34276988-34277019
  hypo

SEQ ID NO: 48742 - DNA, 31 bp, Homo sapiens; identical to SEQ ID NO: 17462
  chr10:34318438-34318469
  hypo

SEQ ID NO: 48743 - DNA, 31 bp, Homo sapiens; identical to SEQ ID NO: 17463
  chr10:34532762-34532793
  hypo

SEQ ID NO: 48744 - DNA, 31 bp, Homo sapiens; identical to SEQ ID NO: 17464
  chr10:34777861-34777892
  hypo

SEQ ID NO: 48745 - DNA, 250 bp, Homo sapiens; identical to SEQ ID NO: 3940
  chr10:35103598-35103848
  hypo

SEQ ID NO: 48746 - DNA, 31 bp, Homo sapiens; identical to SEQ ID NO: 17469
  chr10:43265284-43265315
  hypo

SEQ ID NO: 48747 - DNA, 67 bp, Homo sapiens; identical to SEQ ID NO: 17470
  chr10:43265361-43265428
  hypo

SEQ ID NO: 48748 - DNA, 31 bp, Homo sapiens; identical to SEQ ID NO: 17471
  chr10:43627021-43627052
  hypo

SEQ ID NO: 48749 - DNA, 31 bp, Homo sapiens; identical to SEQ ID NO: 17472
  chr10:43858253-43858284
  hypo

SEQ ID NO: 48750 - DNA, 2 bp, Homo sapiens
  chr10:43858288-43858290
  hypo
gg

SEQ ID NO: 48751 - DNA, 31 bp, Homo sapiens; identical to SEQ ID NO: 3956
  chr10:44420042-44420073
  hypo

SEQ ID NO: 48752 - DNA, 31 bp, Homo sapiens; identical to SEQ ID NO: 17475
  chr10:45419799-45419830
  hypo

SEQ ID NO: 48753 - DNA, 51 bp, Homo sapiens; identical to SEQ ID NO: 3957
  chr10:49514478-49514529
  hypo

SEQ ID NO: 48754 - DNA, 41 bp, Homo sapiens; identical to SEQ ID NO: 17478
  chr10:49658431-49658472
  hypo

SEQ ID NO: 48755 - DNA, 60 bp, Homo sapiens; identical to SEQ ID NO: 17479
  chr10:50680405-50680465
  hypo

SEQ ID NO: 48756 - DNA, 37 bp, Homo sapiens; identical to SEQ ID NO: 17480
  chr10:50680489-50680526
  hypo

SEQ ID NO: 48757 - DNA, 31 bp, Homo sapiens; identical to SEQ ID NO: 17481
  chr10:50680528-50680559
  hypo

SEQ ID NO: 48758 - DNA, 31 bp, Homo sapiens; identical to SEQ ID NO: 17482
  chr10:52429237-52429268
  hypo

SEQ ID NO: 48759 - DNA, 31 bp, Homo sapiens; identical to SEQ ID NO: 17483
  chr10:62662662-62662693
  hypo

SEQ ID NO: 48760 - DNA, 50 bp, Homo sapiens; identical to SEQ ID NO: 17484
  chr10:62662756-62662806
  hypo

SEQ ID NO: 48761 - DNA, 31 bp, Homo sapiens; identical to SEQ ID NO: 17485
  chr10:62662811-62662842
  hypo

SEQ ID NO: 48762 - DNA, 42 bp, Homo sapiens; identical to SEQ ID NO: 17486
  chr10:63757868-63757910
  hypo

SEQ ID NO: 48763 - DNA, 95 bp, Homo sapiens; identical to SEQ ID NO: 3958
  chr10:64028002-64028097
  hypo

SEQ ID NO: 48764 - DNA, 44 bp, Homo sapiens; identical to SEQ ID NO: 17490
  chr10:64945156-64945200
  hypo

SEQ ID NO: 48765 - DNA, 31 bp, Homo sapiens; identical to SEQ ID NO: 17491
  chr10:64945229-64945260
  hypo

SEQ ID NO: 48766 - DNA, 31 bp, Homo sapiens; identical to SEQ ID NO: 17493
  chr10:64997149-64997180
  hypo

SEQ ID NO: 48767 - DNA, 30 bp, Homo sapiens; identical to SEQ ID NO: 17495
  chr10:65313563-65313593
  hypo

SEQ ID NO: 48768 - DNA, 31 bp, Homo sapiens; identical to SEQ ID NO: 17497
  chr10:69853921-69853952
  hypo

SEQ ID NO: 48769 - DNA, 31 bp, Homo sapiens; identical to SEQ ID NO: 17501
  chr10:70987006-70987037
  hypo

SEQ ID NO: 48770 - DNA, 160 bp, Homo sapiens; identical to SEQ ID NO: 17502
  chr10:71007177-71007337
  hypo

SEQ ID NO: 48771 - DNA, 31 bp, Homo sapiens; identical to SEQ ID NO: 17503
  chr10:71008307-71008338
  hypo

SEQ ID NO: 48772 - DNA, 31 bp, Homo sapiens; identical to SEQ ID NO: 17504
  chr10:71014928-71014959
  hypo

SEQ ID NO: 48773 - DNA, 49 bp, Homo sapiens; identical to SEQ ID NO: 17506
  chr10:71154728-71154777
  hypo

SEQ ID NO: 48774 - DNA, 51 bp, Homo sapiens; identical to SEQ ID NO: 17507
  chr10:71174692-71174743
  hypo

SEQ ID NO: 48775 - DNA, 31 bp, Homo sapiens; identical to SEQ ID NO: 17508
  chr10:71245587-71245618
  hypo

SEQ ID NO: 48776 - DNA, 31 bp, Homo sapiens; identical to SEQ ID NO: 17509
  chr10:71245634-71245665
  hypo

SEQ ID NO: 48777 - DNA, 67 bp, Homo sapiens; identical to SEQ ID NO: 17510
  chr10:71245711-71245778
  hypo

SEQ ID NO: 48778 - DNA, 31 bp, Homo sapiens; identical to SEQ ID NO: 17511
  chr10:71566070-71566101
  hypo

SEQ ID NO: 48779 - DNA, 31 bp, Homo sapiens; identical to SEQ ID NO: 17512
  chr10:71566110-71566141
  hypo

SEQ ID NO: 48780 - DNA, 31 bp, Homo sapiens; identical to SEQ ID NO: 17513
  chr10:71568580-71568611
  hypo

SEQ ID NO: 48781 - DNA, 31 bp, Homo sapiens; identical to SEQ ID NO: 17514
  chr10:71581897-71581928
  hypo

SEQ ID NO: 48782 - DNA, 31 bp, Homo sapiens; identical to SEQ ID NO: 17515
  chr10:71639772-71639803
  hypo

SEQ ID NO: 48783 - DNA, 31 bp, Homo sapiens; identical to SEQ ID NO: 17516
  chr10:71639806-71639837
  hypo

SEQ ID NO: 48784 - DNA, 66 bp, Homo sapiens; identical to SEQ ID NO: 17517
  chr10:71639873-71639939
  hypo

SEQ ID NO: 48785 - DNA, 31 bp, Homo sapiens; identical to SEQ ID NO: 17518
  chr10:71848017-71848048
  hypo

SEQ ID NO: 48786 - DNA, 73 bp, Homo sapiens; identical to SEQ ID NO: 17519
  chr10:72491961-72492034
  hypo

SEQ ID NO: 48787 - DNA, 55 bp, Homo sapiens; identical to SEQ ID NO: 17520
  chr10:72492072-72492127
  hypo

SEQ ID NO: 48788 - DNA, 31 bp, Homo sapiens; identical to SEQ ID NO: 17521
  chr10:72503154-72503185
  hypo

SEQ ID NO: 48789 - DNA, 38 bp, Homo sapiens; identical to SEQ ID NO: 17522
  chr10:72503443-72503481
  hypo

SEQ ID NO: 48790 - DNA, 57 bp, Homo sapiens; identical to SEQ ID NO: 17523
  chr10:72509554-72509611
  hypo

SEQ ID NO: 48791 - DNA, 31 bp, Homo sapiens; identical to SEQ ID NO: 17524
  chr10:72537207-72537238
  hypo

SEQ ID NO: 48792 - DNA, 31 bp, Homo sapiens; identical to SEQ ID NO: 17525
  chr10:72838754-72838785
  hypo

SEQ ID NO: 48793 - DNA, 31 bp, Homo sapiens; identical to SEQ ID NO: 17526
  chr10:72838793-72838824
  hypo

SEQ ID NO: 48794 - DNA, 31 bp, Homo sapiens; identical to SEQ ID NO: 17527
  chr10:72838936-72838967
  hypo

SEQ ID NO: 48795 - DNA, 79 bp, Homo sapiens; identical to SEQ ID NO: 17528
  chr10:72887225-72887304
  hypo

SEQ ID NO: 48796 - DNA, 31 bp, Homo sapiens; identical to SEQ ID NO: 17529
  chr10:72887397-72887428
  hypo

SEQ ID NO: 48797 - DNA, 35 bp, Homo sapiens; identical to SEQ ID NO: 17531
  chr10:73326699-73326734
  hypo

SEQ ID NO: 48798 - DNA, 31 bp, Homo sapiens; identical to SEQ ID NO: 17532
  chr10:73822605-73822636
  hypo

SEQ ID NO: 48799 - DNA, 31 bp, Homo sapiens; identical to SEQ ID NO: 3970
  chr10:74032649-74032680
  hypo

SEQ ID NO: 48800 - DNA, 76 bp, Homo sapiens; identical to SEQ ID NO: 3971
  chr10:74032778-74032854
  hypo

SEQ ID NO: 48801 - DNA, 31 bp, Homo sapiens; identical to SEQ ID NO: 17535
  chr10:74100514-74100545
  hypo

SEQ ID NO: 48802 - DNA, 29 bp, Homo sapiens
  chr10:74100549-74100578
  hypo
accctggttgtccctgcggtcctgccttt

SEQ ID NO: 48803 - DNA, 4 bp, Homo sapiens
  chr10:74100613-74100617
  hypo
acgt

SEQ ID NO: 48804 - DNA, 26 bp, Homo sapiens
  chr10:75384237-75384263
  hypo
ttacaggcgtgagtcaccgcgcccag

SEQ ID NO: 48805 - DNA, 36 bp, Homo sapiens; identical to SEQ ID NO: 3975
  chr10:75408168-75408204
  hypo

SEQ ID NO: 48806 - DNA, 93 bp, Homo sapiens; identical to SEQ ID NO: 17541
  chr10:75491398-75491491
  hypo

SEQ ID NO: 48807 - DNA, 31 bp, Homo sapiens; identical to SEQ ID NO: 17546
  chr10:75893786-75893817
  hypo

SEQ ID NO: 48808 - DNA, 31 bp, Homo sapiens; identical to SEQ ID NO: 17547
  chr10:75966599-75966630
  hypo

SEQ ID NO: 48809 - DNA, 62 bp, Homo sapiens; identical to SEQ ID NO: 17549
  chr10:76585430-76585492
  hypo

SEQ ID NO: 48810 - DNA, 31 bp, Homo sapiens; identical to SEQ ID NO: 17550
  chr10:76655265-76655296
  hypo

SEQ ID NO: 48811 - DNA, 2 bp, Homo sapiens
  chr10:76784729-76784731
  hypo
aa

SEQ ID NO: 48812 - DNA, 36 bp, Homo sapiens; identical to SEQ ID NO: 17552
  chr10:76845052-76845088
  hypo

SEQ ID NO: 48813 - DNA, 31 bp, Homo sapiens; identical to SEQ ID NO: 17553
  chr10:76857398-76857429
  hypo

SEQ ID NO: 48814 - DNA, 23 bp, Homo sapiens
  chr10:76997783-76997806
  hypo
tttaacaacgctgactaggcatt

SEQ ID NO: 48815 - DNA, 98 bp, Homo sapiens; identical to SEQ ID NO: 3978
  chr10:77160052-77160150
  hypo

SEQ ID NO: 48816 - DNA, 52 bp, Homo sapiens; identical to SEQ ID NO: 17557
  chr10:77242294-77242346
  hypo

SEQ ID NO: 48817 - DNA, 53 bp, Homo sapiens; identical to SEQ ID NO: 17558
  chr10:77242420-77242473
  hypo

SEQ ID NO: 48818 - DNA, 31 bp, Homo sapiens; identical to SEQ ID NO: 17560
  chr10:77663258-77663289
  hypo

SEQ ID NO: 48819 - DNA, 31 bp, Homo sapiens; identical to SEQ ID NO: 17561
  chr10:77838045-77838076
  hypo

SEQ ID NO: 48820 - DNA, 45 bp, Homo sapiens; identical to SEQ ID NO: 17562
  chr10:79540285-79540330
  hypo

SEQ ID NO: 48821 - DNA, 31 bp, Homo sapiens; identical to SEQ ID NO: 17564
  chr10:79565637-79565668
  hypo

SEQ ID NO: 48822 - DNA, 31 bp, Homo sapiens; identical to SEQ ID NO: 17565
  chr10:79581128-79581159
  hypo

SEQ ID NO: 48823 - DNA, 31 bp, Homo sapiens; identical to SEQ ID NO: 17566
  chr10:79581167-79581198
  hypo

SEQ ID NO: 48824 - DNA, 31 bp, Homo sapiens; identical to SEQ ID NO: 17567
  chr10:79581204-79581235
  hypo

SEQ ID NO: 48825 - DNA, 32 bp, Homo sapiens; identical to SEQ ID NO: 17568
  chr10:79670434-79670466
  hypo

SEQ ID NO: 48826 - DNA, 46 bp, Homo sapiens; identical to SEQ ID NO: 3991
  chr10:79686267-79686313
  hypo

SEQ ID NO: 48827 - DNA, 42 bp, Homo sapiens; identical to SEQ ID NO: 3992
  chr10:79686574-79686616
  hypo

SEQ ID NO: 48828 - DNA, 63 bp, Homo sapiens; identical to SEQ ID NO: 3993
  chr10:79686617-79686680
  hypo

SEQ ID NO: 48829 - DNA, 86 bp, Homo sapiens; identical to SEQ ID NO: 3994
  chr10:79686714-79686800
  hypo

SEQ ID NO: 48830 - DNA, 89 bp, Homo sapiens; identical to SEQ ID NO: 3995
  chr10:79686955-79687044
  hypo

SEQ ID NO: 48831 - DNA, 43 bp, Homo sapiens; identical to SEQ ID NO: 17574
  chr10:79713477-79713520
  hypo

SEQ ID NO: 48832 - DNA, 31 bp, Homo sapiens; identical to SEQ ID NO: 17575
  chr10:79739250-79739281
  hypo

SEQ ID NO: 48833 - DNA, 31 bp, Homo sapiens; identical to SEQ ID NO: 17576
  chr10:79788120-79788151
  hypo

SEQ ID NO: 48834 - DNA, 31 bp, Homo sapiens; identical to SEQ ID NO: 17577
  chr10:79814428-79814459
  hypo

SEQ ID NO: 48835 - DNA, 50 bp, Homo sapiens; identical to SEQ ID NO: 17578
  chr10:80540447-80540497
  hypo

SEQ ID NO: 48836 - DNA, 81 bp, Homo sapiens; identical to SEQ ID NO: 17579
  chr10:80540579-80540660
  hypo

SEQ ID NO: 48837 - DNA, 31 bp, Homo sapiens; identical to SEQ ID NO: 17580
  chr10:80588138-80588169
  hypo

SEQ ID NO: 48838 - DNA, 31 bp, Homo sapiens; identical to SEQ ID NO: 17581
  chr10:80638009-80638040
  hypo

SEQ ID NO: 48839 - DNA, 31 bp, Homo sapiens; identical to SEQ ID NO: 17582
  chr10:80714408-80714439
  hypo

SEQ ID NO: 48840 - DNA, 38 bp, Homo sapiens; identical to SEQ ID NO: 3996
  chr10:80733745-80733783
  hypo

SEQ ID NO: 48841 - DNA, 64 bp, Homo sapiens; identical to SEQ ID NO: 17584
  chr10:80739955-80740019
  hypo

SEQ ID NO: 48842 - DNA, 31 bp, Homo sapiens; identical to SEQ ID NO: 17585
  chr10:80763088-80763119
  hypo

SEQ ID NO: 48843 - DNA, 31 bp, Homo sapiens; identical to SEQ ID NO: 17586
  chr10:80766187-80766218
  hypo

SEQ ID NO: 48844 - DNA, 40 bp, Homo sapiens; identical to SEQ ID NO: 17587
  chr10:80766239-80766279
  hypo

SEQ ID NO: 48845 - DNA, 46 bp, Homo sapiens; identical to SEQ ID NO: 17588
  chr10:80766336-80766382
  hypo

SEQ ID NO: 48846 - DNA, 34 bp, Homo sapiens; identical to SEQ ID NO: 3997
  chr10:80827232-80827266
  hypo

SEQ ID NO: 48847 - DNA, 121 bp, Homo sapiens; identical to SEQ ID NO: 3998
  chr10:80828531-80828652
  hypo

SEQ ID NO: 48848 - DNA, 39 bp, Homo sapiens; identical to SEQ ID NO: 17592
  chr10:80870192-80870231
  hypo

SEQ ID NO: 48849 - DNA, 31 bp, Homo sapiens; identical to SEQ ID NO: 17593
  chr10:80882132-80882163
  hypo

SEQ ID NO: 48850 - DNA, 31 bp, Homo sapiens; identical to SEQ ID NO: 17594
  chr10:80882864-80882895
  hypo

SEQ ID NO: 48851 - DNA, 54 bp, Homo sapiens; identical to SEQ ID NO: 17596
  chr10:80921745-80921799
  hypo

SEQ ID NO: 48852 - DNA, 45 bp, Homo sapiens; identical to SEQ ID NO: 17597
  chr10:80921823-80921868
  hypo

SEQ ID NO: 48853 - DNA, 56 bp, Homo sapiens; identical to SEQ ID NO: 17598
  chr10:80921886-80921942
  hypo

SEQ ID NO: 48854 - DNA, 73 bp, Homo sapiens; identical to SEQ ID NO: 17599
  chr10:80921955-80922028
  hypo

SEQ ID NO: 48855 - DNA, 31 bp, Homo sapiens; identical to SEQ ID NO: 17600
  chr10:80927517-80927548
  hypo

SEQ ID NO: 48856 - DNA, 31 bp, Homo sapiens; identical to SEQ ID NO: 17601
  chr10:80928562-80928593
  hypo

SEQ ID NO: 48857 - DNA, 31 bp, Homo sapiens; identical to SEQ ID NO: 17602
  chr10:80930707-80930738
  hypo

SEQ ID NO: 48858 - DNA, 31 bp, Homo sapiens; identical to SEQ ID NO: 17603
  chr10:80930749-80930780
  hypo

SEQ ID NO: 48859 - DNA, 31 bp, Homo sapiens; identical to SEQ ID NO: 17604
  chr10:80930974-80931005
  hypo

SEQ ID NO: 48860 - DNA, 47 bp, Homo sapiens; identical to SEQ ID NO: 17605
  chr10:80931026-80931073
  hypo

SEQ ID NO: 48861 - DNA, 45 bp, Homo sapiens; identical to SEQ ID NO: 17606
  chr10:80931088-80931133
  hypo

SEQ ID NO: 48862 - DNA, 31 bp, Homo sapiens; identical to SEQ ID NO: 17607
  chr10:80953591-80953622
  hypo

SEQ ID NO: 48863 - DNA, 60 bp, Homo sapiens; identical to SEQ ID NO: 17608
  chr10:80956203-80956263
  hypo

SEQ ID NO: 48864 - DNA, 37 bp, Homo sapiens; identical to SEQ ID NO: 17610
  chr10:80961550-80961587
  hypo

SEQ ID NO: 48865 - DNA, 31 bp, Homo sapiens; identical to SEQ ID NO: 17611
  chr10:80969928-80969959
  hypo

SEQ ID NO: 48866 - DNA, 31 bp, Homo sapiens; identical to SEQ ID NO: 17612
  chr10:80969970-80970001
  hypo

SEQ ID NO: 48867 - DNA, 31 bp, Homo sapiens; identical to SEQ ID NO: 17613
  chr10:80970033-80970064
  hypo

SEQ ID NO: 48868 - DNA, 48 bp, Homo sapiens; identical to SEQ ID NO: 17614
  chr10:80970065-80970113
  hypo

SEQ ID NO: 48869 - DNA, 34 bp, Homo sapiens; identical to SEQ ID NO: 17615
  chr10:80971585-80971619
  hypo

SEQ ID NO: 48870 - DNA, 31 bp, Homo sapiens; identical to SEQ ID NO: 17616
  chr10:80971632-80971663
  hypo

SEQ ID NO: 48871 - DNA, 31 bp, Homo sapiens; identical to SEQ ID NO: 17617
  chr10:80971677-80971708
  hypo

SEQ ID NO: 48872 - DNA, 38 bp, Homo sapiens; identical to SEQ ID NO: 17618
  chr10:80971719-80971757
  hypo

SEQ ID NO: 48873 - DNA, 31 bp, Homo sapiens; identical to SEQ ID NO: 17619
  chr10:80974592-80974623
  hypo

SEQ ID NO: 48874 - DNA, 31 bp, Homo sapiens; identical to SEQ ID NO: 17620
  chr10:80974662-80974693
  hypo

SEQ ID NO: 48875 - DNA, 81 bp, Homo sapiens; identical to SEQ ID NO: 17621
  chr10:80974701-80974782
  hypo

SEQ ID NO: 48876 - DNA, 44 bp, Homo sapiens; identical to SEQ ID NO: 17622
  chr10:80974888-80974932
  hypo

SEQ ID NO: 48877 - DNA, 74 bp, Homo sapiens; identical to SEQ ID NO: 17623
  chr10:80974943-80975017
  hypo

SEQ ID NO: 48878 - DNA, 31 bp, Homo sapiens; identical to SEQ ID NO: 17624
  chr10:80975040-80975071
  hypo

SEQ ID NO: 48879 - DNA, 31 bp, Homo sapiens; identical to SEQ ID NO: 17625
  chr10:80975873-80975904
  hypo

SEQ ID NO: 48880 - DNA, 31 bp, Homo sapiens; identical to SEQ ID NO: 17626
  chr10:80975918-80975949
  hypo

SEQ ID NO: 48881 - DNA, 31 bp, Homo sapiens; identical to SEQ ID NO: 17627
  chr10:80976754-80976785
  hypo

SEQ ID NO: 48882 - DNA, 33 bp, Homo sapiens; identical to SEQ ID NO: 17629
  chr10:81017843-81017876
  hypo

SEQ ID NO: 48883 - DNA, 31 bp, Homo sapiens; identical to SEQ ID NO: 17630
  chr10:81032442-81032473
  hypo

SEQ ID NO: 48884 - DNA, 31 bp, Homo sapiens; identical to SEQ ID NO: 17631
  chr10:81032681-81032712
  hypo

SEQ ID NO: 48885 - DNA, 31 bp, Homo sapiens; identical to SEQ ID NO: 17632
  chr10:81035987-81036018
  hypo

SEQ ID NO: 48886 - DNA, 91 bp, Homo sapiens; identical to SEQ ID NO: 17633
  chr10:81036050-81036141
  hypo

SEQ ID NO: 48887 - DNA, 31 bp, Homo sapiens; identical to SEQ ID NO: 17634
  chr10:81036183-81036214
  hypo

SEQ ID NO: 48888 - DNA, 51 bp, Homo sapiens; identical to SEQ ID NO: 17635
  chr10:81036656-81036707
  hypo

SEQ ID NO: 48889 - DNA, 38 bp, Homo sapiens; identical to SEQ ID NO: 17636
  chr10:81036796-81036834
  hypo

SEQ ID NO: 48890 - DNA, 54 bp, Homo sapiens; identical to SEQ ID NO: 17637
  chr10:81036968-81037022
  hypo

SEQ ID NO: 48891 - DNA, 31 bp, Homo sapiens; identical to SEQ ID NO: 17638
  chr10:81037059-81037090
  hypo

SEQ ID NO: 48892 - DNA, 48 bp, Homo sapiens; identical to SEQ ID NO: 17639
  chr10:81050746-81050794
  hypo

SEQ ID NO: 48893 - DNA, 31 bp, Homo sapiens; identical to SEQ ID NO: 17640
  chr10:81050808-81050839
  hypo

SEQ ID NO: 48894 - DNA, 31 bp, Homo sapiens; identical to SEQ ID NO: 17641
  chr10:81050845-81050876
  hypo

SEQ ID NO: 48895 - DNA, 51 bp, Homo sapiens; identical to SEQ ID NO: 17642
  chr10:81050879-81050930
  hypo

SEQ ID NO: 48896 - DNA, 31 bp, Homo sapiens; identical to SEQ ID NO: 17643
  chr10:81050951-81050982
  hypo

SEQ ID NO: 48897 - DNA, 31 bp, Homo sapiens; identical to SEQ ID NO: 17644
  chr10:81051006-81051037
  hypo

SEQ ID NO: 48898 - DNA, 31 bp, Homo sapiens; identical to SEQ ID NO: 17645
  chr10:81057999-81058030
  hypo

SEQ ID NO: 48899 - DNA, 31 bp, Homo sapiens; identical to SEQ ID NO: 17646
  chr10:81058036-81058067
  hypo

SEQ ID NO: 48900 - DNA, 31 bp, Homo sapiens; identical to SEQ ID NO: 17647
  chr10:81058070-81058101
  hypo

SEQ ID NO: 48901 - DNA, 50 bp, Homo sapiens; identical to SEQ ID NO: 17648
  chr10:81058105-81058155
  hypo

SEQ ID NO: 48902 - DNA, 31 bp, Homo sapiens; identical to SEQ ID NO: 17649
  chr10:81058156-81058187
  hypo

SEQ ID NO: 48903 - DNA, 31 bp, Homo sapiens; identical to SEQ ID NO: 17650
  chr10:81059002-81059033
  hypo

SEQ ID NO: 48904 - DNA, 31 bp, Homo sapiens; identical to SEQ ID NO: 17651
  chr10:81059049-81059080
  hypo

SEQ ID NO: 48905 - DNA, 112 bp, Homo sapiens; identical to SEQ ID NO: 17652
  chr10:81060508-81060620
  hypo

SEQ ID NO: 48906 - DNA, 31 bp, Homo sapiens; identical to SEQ ID NO: 17653
  chr10:81063476-81063507
  hypo

SEQ ID NO: 48907 - DNA, 111 bp, Homo sapiens; identical to SEQ ID NO: 17654
  chr10:81063750-81063861
  hypo

SEQ ID NO: 48908 - DNA, 84 bp, Homo sapiens; identical to SEQ ID NO: 17655
  chr10:81063868-81063952
  hypo

SEQ ID NO: 48909 - DNA, 31 bp, Homo sapiens; identical to SEQ ID NO: 17656
  chr10:81065767-81065798
  hypo

SEQ ID NO: 48910 - DNA, 31 bp, Homo sapiens; identical to SEQ ID NO: 17657
  chr10:81065806-81065837
  hypo

SEQ ID NO: 48911 - DNA, 134 bp, Homo sapiens; identical to SEQ ID NO: 17658
  chr10:81065843-81065977
  hypo

SEQ ID NO: 48912 - DNA, 97 bp, Homo sapiens; identical to SEQ ID NO: 17659
  chr10:81066002-81066099
  hypo

SEQ ID NO: 48913 - DNA, 31 bp, Homo sapiens; identical to SEQ ID NO: 17660
  chr10:81067466-81067497
  hypo

SEQ ID NO: 48914 - DNA, 43 bp, Homo sapiens; identical to SEQ ID NO: 17662
  chr10:81072191-81072234
  hypo

SEQ ID NO: 48915 - DNA, 31 bp, Homo sapiens; identical to SEQ ID NO: 17663
  chr10:81072581-81072612
  hypo

SEQ ID NO: 48916 - DNA, 35 bp, Homo sapiens; identical to SEQ ID NO: 17664
  chr10:81146093-81146128
  hypo

SEQ ID NO: 48917 - DNA, 35 bp, Homo sapiens; identical to SEQ ID NO: 17665
  chr10:81966478-81966513
  hypo

SEQ ID NO: 48918 - DNA, 30 bp, Homo sapiens; identical to SEQ ID NO: 17667
  chr10:82131762-82131792
  hypo

SEQ ID NO: 48919 - DNA, 53 bp, Homo sapiens; identical to SEQ ID NO: 4001
  chr10:82213690-82213743
  hypo

SEQ ID NO: 48920 - DNA, 31 bp, Homo sapiens; identical to SEQ ID NO: 17669
  chr10:82329515-82329546
  hypo

SEQ ID NO: 48921 - DNA, 31 bp, Homo sapiens; identical to SEQ ID NO: 17671
  chr10:86016119-86016150
  hypo

SEQ ID NO: 48922 - DNA, 43 bp, Homo sapiens; identical to SEQ ID NO: 4002
  chr10:86088146-86088189
  hypo

SEQ ID NO: 48923 - DNA, 31 bp, Homo sapiens; identical to SEQ ID NO: 17673
  chr10:87965963-87965994
  hypo

SEQ ID NO: 48924 - DNA, 31 bp, Homo sapiens; identical to SEQ ID NO: 17674
  chr10:87966015-87966046
  hypo

SEQ ID NO: 48925 - DNA, 56 bp, Homo sapiens; identical to SEQ ID NO: 17675
  chr10:87966085-87966141
  hypo

SEQ ID NO: 48926 - DNA, 31 bp, Homo sapiens; identical to SEQ ID NO: 17676
  chr10:88098234-88098265
  hypo

SEQ ID NO: 48927 - DNA, 31 bp, Homo sapiens; identical to SEQ ID NO: 17677
  chr10:88108300-88108331
  hypo

SEQ ID NO: 48928 - DNA, 2 bp, Homo sapiens
  chr10:88282806-88282808
  hypo
ct

SEQ ID NO: 48929 - DNA, 31 bp, Homo sapiens; identical to SEQ ID NO: 17680
  chr10:88422750-88422781
  hypo

SEQ ID NO: 48930 - DNA, 31 bp, Homo sapiens; identical to SEQ ID NO: 17681
  chr10:88422790-88422821
  hypo

SEQ ID NO: 48931 - DNA, 41 bp, Homo sapiens; identical to SEQ ID NO: 17682
  chr10:88422874-88422915
  hypo

SEQ ID NO: 48932 - DNA, 31 bp, Homo sapiens; identical to SEQ ID NO: 17683
  chr10:88441322-88441353
  hypo

SEQ ID NO: 48933 - DNA, 31 bp, Homo sapiens; identical to SEQ ID NO: 17684
  chr10:88441552-88441583
  hypo

SEQ ID NO: 48934 - DNA, 66 bp, Homo sapiens; identical to SEQ ID NO: 17685
  chr10:88441596-88441662
  hypo

SEQ ID NO: 48935 - DNA, 31 bp, Homo sapiens; identical to SEQ ID NO: 17686
  chr10:89420153-89420184
  hypo

SEQ ID NO: 48936 - DNA, 31 bp, Homo sapiens; identical to SEQ ID NO: 17688
  chr10:89762183-89762214
  hypo

SEQ ID NO: 48937 - DNA, 56 bp, Homo sapiens; identical to SEQ ID NO: 4006
  chr10:90750729-90750785
  hypo

SEQ ID NO: 48938 - DNA, 31 bp, Homo sapiens; identical to SEQ ID NO: 17694
  chr10:94819875-94819906
  hypo

SEQ ID NO: 48939 - DNA, 31 bp, Homo sapiens; identical to SEQ ID NO: 17696
  chr10:94973477-94973508
  hypo

SEQ ID NO: 48940 - DNA, 31 bp, Homo sapiens; identical to SEQ ID NO: 17697
  chr10:94981204-94981235
  hypo

SEQ ID NO: 48941 - DNA, 61 bp, Homo sapiens; identical to SEQ ID NO: 4020
  chr10:96122755-96122816
  hypo

SEQ ID NO: 48942 - DNA, 31 bp, Homo sapiens; identical to SEQ ID NO: 17699
  chr10:96154780-96154811
  hypo

SEQ ID NO: 48943 - DNA, 31 bp, Homo sapiens; identical to SEQ ID NO: 17700
  chr10:96154816-96154847
  hypo

SEQ ID NO: 48944 - DNA, 31 bp, Homo sapiens; identical to SEQ ID NO: 17701
  chr10:96154876-96154907
  hypo

SEQ ID NO: 48945 - DNA, 31 bp, Homo sapiens; identical to SEQ ID NO: 4022
  chr10:96162214-96162245
  hypo

SEQ ID NO: 48946 - DNA, 35 bp, Homo sapiens; identical to SEQ ID NO: 4023
  chr10:96162262-96162297
  hypo

SEQ ID NO: 48947 - DNA, 154 bp, Homo sapiens; identical to SEQ ID NO: 4024
  chr10:96162305-96162459
  hypo

SEQ ID NO: 48948 - DNA, 138 bp, Homo sapiens; identical to SEQ ID NO: 4025
  chr10:96162567-96162705
  hypo

SEQ ID NO: 48949 - DNA, 34 bp, Homo sapiens; identical to SEQ ID NO: 4026
  chr10:96162849-96162883
  hypo

SEQ ID NO: 48950 - DNA, 59 bp, Homo sapiens; identical to SEQ ID NO: 4027
  chr10:96162906-96162965
  hypo

SEQ ID NO: 48951 - DNA, 51 bp, Homo sapiens; identical to SEQ ID NO: 4028
  chr10:96162989-96163040
  hypo

SEQ ID NO: 48952 - DNA, 100 bp, Homo sapiens; identical to SEQ ID NO: 4029
  chr10:96163043-96163143
  hypo

SEQ ID NO: 48953 - DNA, 112 bp, Homo sapiens; identical to SEQ ID NO: 4030
  chr10:96163250-96163362
  hypo

SEQ ID NO: 48954 - DNA, 67 bp, Homo sapiens; identical to SEQ ID NO: 4031
  chr10:96163378-96163445
  hypo

SEQ ID NO: 48955 - DNA, 31 bp, Homo sapiens; identical to SEQ ID NO: 4032
  chr10:96163506-96163537
  hypo

SEQ ID NO: 48956 - DNA, 93 bp, Homo sapiens; identical to SEQ ID NO: 17714
  chr10:97096179-97096272
  hypo

SEQ ID NO: 48957 - DNA, 59 bp, Homo sapiens; identical to SEQ ID NO: 4033
  chr10:97321333-97321392
  hypo

SEQ ID NO: 48958 - DNA, 2 bp, Homo sapiens
  chr10:98292765-98292767
  hypo
ta

SEQ ID NO: 48959 - DNA, 31 bp, Homo sapiens; identical to SEQ ID NO: 17718
  chr10:98403875-98403906
  hypo

SEQ ID NO: 48960 - DNA, 38 bp, Homo sapiens; identical to SEQ ID NO: 17723
  chr10:99108578-99108616
  hypo

SEQ ID NO: 48961 - DNA, 31 bp, Homo sapiens; identical to SEQ ID NO: 17724
  chr10:99233071-99233102
  hypo

SEQ ID NO: 48962 - DNA, 31 bp, Homo sapiens; identical to SEQ ID NO: 17725
  chr10:99358762-99358793
  hypo

SEQ ID NO: 48963 - DNA, 108 bp, Homo sapiens; identical to SEQ ID NO: 17726
  chr10:99358854-99358962
  hypo

SEQ ID NO: 48964 - DNA, 47 bp, Homo sapiens; identical to SEQ ID NO: 17727
  chr10:99359044-99359091
  hypo

SEQ ID NO: 48965 - DNA, 31 bp, Homo sapiens; identical to SEQ ID NO: 17728
  chr10:99375942-99375973
  hypo

SEQ ID NO: 48966 - DNA, 97 bp, Homo sapiens; identical to SEQ ID NO: 4037
  chr10:99447291-99447388
  hypo

SEQ ID NO: 48967 - DNA, 31 bp, Homo sapiens; identical to SEQ ID NO: 17731
  chr10:99626198-99626229
  hypo

SEQ ID NO: 48968 - DNA, 87 bp, Homo sapiens; identical to SEQ ID NO: 17732
  chr10:99626303-99626390
  hypo

SEQ ID NO: 48969 - DNA, 31 bp, Homo sapiens; identical to SEQ ID NO: 17733
  chr10:99656697-99656728
  hypo

SEQ ID NO: 48970 - DNA, 31 bp, Homo sapiens; identical to SEQ ID NO: 17734
  chr10:100078103-100078134
  hypo

SEQ ID NO: 48971 - DNA, 31 bp, Homo sapiens; identical to SEQ ID NO: 17735
  chr10:101873876-101873907
  hypo

SEQ ID NO: 48972 - DNA, 31 bp, Homo sapiens; identical to SEQ ID NO: 17739
  chr10:102762723-102762754
  hypo

SEQ ID NO: 48973 - DNA, 70 bp, Homo sapiens; identical to SEQ ID NO: 17740
  chr10:102770158-102770228
  hypo

SEQ ID NO: 48974 - DNA, 31 bp, Homo sapiens; identical to SEQ ID NO: 17741
  chr10:102770232-102770263
  hypo

SEQ ID NO: 48975 - DNA, 43 bp, Homo sapiens; identical to SEQ ID NO: 4045
  chr10:102802795-102802838
  hypo

SEQ ID NO: 48976 - DNA, 31 bp, Homo sapiens; identical to SEQ ID NO: 4046
  chr10:102802860-102802891
  hypo

SEQ ID NO: 48977 - DNA, 62 bp, Homo sapiens; identical to SEQ ID NO: 17744
  chr10:102872321-102872383
  hypo

SEQ ID NO: 48978 - DNA, 58 bp, Homo sapiens; identical to SEQ ID NO: 4049
  chr10:102973586-102973644
  hypo

SEQ ID NO: 48979 - DNA, 31 bp, Homo sapiens; identical to SEQ ID NO: 17746
  chr10:103817632-103817663
  hypo

SEQ ID NO: 48980 - DNA, 43 bp, Homo sapiens; identical to SEQ ID NO: 17747
  chr10:104198521-104198564
  hypo

SEQ ID NO: 48981 - DNA, 35 bp, Homo sapiens; identical to SEQ ID NO: 17748
  chr10:104230569-104230604
  hypo

SEQ ID NO: 48982 - DNA, 41 bp, Homo sapiens; identical to SEQ ID NO: 17749
  chr10:104239033-104239074
  hypo

SEQ ID NO: 48983 - DNA, 55 bp, Homo sapiens; identical to SEQ ID NO: 17750
  chr10:104239088-104239143
  hypo

SEQ ID NO: 48984 - DNA, 34 bp, Homo sapiens; identical to SEQ ID NO: 17751
  chr10:104239174-104239208
  hypo

SEQ ID NO: 48985 - DNA, 31 bp, Homo sapiens; identical to SEQ ID NO: 17752
  chr10:104239242-104239273
  hypo

SEQ ID NO: 48986 - DNA, 42 bp, Homo sapiens; identical to SEQ ID NO: 17753
  chr10:104793214-104793256
  hypo

SEQ ID NO: 48987 - DNA, 31 bp, Homo sapiens; identical to SEQ ID NO: 17757
  chr10:105127130-105127161
  hypo

SEQ ID NO: 48988 - DNA, 2 bp, Homo sapiens
  chr10:105413584-105413586
  hypo
tc

SEQ ID NO: 48989 - DNA, 37 bp, Homo sapiens; identical to SEQ ID NO: 17762
  chr10:106199913-106199950
  hypo

SEQ ID NO: 48990 - DNA, 13 bp, Homo sapiens
  chr10:111674529-111674542
  hypo
ggtgaccaagggc

SEQ ID NO: 48991 - DNA, 33 bp, Homo sapiens; identical to SEQ ID NO: 17764
  chr10:111696449-111696482
  hypo

SEQ ID NO: 48992 - DNA, 145 bp, Homo sapiens; identical to SEQ ID NO: 4063
  chr10:111767171-111767316
  hypo

SEQ ID NO: 48993 - DNA, 40 bp, Homo sapiens; identical to SEQ ID NO: 4064
  chr10:111767322-111767362
  hypo

SEQ ID NO: 48994 - DNA, 31 bp, Homo sapiens; identical to SEQ ID NO: 4065
  chr10:111767389-111767420
  hypo

SEQ ID NO: 48995 - DNA, 2 bp, Homo sapiens
  chr10:111946089-111946091
  hypo
ga

SEQ ID NO: 48996 - DNA, 18 bp, Homo sapiens
  chr10:112030571-112030589
  hypo
ttgcggtggctcatgcct

SEQ ID NO: 48997 - DNA, 206 bp, Homo sapiens; identical to SEQ ID NO: 37904
  chr10:112432155-112432361
  hypo

SEQ ID NO: 48998 - DNA, 31 bp, Homo sapiens; identical to SEQ ID NO: 17772
  chr10:112459871-112459902
  hypo

SEQ ID NO: 48999 - DNA, 2 bp, Homo sapiens
  chr10:112553604-112553606
  hypo
aa

SEQ ID NO: 49000 - DNA, 47 bp, Homo sapiens; identical to SEQ ID NO: 17775
  chr10:114200390-114200437
  hypo

SEQ ID NO: 49001 - DNA, 31 bp, Homo sapiens; identical to SEQ ID NO: 17776
  chr10:114200459-114200490
  hypo

SEQ ID NO: 49002 - DNA, 78 bp, Homo sapiens; identical to SEQ ID NO: 17777
  chr10:114200506-114200584
  hypo

SEQ ID NO: 49003 - DNA, 2 bp, Homo sapiens
  chr10:114571158-114571160
  hypo
ta

SEQ ID NO: 49004 - DNA, 1 bp, Homo sapiens
  chr10:114571198-114571199
  hypo
a

SEQ ID NO: 49005 - DNA, 34 bp, Homo sapiens; identical to SEQ ID NO: 4072
  chr10:114709863-114709897
  hypo

SEQ ID NO: 49006 - DNA, 31 bp, Homo sapiens; identical to SEQ ID NO: 4073
  chr10:114710140-114710171
  hypo

SEQ ID NO: 49007 - DNA, 31 bp, Homo sapiens; identical to SEQ ID NO: 4075
  chr10:114710919-114710950
  hypo

SEQ ID NO: 49008 - DNA, 47 bp, Homo sapiens; identical to SEQ ID NO: 4076
  chr10:114711333-114711380
  hypo

SEQ ID NO: 49009 - DNA, 31 bp, Homo sapiens; identical to SEQ ID NO: 17785
  chr10:114817202-114817233
  hypo

SEQ ID NO: 49010 - DNA, 31 bp, Homo sapiens; identical to SEQ ID NO: 17786
  chr10:114878743-114878774
  hypo

SEQ ID NO: 49011 - DNA, 42 bp, Homo sapiens; identical to SEQ ID NO: 17787
  chr10:114913257-114913299
  hypo

SEQ ID NO: 49012 - DNA, 31 bp, Homo sapiens; identical to SEQ ID NO: 17789
  chr10:115201244-115201275
  hypo

SEQ ID NO: 49013 - DNA, 31 bp, Homo sapiens; identical to SEQ ID NO: 17790
  chr10:115201364-115201395
  hypo

SEQ ID NO: 49014 - DNA, 50 bp, Homo sapiens; identical to SEQ ID NO: 17791
  chr10:115201399-115201449
  hypo

SEQ ID NO: 49015 - DNA, 31 bp, Homo sapiens; identical to SEQ ID NO: 17792
  chr10:115350627-115350658
  hypo

SEQ ID NO: 49016 - DNA, 31 bp, Homo sapiens; identical to SEQ ID NO: 17796
  chr10:116011527-116011558
  hypo

SEQ ID NO: 49017 - DNA, 31 bp, Homo sapiens; identical to SEQ ID NO: 17798
  chr10:116028356-116028387
  hypo

SEQ ID NO: 49018 - DNA, 31 bp, Homo sapiens; identical to SEQ ID NO: 17799
  chr10:116028416-116028447
  hypo

SEQ ID NO: 49019 - DNA, 31 bp, Homo sapiens; identical to SEQ ID NO: 17801
  chr10:116105879-116105910
  hypo

SEQ ID NO: 49020 - DNA, 31 bp, Homo sapiens; identical to SEQ ID NO: 17802
  chr10:116123045-116123076
  hypo

SEQ ID NO: 49021 - DNA, 31 bp, Homo sapiens; identical to SEQ ID NO: 17803
  chr10:116203665-116203696
  hypo

SEQ ID NO: 49022 - DNA, 31 bp, Homo sapiens; identical to SEQ ID NO: 17804
  chr10:116203738-116203769
  hypo

SEQ ID NO: 49023 - DNA, 63 bp, Homo sapiens; identical to SEQ ID NO: 17805
  chr10:116203789-116203852
  hypo

SEQ ID NO: 49024 - DNA, 31 bp, Homo sapiens; identical to SEQ ID NO: 17806
  chr10:116228469-116228500
  hypo

SEQ ID NO: 49025 - DNA, 31 bp, Homo sapiens; identical to SEQ ID NO: 4080
  chr10:116527399-116527430
  hypo

SEQ ID NO: 49026 - DNA, 31 bp, Homo sapiens; identical to SEQ ID NO: 4081
  chr10:116527433-116527464
  hypo

SEQ ID NO: 49027 - DNA, 137 bp, Homo sapiens; identical to SEQ ID NO: 4082
  chr10:116527508-116527645
  hypo

SEQ ID NO: 49028 - DNA, 38 bp, Homo sapiens; identical to SEQ ID NO: 4083
  chr10:116527656-116527694
  hypo

SEQ ID NO: 49029 - DNA, 484 bp, Homo sapiens; identical to SEQ ID NO: 4084
  chr10:116527747-116528231
  hypo

SEQ ID NO: 49030 - DNA, 36 bp, Homo sapiens; identical to SEQ ID NO: 17814
  chr10:118740911-118740947
  hypo

SEQ ID NO: 49031 - DNA, 31 bp, Homo sapiens; identical to SEQ ID NO: 17815
  chr10:118741274-118741305
  hypo

SEQ ID NO: 49032 - DNA, 34 bp, Homo sapiens; identical to SEQ ID NO: 17816
  chr10:118742172-118742206
  hypo

SEQ ID NO: 49033 - DNA, 158 bp, Homo sapiens; identical to SEQ ID NO: 4085
  chr10:118764376-118764534
  hypo

SEQ ID NO: 49034 - DNA, 118 bp, Homo sapiens; identical to SEQ ID NO: 4087
  chr10:118764979-118765097
  hypo

SEQ ID NO: 49035 - DNA, 31 bp, Homo sapiens; identical to SEQ ID NO: 17819
  chr10:119180986-119181017
  hypo

SEQ ID NO: 49036 - DNA, 49 bp, Homo sapiens; identical to SEQ ID NO: 4089
  chr10:119256305-119256354
  hypo

SEQ ID NO: 49037 - DNA, 30 bp, Homo sapiens; identical to SEQ ID NO: 17821
  chr10:119374700-119374730
  hypo

SEQ ID NO: 49038 - DNA, 31 bp, Homo sapiens; identical to SEQ ID NO: 17822
  chr10:119374772-119374803
  hypo

SEQ ID NO: 49039 - DNA, 31 bp, Homo sapiens; identical to SEQ ID NO: 17825
  chr10:120518463-120518494
  hypo

SEQ ID NO: 49040 - DNA, 31 bp, Homo sapiens; identical to SEQ ID NO: 17826
  chr10:120526070-120526101
  hypo

SEQ ID NO: 49041 - DNA, 35 bp, Homo sapiens; identical to SEQ ID NO: 17827
  chr10:120584842-120584877
  hypo

SEQ ID NO: 49042 - DNA, 31 bp, Homo sapiens; identical to SEQ ID NO: 17828
  chr10:120601820-120601851
  hypo

SEQ ID NO: 49043 - DNA, 53 bp, Homo sapiens; identical to SEQ ID NO: 17829
  chr10:120601876-120601929
  hypo

SEQ ID NO: 49044 - DNA, 31 bp, Homo sapiens; identical to SEQ ID NO: 17830
  chr10:120840485-120840516
  hypo

SEQ ID NO: 49045 - DNA, 31 bp, Homo sapiens; identical to SEQ ID NO: 17831
  chr10:120840519-120840550
  hypo

SEQ ID NO: 49046 - DNA, 69 bp, Homo sapiens; identical to SEQ ID NO: 17833
  chr10:120926966-120927035
  hypo

SEQ ID NO: 49047 - DNA, 31 bp, Homo sapiens; identical to SEQ ID NO: 17834
  chr10:120927036-120927067
  hypo

SEQ ID NO: 49048 - DNA, 46 bp, Homo sapiens; identical to SEQ ID NO: 17835
  chr10:120927072-120927118
  hypo

SEQ ID NO: 49049 - DNA, 31 bp, Homo sapiens; identical to SEQ ID NO: 17836
  chr10:121088294-121088325
  hypo

SEQ ID NO: 49050 - DNA, 31 bp, Homo sapiens; identical to SEQ ID NO: 17837
  chr10:121128015-121128046
  hypo

SEQ ID NO: 49051 - DNA, 31 bp, Homo sapiens; identical to SEQ ID NO: 17838
  chr10:121265439-121265470
  hypo

SEQ ID NO: 49052 - DNA, 99 bp, Homo sapiens; identical to SEQ ID NO: 17839
  chr10:121265472-121265571
  hypo

SEQ ID NO: 49053 - DNA, 31 bp, Homo sapiens; identical to SEQ ID NO: 17840
  chr10:121265789-121265820
  hypo

SEQ ID NO: 49054 - DNA, 2 bp, Homo sapiens
  chr10:121301493-121301495
  hypo
gg

SEQ ID NO: 49055 - DNA, 44 bp, Homo sapiens; identical to SEQ ID NO: 4097
  chr10:121356078-121356122
  hypo

SEQ ID NO: 49056 - DNA, 31 bp, Homo sapiens; identical to SEQ ID NO: 17846
  chr10:121429663-121429694
  hypo

SEQ ID NO: 49057 - DNA, 48 bp, Homo sapiens; identical to SEQ ID NO: 17847
  chr10:121429714-121429762
  hypo

SEQ ID NO: 49058 - DNA, 31 bp, Homo sapiens; identical to SEQ ID NO: 17848
  chr10:121507663-121507694
  hypo

SEQ ID NO: 49059 - DNA, 31 bp, Homo sapiens; identical to SEQ ID NO: 17849
  chr10:121508292-121508323
  hypo

SEQ ID NO: 49060 - DNA, 74 bp, Homo sapiens; identical to SEQ ID NO: 17850
  chr10:121550360-121550434
  hypo

SEQ ID NO: 49061 - DNA, 31 bp, Homo sapiens; identical to SEQ ID NO: 17851
  chr10:121550456-121550487
  hypo

SEQ ID NO: 49062 - DNA, 31 bp, Homo sapiens; identical to SEQ ID NO: 17852
  chr10:121550504-121550535
  hypo

SEQ ID NO: 49063 - DNA, 31 bp, Homo sapiens; identical to SEQ ID NO: 17854
  chr10:123554225-123554256
  hypo

SEQ ID NO: 49064 - DNA, 31 bp, Homo sapiens; identical to SEQ ID NO: 17855
  chr10:123706878-123706909
  hypo

SEQ ID NO: 49065 - DNA, 31 bp, Homo sapiens; identical to SEQ ID NO: 17856
  chr10:123757356-123757387
  hypo

SEQ ID NO: 49066 - DNA, 31 bp, Homo sapiens; identical to SEQ ID NO: 17857
  chr10:123757451-123757482
  hypo

SEQ ID NO: 49067 - DNA, 31 bp, Homo sapiens; identical to SEQ ID NO: 17858
  chr10:123757495-123757526
  hypo

SEQ ID NO: 49068 - DNA, 31 bp, Homo sapiens; identical to SEQ ID NO: 17860
  chr10:123842297-123842328
  hypo

SEQ ID NO: 49069 - DNA, 31 bp, Homo sapiens; identical to SEQ ID NO: 17861
  chr10:123842505-123842536
  hypo

SEQ ID NO: 49070 - DNA, 31 bp, Homo sapiens; identical to SEQ ID NO: 17862
  chr10:123865057-123865088
  hypo

SEQ ID NO: 49071 - DNA, 31 bp, Homo sapiens; identical to SEQ ID NO: 17863
  chr10:123910180-123910211
  hypo

SEQ ID NO: 49072 - DNA, 31 bp, Homo sapiens; identical to SEQ ID NO: 17864
  chr10:123910387-123910418
  hypo

SEQ ID NO: 49073 - DNA, 62 bp, Homo sapiens; identical to SEQ ID NO: 17865
  chr10:123952374-123952436
  hypo

SEQ ID NO: 49074 - DNA, 77 bp, Homo sapiens; identical to SEQ ID NO: 17866
  chr10:123952474-123952551
  hypo

SEQ ID NO: 49075 - DNA, 31 bp, Homo sapiens; identical to SEQ ID NO: 17867
  chr10:123954597-123954628
  hypo

SEQ ID NO: 49076 - DNA, 31 bp, Homo sapiens; identical to SEQ ID NO: 17868
  chr10:123958278-123958309
  hypo

SEQ ID NO: 49077 - DNA, 31 bp, Homo sapiens; identical to SEQ ID NO: 17869
  chr10:123961235-123961266
  hypo

SEQ ID NO: 49078 - DNA, 43 bp, Homo sapiens; identical to SEQ ID NO: 17870
  chr10:123971194-123971237
  hypo

SEQ ID NO: 49079 - DNA, 40 bp, Homo sapiens; identical to SEQ ID NO: 17871
  chr10:123977731-123977771
  hypo

SEQ ID NO: 49080 - DNA, 89 bp, Homo sapiens; identical to SEQ ID NO: 17872
  chr10:123988939-123989028
  hypo

SEQ ID NO: 49081 - DNA, 31 bp, Homo sapiens; identical to SEQ ID NO: 17873
  chr10:123989046-123989077
  hypo

SEQ ID NO: 49082 - DNA, 31 bp, Homo sapiens; identical to SEQ ID NO: 17874
  chr10:123989088-123989119
  hypo

SEQ ID NO: 49083 - DNA, 31 bp, Homo sapiens; identical to SEQ ID NO: 17875
  chr10:124001600-124001631
  hypo

SEQ ID NO: 49084 - DNA, 31 bp, Homo sapiens; identical to SEQ ID NO: 17876
  chr10:124050740-124050771
  hypo

SEQ ID NO: 49085 - DNA, 148 bp, Homo sapiens; identical to SEQ ID NO: 4109
  chr10:124134524-124134672
  hypo

SEQ ID NO: 49086 - DNA, 88 bp, Homo sapiens; identical to SEQ ID NO: 4110
  chr10:124134743-124134831
  hypo

SEQ ID NO: 49087 - DNA, 37 bp, Homo sapiens; identical to SEQ ID NO: 4111
  chr10:124134847-124134884
  hypo

SEQ ID NO: 49088 - DNA, 31 bp, Homo sapiens; identical to SEQ ID NO: 17880
  chr10:124311934-124311965
  hypo

SEQ ID NO: 49089 - DNA, 31 bp, Homo sapiens; identical to SEQ ID NO: 17884
  chr10:126237288-126237319
  hypo

SEQ ID NO: 49090 - DNA, 35 bp, Homo sapiens; identical to SEQ ID NO: 17885
  chr10:126240417-126240452
  hypo

SEQ ID NO: 49091 - DNA, 56 bp, Homo sapiens; identical to SEQ ID NO: 17886
  chr10:126265355-126265411
  hypo

SEQ ID NO: 49092 - DNA, 31 bp, Homo sapiens; identical to SEQ ID NO: 17887
  chr10:126276742-126276773
  hypo

SEQ ID NO: 49093 - DNA, 49 bp, Homo sapiens; identical to SEQ ID NO: 17889
  chr10:126287254-126287303
  hypo

SEQ ID NO: 49094 - DNA, 31 bp, Homo sapiens; identical to SEQ ID NO: 17890
  chr10:126287859-126287890
  hypo

SEQ ID NO: 49095 - DNA, 31 bp, Homo sapiens; identical to SEQ ID NO: 17891
  chr10:126290723-126290754
  hypo

SEQ ID NO: 49096 - DNA, 31 bp, Homo sapiens; identical to SEQ ID NO: 17892
  chr10:126305775-126305806
  hypo

SEQ ID NO: 49097 - DNA, 31 bp, Homo sapiens; identical to SEQ ID NO: 17893
  chr10:126306137-126306168
  hypo

SEQ ID NO: 49098 - DNA, 31 bp, Homo sapiens; identical to SEQ ID NO: 17894
  chr10:126309855-126309886
  hypo

SEQ ID NO: 49099 - DNA, 46 bp, Homo sapiens; identical to SEQ ID NO: 17895
  chr10:126317367-126317413
  hypo

SEQ ID NO: 49100 - DNA, 31 bp, Homo sapiens; identical to SEQ ID NO: 17896
  chr10:126317482-126317513
  hypo

SEQ ID NO: 49101 - DNA, 53 bp, Homo sapiens; identical to SEQ ID NO: 17897
  chr10:126317532-126317585
  hypo

SEQ ID NO: 49102 - DNA, 31 bp, Homo sapiens; identical to SEQ ID NO: 17898
  chr10:126323262-126323293
  hypo

SEQ ID NO: 49103 - DNA, 31 bp, Homo sapiens; identical to SEQ ID NO: 17899
  chr10:126325796-126325827
  hypo

SEQ ID NO: 49104 - DNA, 84 bp, Homo sapiens; identical to SEQ ID NO: 17900
  chr10:126325835-126325919
  hypo

SEQ ID NO: 49105 - DNA, 31 bp, Homo sapiens; identical to SEQ ID NO: 17901
  chr10:126325956-126325987
  hypo

SEQ ID NO: 49106 - DNA, 31 bp, Homo sapiens; identical to SEQ ID NO: 17902
  chr10:126334816-126334847
  hypo

SEQ ID NO: 49107 - DNA, 31 bp, Homo sapiens; identical to SEQ ID NO: 17904
  chr10:126435115-126435146
  hypo

SEQ ID NO: 49108 - DNA, 31 bp, Homo sapiens; identical to SEQ ID NO: 17906
  chr10:126686478-126686509
  hypo

SEQ ID NO: 49109 - DNA, 31 bp, Homo sapiens; identical to SEQ ID NO: 17907
  chr10:126691067-126691098
  hypo

SEQ ID NO: 49110 - DNA, 79 bp, Homo sapiens; identical to SEQ ID NO: 17908
  chr10:126691114-126691193
  hypo

SEQ ID NO: 49111 - DNA, 31 bp, Homo sapiens; identical to SEQ ID NO: 17909
  chr10:126691201-126691232
  hypo

SEQ ID NO: 49112 - DNA, 50 bp, Homo sapiens; identical to SEQ ID NO: 17910
  chr10:126691354-126691404
  hypo

SEQ ID NO: 49113 - DNA, 31 bp, Homo sapiens; identical to SEQ ID NO: 17911
  chr10:126691408-126691439
  hypo

SEQ ID NO: 49114 - DNA, 31 bp, Homo sapiens; identical to SEQ ID NO: 17912
  chr10:126697016-126697047
  hypo

SEQ ID NO: 49115 - DNA, 37 bp, Homo sapiens; identical to SEQ ID NO: 17913
  chr10:126709395-126709432
  hypo

SEQ ID NO: 49116 - DNA, 31 bp, Homo sapiens; identical to SEQ ID NO: 17914
  chr10:126714617-126714648
  hypo

SEQ ID NO: 49117 - DNA, 31 bp, Homo sapiens; identical to SEQ ID NO: 17915
  chr10:126715000-126715031
  hypo

SEQ ID NO: 49118 - DNA, 114 bp, Homo sapiens; identical to SEQ ID NO: 17916
  chr10:126715036-126715150
  hypo

SEQ ID NO: 49119 - DNA, 31 bp, Homo sapiens; identical to SEQ ID NO: 17917
  chr10:126720966-126720997
  hypo

SEQ ID NO: 49120 - DNA, 41 bp, Homo sapiens; identical to SEQ ID NO: 17918
  chr10:126726952-126726993
  hypo

SEQ ID NO: 49121 - DNA, 31 bp, Homo sapiens; identical to SEQ ID NO: 17919
  chr10:126732715-126732746
  hypo

SEQ ID NO: 49122 - DNA, 31 bp, Homo sapiens; identical to SEQ ID NO: 17920
  chr10:126732748-126732779
  hypo

SEQ ID NO: 49123 - DNA, 31 bp, Homo sapiens; identical to SEQ ID NO: 17921
  chr10:126732991-126733022
  hypo

SEQ ID NO: 49124 - DNA, 31 bp, Homo sapiens; identical to SEQ ID NO: 17922
  chr10:126752457-126752488
  hypo

SEQ ID NO: 49125 - DNA, 31 bp, Homo sapiens; identical to SEQ ID NO: 17923
  chr10:126776897-126776928
  hypo

SEQ ID NO: 49126 - DNA, 31 bp, Homo sapiens; identical to SEQ ID NO: 17924
  chr10:126792359-126792390
  hypo

SEQ ID NO: 49127 - DNA, 31 bp, Homo sapiens; identical to SEQ ID NO: 17925
  chr10:126807512-126807543
  hypo

SEQ ID NO: 49128 - DNA, 31 bp, Homo sapiens; identical to SEQ ID NO: 17926
  chr10:126819308-126819339
  hypo

SEQ ID NO: 49129 - DNA, 31 bp, Homo sapiens; identical to SEQ ID NO: 17927
  chr10:126830137-126830168
  hypo

SEQ ID NO: 49130 - DNA, 31 bp, Homo sapiens; identical to SEQ ID NO: 17928
  chr10:126830197-126830228
  hypo

SEQ ID NO: 49131 - DNA, 31 bp, Homo sapiens; identical to SEQ ID NO: 4118
  chr10:126847583-126847614
  hypo

SEQ ID NO: 49132 - DNA, 53 bp, Homo sapiens; identical to SEQ ID NO: 4119
  chr10:126847634-126847687
  hypo

SEQ ID NO: 49133 - DNA, 126 bp, Homo sapiens; identical to SEQ ID NO: 4120
  chr10:126847692-126847818
  hypo

SEQ ID NO: 49134 - DNA, 38 bp, Homo sapiens; identical to SEQ ID NO: 4121
  chr10:126847830-126847868
  hypo

SEQ ID NO: 49135 - DNA, 123 bp, Homo sapiens; identical to SEQ ID NO: 4122
  chr10:126847900-126848023
  hypo

SEQ ID NO: 49136 - DNA, 161 bp, Homo sapiens; identical to SEQ ID NO: 4130
  chr10:126849984-126850145
  hypo

SEQ ID NO: 49137 - DNA, 38 bp, Homo sapiens; identical to SEQ ID NO: 17935
  chr10:127277449-127277487
  hypo

SEQ ID NO: 49138 - DNA, 52 bp, Homo sapiens
  chr10:127452067-127452119
  hypo
ctgtcagtgccttcaacacggagccggtttgttcattcggtgctttgtttca

SEQ ID NO: 49139 - DNA, 31 bp, Homo sapiens; identical to SEQ ID NO: 17938
  chr10:127616431-127616462
  hypo

SEQ ID NO: 49140 - DNA, 31 bp, Homo sapiens; identical to SEQ ID NO: 17939
  chr10:127616486-127616517
  hypo

SEQ ID NO: 49141 - DNA, 31 bp, Homo sapiens; identical to SEQ ID NO: 17940
  chr10:128595435-128595466
  hypo

SEQ ID NO: 49142 - DNA, 31 bp, Homo sapiens; identical to SEQ ID NO: 17941
  chr10:128600072-128600103
  hypo

SEQ ID NO: 49143 - DNA, 31 bp, Homo sapiens; identical to SEQ ID NO: 17942
  chr10:128602214-128602245
  hypo

SEQ ID NO: 49144 - DNA, 31 bp, Homo sapiens; identical to SEQ ID NO: 17943
  chr10:128767290-128767321
  hypo

SEQ ID NO: 49145 - DNA, 31 bp, Homo sapiens; identical to SEQ ID NO: 17944
  chr10:128767344-128767375
  hypo

SEQ ID NO: 49146 - DNA, 35 bp, Homo sapiens; identical to SEQ ID NO: 17945
  chr10:128767589-128767624
  hypo

SEQ ID NO: 49147 - DNA, 45 bp, Homo sapiens; identical to SEQ ID NO: 17946
  chr10:128779078-128779123
  hypo

SEQ ID NO: 49148 - DNA, 31 bp, Homo sapiens; identical to SEQ ID NO: 17947
  chr10:128783518-128783549
  hypo

SEQ ID NO: 49149 - DNA, 31 bp, Homo sapiens; identical to SEQ ID NO: 17948
  chr10:128804388-128804419
  hypo

SEQ ID NO: 49150 - DNA, 38 bp, Homo sapiens; identical to SEQ ID NO: 17949
  chr10:128804955-128804993
  hypo

SEQ ID NO: 49151 - DNA, 61 bp, Homo sapiens; identical to SEQ ID NO: 17950
  chr10:128816342-128816403
  hypo

SEQ ID NO: 49152 - DNA, 31 bp, Homo sapiens; identical to SEQ ID NO: 17951
  chr10:128816428-128816459
  hypo

SEQ ID NO: 49153 - DNA, 31 bp, Homo sapiens; identical to SEQ ID NO: 17952
  chr10:128818999-128819030
  hypo

SEQ ID NO: 49154 - DNA, 31 bp, Homo sapiens; identical to SEQ ID NO: 17955
  chr10:128851343-128851374
  hypo

SEQ ID NO: 49155 - DNA, 31 bp, Homo sapiens; identical to SEQ ID NO: 17956
  chr10:128862778-128862809
  hypo

SEQ ID NO: 49156 - DNA, 31 bp, Homo sapiens; identical to SEQ ID NO: 17957
  chr10:128867668-128867699
  hypo

SEQ ID NO: 49157 - DNA, 31 bp, Homo sapiens; identical to SEQ ID NO: 17958
  chr10:128891890-128891921
  hypo

SEQ ID NO: 49158 - DNA, 31 bp, Homo sapiens; identical to SEQ ID NO: 17959
  chr10:128898685-128898716
  hypo

SEQ ID NO: 49159 - DNA, 31 bp, Homo sapiens; identical to SEQ ID NO: 17960
  chr10:128899123-128899154
  hypo

SEQ ID NO: 49160 - DNA, 31 bp, Homo sapiens; identical to SEQ ID NO: 17961
  chr10:128899934-128899965
  hypo

SEQ ID NO: 49161 - DNA, 31 bp, Homo sapiens; identical to SEQ ID NO: 17962
  chr10:128899992-128900023
  hypo

SEQ ID NO: 49162 - DNA, 31 bp, Homo sapiens; identical to SEQ ID NO: 17963
  chr10:128900034-128900065
  hypo

SEQ ID NO: 49163 - DNA, 49 bp, Homo sapiens; identical to SEQ ID NO: 17964
  chr10:128900080-128900129
  hypo

SEQ ID NO: 49164 - DNA, 31 bp, Homo sapiens; identical to SEQ ID NO: 17965
  chr10:128904394-128904425
  hypo

SEQ ID NO: 49165 - DNA, 41 bp, Homo sapiens; identical to SEQ ID NO: 17966
  chr10:128904503-128904544
  hypo

SEQ ID NO: 49166 - DNA, 31 bp, Homo sapiens; identical to SEQ ID NO: 17967
  chr10:128904567-128904598
  hypo

SEQ ID NO: 49167 - DNA, 31 bp, Homo sapiens; identical to SEQ ID NO: 17968
  chr10:128905316-128905347
  hypo

SEQ ID NO: 49168 - DNA, 31 bp, Homo sapiens; identical to SEQ ID NO: 17969
  chr10:128905986-128906017
  hypo

SEQ ID NO: 49169 - DNA, 46 bp, Homo sapiens; identical to SEQ ID NO: 17970
  chr10:128936061-128936107
  hypo

SEQ ID NO: 49170 - DNA, 31 bp, Homo sapiens; identical to SEQ ID NO: 17971
  chr10:128936110-128936141
  hypo

SEQ ID NO: 49171 - DNA, 31 bp, Homo sapiens; identical to SEQ ID NO: 17972
  chr10:128936177-128936208
  hypo

SEQ ID NO: 49172 - DNA, 31 bp, Homo sapiens; identical to SEQ ID NO: 17973
  chr10:128936225-128936256
  hypo

SEQ ID NO: 49173 - DNA, 31 bp, Homo sapiens; identical to SEQ ID NO: 17975
  chr10:128999334-128999365
  hypo

SEQ ID NO: 49174 - DNA, 42 bp, Homo sapiens; identical to SEQ ID NO: 17976
  chr10:129057987-129058029
  hypo

SEQ ID NO: 49175 - DNA, 31 bp, Homo sapiens; identical to SEQ ID NO: 17977
  chr10:129059291-129059322
  hypo

SEQ ID NO: 49176 - DNA, 31 bp, Homo sapiens; identical to SEQ ID NO: 17978
  chr10:129145541-129145572
  hypo

SEQ ID NO: 49177 - DNA, 31 bp, Homo sapiens; identical to SEQ ID NO: 17979
  chr10:129145797-129145828
  hypo

SEQ ID NO: 49178 - DNA, 31 bp, Homo sapiens; identical to SEQ ID NO: 17980
  chr10:129159705-129159736
  hypo

SEQ ID NO: 49179 - DNA, 31 bp, Homo sapiens; identical to SEQ ID NO: 17981
  chr10:129165712-129165743
  hypo

SEQ ID NO: 49180 - DNA, 47 bp, Homo sapiens; identical to SEQ ID NO: 17982
  chr10:129165749-129165796
  hypo

SEQ ID NO: 49181 - DNA, 31 bp, Homo sapiens; identical to SEQ ID NO: 17983
  chr10:129165833-129165864
  hypo

SEQ ID NO: 49182 - DNA, 31 bp, Homo sapiens; identical to SEQ ID NO: 17984
  chr10:129165896-129165927
  hypo

SEQ ID NO: 49183 - DNA, 31 bp, Homo sapiens; identical to SEQ ID NO: 17985
  chr10:129176710-129176741
  hypo

SEQ ID NO: 49184 - DNA, 31 bp, Homo sapiens; identical to SEQ ID NO: 17986
  chr10:129186940-129186971
  hypo

SEQ ID NO: 49185 - DNA, 31 bp, Homo sapiens; identical to SEQ ID NO: 17987
  chr10:129187397-129187428
  hypo

SEQ ID NO: 49186 - DNA, 31 bp, Homo sapiens; identical to SEQ ID NO: 17988
  chr10:129189357-129189388
  hypo

SEQ ID NO: 49187 - DNA, 31 bp, Homo sapiens; identical to SEQ ID NO: 17989
  chr10:129195280-129195311
  hypo

SEQ ID NO: 49188 - DNA, 74 bp, Homo sapiens; identical to SEQ ID NO: 17990
  chr10:129195432-129195506
  hypo

SEQ ID NO: 49189 - DNA, 35 bp, Homo sapiens; identical to SEQ ID NO: 17991
  chr10:129195772-129195807
  hypo

SEQ ID NO: 49190 - DNA, 31 bp, Homo sapiens; identical to SEQ ID NO: 17992
  chr10:129236891-129236922
  hypo

SEQ ID NO: 49191 - DNA, 31 bp, Homo sapiens; identical to SEQ ID NO: 17993
  chr10:129236949-129236980
  hypo

SEQ ID NO: 49192 - DNA, 31 bp, Homo sapiens; identical to SEQ ID NO: 17994
  chr10:129236994-129237025
  hypo

SEQ ID NO: 49193 - DNA, 56 bp, Homo sapiens; identical to SEQ ID NO: 17995
  chr10:129237032-129237088
  hypo

SEQ ID NO: 49194 - DNA, 58 bp, Homo sapiens; identical to SEQ ID NO: 17996
  chr10:129237714-129237772
  hypo

SEQ ID NO: 49195 - DNA, 31 bp, Homo sapiens; identical to SEQ ID NO: 17997
  chr10:129237831-129237862
  hypo

SEQ ID NO: 49196 - DNA, 31 bp, Homo sapiens; identical to SEQ ID NO: 17998
  chr10:129237884-129237915
  hypo

SEQ ID NO: 49197 - DNA, 43 bp, Homo sapiens; identical to SEQ ID NO: 17999
  chr10:129241060-129241103
  hypo

SEQ ID NO: 49198 - DNA, 31 bp, Homo sapiens; identical to SEQ ID NO: 18000
  chr10:129241147-129241178
  hypo

SEQ ID NO: 49199 - DNA, 31 bp, Homo sapiens; identical to SEQ ID NO: 18001
  chr10:129241196-129241227
  hypo

SEQ ID NO: 49200 - DNA, 31 bp, Homo sapiens; identical to SEQ ID NO: 18002
  chr10:129241231-129241262
  hypo

SEQ ID NO: 49201 - DNA, 31 bp, Homo sapiens; identical to SEQ ID NO: 18003
  chr10:129245848-129245879
  hypo

SEQ ID NO: 49202 - DNA, 35 bp, Homo sapiens; identical to SEQ ID NO: 18004
  chr10:129249787-129249822
  hypo

SEQ ID NO: 49203 - DNA, 31 bp, Homo sapiens; identical to SEQ ID NO: 18005
  chr10:129249847-129249878
  hypo

SEQ ID NO: 49204 - DNA, 31 bp, Homo sapiens; identical to SEQ ID NO: 18007
  chr10:129833477-129833508
  hypo

SEQ ID NO: 49205 - DNA, 31 bp, Homo sapiens; identical to SEQ ID NO: 18009
  chr10:131577564-131577595
  hypo

SEQ ID NO: 49206 - DNA, 31 bp, Homo sapiens; identical to SEQ ID NO: 18010
  chr10:131718519-131718550
  hypo

SEQ ID NO: 49207 - DNA, 31 bp, Homo sapiens; identical to SEQ ID NO: 18011
  chr10:131821309-131821340
  hypo

SEQ ID NO: 49208 - DNA, 46 bp, Homo sapiens; identical to SEQ ID NO: 18014
  chr10:132237996-132238042
  hypo

SEQ ID NO: 49209 - DNA, 56 bp, Homo sapiens; identical to SEQ ID NO: 18015
  chr10:132238131-132238187
  hypo

SEQ ID NO: 49210 - DNA, 39 bp, Homo sapiens; identical to SEQ ID NO: 18016
  chr10:132251718-132251757
  hypo

SEQ ID NO: 49211 - DNA, 31 bp, Homo sapiens; identical to SEQ ID NO: 18017
  chr10:133004437-133004468
  hypo

SEQ ID NO: 49212 - DNA, 31 bp, Homo sapiens; identical to SEQ ID NO: 18018
  chr10:133441393-133441424
  hypo

SEQ ID NO: 49213 - DNA, 49 bp, Homo sapiens; identical to SEQ ID NO: 18020
  chr10:134002755-134002804
  hypo

SEQ ID NO: 49214 - DNA, 31 bp, Homo sapiens; identical to SEQ ID NO: 18021
  chr10:134019459-134019490
  hypo

SEQ ID NO: 49215 - DNA, 31 bp, Homo sapiens; identical to SEQ ID NO: 18022
  chr10:134024096-134024127
  hypo

SEQ ID NO: 49216 - DNA, 31 bp, Homo sapiens; identical to SEQ ID NO: 18023
  chr10:134038356-134038387
  hypo

SEQ ID NO: 49217 - DNA, 31 bp, Homo sapiens; identical to SEQ ID NO: 18024
  chr10:134043176-134043207
  hypo

SEQ ID NO: 49218 - DNA, 31 bp, Homo sapiens; identical to SEQ ID NO: 18025
  chr10:134044631-134044662
  hypo

SEQ ID NO: 49219 - DNA, 59 bp, Homo sapiens; identical to SEQ ID NO: 18026
  chr10:134044678-134044737
  hypo

SEQ ID NO: 49220 - DNA, 31 bp, Homo sapiens; identical to SEQ ID NO: 18027
  chr10:134049933-134049964
  hypo

SEQ ID NO: 49221 - DNA, 31 bp, Homo sapiens; identical to SEQ ID NO: 18028
  chr10:134057212-134057243
  hypo

SEQ ID NO: 49222 - DNA, 42 bp, Homo sapiens; identical to SEQ ID NO: 18029
  chr10:134164630-134164672
  hypo

SEQ ID NO: 49223 - DNA, 52 bp, Homo sapiens; identical to SEQ ID NO: 18030
  chr10:134164683-134164735
  hypo

SEQ ID NO: 49224 - DNA, 45 bp, Homo sapiens; identical to SEQ ID NO: 18031
  chr10:134171805-134171850
  hypo

SEQ ID NO: 49225 - DNA, 31 bp, Homo sapiens; identical to SEQ ID NO: 18032
  chr10:134176770-134176801
  hypo

SEQ ID NO: 49226 - DNA, 31 bp, Homo sapiens; identical to SEQ ID NO: 18033
  chr10:134198071-134198102
  hypo

SEQ ID NO: 49227 - DNA, 41 bp, Homo sapiens; identical to SEQ ID NO: 4138
  chr10:134210376-134210417
  hypo

SEQ ID NO: 49228 - DNA, 116 bp, Homo sapiens; identical to SEQ ID NO: 4139
  chr10:134210546-134210662
  hypo

SEQ ID NO: 49229 - DNA, 135 bp, Homo sapiens; identical to SEQ ID NO: 4140
  chr10:134210747-134210882
  hypo

SEQ ID NO: 49230 - DNA, 31 bp, Homo sapiens; identical to SEQ ID NO: 18037
  chr10:134242153-134242184
  hypo

SEQ ID NO: 49231 - DNA, 31 bp, Homo sapiens; identical to SEQ ID NO: 18038
  chr10:134252926-134252957
  hypo

SEQ ID NO: 49232 - DNA, 31 bp, Homo sapiens; identical to SEQ ID NO: 18039
  chr10:134253239-134253270
  hypo

SEQ ID NO: 49233 - DNA, 47 bp, Homo sapiens; identical to SEQ ID NO: 18040
  chr10:134269925-134269972
  hypo

SEQ ID NO: 49234 - DNA, 81 bp, Homo sapiens; identical to SEQ ID NO: 18041
  chr10:134269997-134270078
  hypo

SEQ ID NO: 49235 - DNA, 31 bp, Homo sapiens; identical to SEQ ID NO: 18042
  chr10:134270096-134270127
  hypo

SEQ ID NO: 49236 - DNA, 44 bp, Homo sapiens; identical to SEQ ID NO: 18043
  chr10:134276611-134276655
  hypo

SEQ ID NO: 49237 - DNA, 31 bp, Homo sapiens; identical to SEQ ID NO: 18044
  chr10:134279497-134279528
  hypo

SEQ ID NO: 49238 - DNA, 31 bp, Homo sapiens; identical to SEQ ID NO: 18045
  chr10:134279572-134279603
  hypo

SEQ ID NO: 49239 - DNA, 107 bp, Homo sapiens; identical to SEQ ID NO: 18046
  chr10:134280449-134280556
  hypo

SEQ ID NO: 49240 - DNA, 54 bp, Homo sapiens; identical to SEQ ID NO: 18047
  chr10:134302491-134302545
  hypo

SEQ ID NO: 49241 - DNA, 54 bp, Homo sapiens; identical to SEQ ID NO: 18048
  chr10:134304826-134304880
  hypo

SEQ ID NO: 49242 - DNA, 31 bp, Homo sapiens; identical to SEQ ID NO: 18049
  chr10:134304881-134304912
  hypo

SEQ ID NO: 49243 - DNA, 31 bp, Homo sapiens; identical to SEQ ID NO: 18050
  chr10:134344093-134344124
  hypo

SEQ ID NO: 49244 - DNA, 52 bp, Homo sapiens; identical to SEQ ID NO: 4145
  chr10:134351008-134351060
  hypo

SEQ ID NO: 49245 - DNA, 44 bp, Homo sapiens; identical to SEQ ID NO: 4146
  chr10:134351257-134351301
  hypo

SEQ ID NO: 49246 - DNA, 56 bp, Homo sapiens; identical to SEQ ID NO: 18053
  chr10:134427567-134427623
  hypo

SEQ ID NO: 49247 - DNA, 37 bp, Homo sapiens; identical to SEQ ID NO: 18054
  chr10:134457708-134457745
  hypo

SEQ ID NO: 49248 - DNA, 31 bp, Homo sapiens; identical to SEQ ID NO: 18055
  chr10:134459628-134459659
  hypo

SEQ ID NO: 49249 - DNA, 31 bp, Homo sapiens; identical to SEQ ID NO: 18056
  chr10:134466578-134466609
  hypo

SEQ ID NO: 49250 - DNA, 40 bp, Homo sapiens; identical to SEQ ID NO: 18057
  chr10:134467310-134467350
  hypo

SEQ ID NO: 49251 - DNA, 2 bp, Homo sapiens
  chr10:134481124-134481126
  hypo
at

SEQ ID NO: 49252 - DNA, 35 bp, Homo sapiens; identical to SEQ ID NO: 18059
  chr10:134503462-134503497
  hypo

SEQ ID NO: 49253 - DNA, 39 bp, Homo sapiens; identical to SEQ ID NO: 18060
  chr10:134503580-134503619
  hypo

SEQ ID NO: 49254 - DNA, 42 bp, Homo sapiens; identical to SEQ ID NO: 18061
  chr10:134503629-134503671
  hypo

SEQ ID NO: 49255 - DNA, 31 bp, Homo sapiens; identical to SEQ ID NO: 18062
  chr10:134504488-134504519
  hypo

SEQ ID NO: 49256 - DNA, 50 bp, Homo sapiens; identical to SEQ ID NO: 18063
  chr10:134540683-134540733
  hypo

SEQ ID NO: 49257 - DNA, 59 bp, Homo sapiens; identical to SEQ ID NO: 18065
  chr10:134575251-134575310
  hypo

SEQ ID NO: 49258 - DNA, 57 bp, Homo sapiens; identical to SEQ ID NO: 18066
  chr10:134583321-134583378
  hypo

SEQ ID NO: 49259 - DNA, 31 bp, Homo sapiens; identical to SEQ ID NO: 18067
  chr10:134583391-134583422
  hypo

SEQ ID NO: 49260 - DNA, 49 bp, Homo sapiens; identical to SEQ ID NO: 18068
  chr10:134588907-134588956
  hypo

SEQ ID NO: 49261 - DNA, 34 bp, Homo sapiens; identical to SEQ ID NO: 18069
  chr10:134590302-134590336
  hypo

SEQ ID NO: 49262 - DNA, 31 bp, Homo sapiens; identical to SEQ ID NO: 18070
  chr10:134663731-134663762
  hypo

SEQ ID NO: 49263 - DNA, 2 bp, Homo sapiens
  chr10:134671587-134671589
  hypo
ct

SEQ ID NO: 49264 - DNA, 31 bp, Homo sapiens; identical to SEQ ID NO: 18073
  chr10:134722344-134722375
  hypo

SEQ ID NO: 49265 - DNA, 179 bp, Homo sapiens; identical to SEQ ID NO: 18074
  chr10:134724607-134724786
  hypo

SEQ ID NO: 49266 - DNA, 31 bp, Homo sapiens; identical to SEQ ID NO: 18075
  chr10:134817361-134817392
  hypo

SEQ ID NO: 49267 - DNA, 2 bp, Homo sapiens
  chr10:134941646-134941648
  hypo
ta

SEQ ID NO: 49268 - DNA, 19 bp, Homo sapiens
  chr10:134942434-134942453
  hypo
aggccgcgcagggccacgc

SEQ ID NO: 49269 - DNA, 31 bp, Homo sapiens; identical to SEQ ID NO: 18090
  chr10:135075452-135075483
  hypo

SEQ ID NO: 49270 - DNA, 31 bp, Homo sapiens; identical to SEQ ID NO: 18091
  chr10:135106411-135106442
  hypo

SEQ ID NO: 49271 - DNA, 2 bp, Homo sapiens
  chr10:135124037-135124039
  hypo
gg

SEQ ID NO: 49272 - DNA, 31 bp, Homo sapiens; identical to SEQ ID NO: 18094
  chr10:135180194-135180225
  hypo

SEQ ID NO: 49273 - DNA, 31 bp, Homo sapiens; identical to SEQ ID NO: 18095
  chr10:135198047-135198078
  hypo

SEQ ID NO: 49274 - DNA, 31 bp, Homo sapiens; identical to SEQ ID NO: 18096
  chr10:135204298-135204329
  hypo

SEQ ID NO: 49275 - DNA, 2 bp, Homo sapiens
  chr11:327112-327114
  hypo
ct

SEQ ID NO: 49276 - DNA, 54 bp, Homo sapiens; identical to SEQ ID NO: 18099
  chr11:372117-372171
  hypo

SEQ ID NO: 49277 - DNA, 37 bp, Homo sapiens; identical to SEQ ID NO: 18100
  chr11:381323-381360
  hypo

SEQ ID NO: 49278 - DNA, 31 bp, Homo sapiens; identical to SEQ ID NO: 18101
  chr11:393253-393284
  hypo

SEQ ID NO: 49279 - DNA, 31 bp, Homo sapiens; identical to SEQ ID NO: 18102
  chr11:394126-394157
  hypo

SEQ ID NO: 49280 - DNA, 53 bp, Homo sapiens; identical to SEQ ID NO: 18104
  chr11:405078-405131
  hypo

SEQ ID NO: 49281 - DNA, 66 bp, Homo sapiens; identical to SEQ ID NO: 4159
  chr11:417263-417329
  hypo

SEQ ID NO: 49282 - DNA, 116 bp, Homo sapiens; identical to SEQ ID NO: 4160
  chr11:417386-417502
  hypo

SEQ ID NO: 49283 - DNA, 55 bp, Homo sapiens; identical to SEQ ID NO: 18107
  chr11:419275-419330
  hypo

SEQ ID NO: 49284 - DNA, 31 bp, Homo sapiens; identical to SEQ ID NO: 18108
  chr11:419356-419387
  hypo

SEQ ID NO: 49285 - DNA, 31 bp, Homo sapiens; identical to SEQ ID NO: 18109
  chr11:419398-419429
  hypo

SEQ ID NO: 49286 - DNA, 31 bp, Homo sapiens; identical to SEQ ID NO: 18112
  chr11:438116-438147
  hypo

SEQ ID NO: 49287 - DNA, 31 bp, Homo sapiens; identical to SEQ ID NO: 18113
  chr11:438179-438210
  hypo

SEQ ID NO: 49288 - DNA, 31 bp, Homo sapiens; identical to SEQ ID NO: 18114
  chr11:438220-438251
  hypo

SEQ ID NO: 49289 - DNA, 31 bp, Homo sapiens; identical to SEQ ID NO: 4161
  chr11:450246-450277
  hypo

SEQ ID NO: 49290 - DNA, 31 bp, Homo sapiens; identical to SEQ ID NO: 18116
  chr11:455952-455983
  hypo

SEQ ID NO: 49291 - DNA, 43 bp, Homo sapiens; identical to SEQ ID NO: 18117
  chr11:475000-475043
  hypo

SEQ ID NO: 49292 - DNA, 50 bp, Homo sapiens; identical to SEQ ID NO: 18118
  chr11:476444-476494
  hypo

SEQ ID NO: 49293 - DNA, 42 bp, Homo sapiens; identical to SEQ ID NO: 37986
  chr11:485972-486014
  hypo

SEQ ID NO: 49294 - DNA, 29 bp, Homo sapiens
  chr11:486095-486124
  hypo
ctggtgccctggtgcgtgtgtgctgtgag

SEQ ID NO: 49295 - DNA, 31 bp, Homo sapiens; identical to SEQ ID NO: 18121
  chr11:486143-486174
  hypo

SEQ ID NO: 49296 - DNA, 42 bp, Homo sapiens; identical to SEQ ID NO: 18122
  chr11:489181-489223
  hypo

SEQ ID NO: 49297 - DNA, 37 bp, Homo sapiens; identical to SEQ ID NO: 18123
  chr11:528727-528764
  hypo

SEQ ID NO: 49298 - DNA, 37 bp, Homo sapiens; identical to SEQ ID NO: 18124
  chr11:534209-534246
  hypo

SEQ ID NO: 49299 - DNA, 37 bp, Homo sapiens; identical to SEQ ID NO: 18125
  chr11:539724-539761
  hypo

SEQ ID NO: 49300 - DNA, 31 bp, Homo sapiens; identical to SEQ ID NO: 18126
  chr11:562193-562224
  hypo

SEQ ID NO: 49301 - DNA, 2 bp, Homo sapiens
  chr11:562245-562247
  hypo
ga

SEQ ID NO: 49302 - DNA, 31 bp, Homo sapiens; identical to SEQ ID NO: 18134
  chr11:562889-562920
  hypo

SEQ ID NO: 49303 - DNA, 31 bp, Homo sapiens; identical to SEQ ID NO: 4164
  chr11:568368-568399
  hypo

SEQ ID NO: 49304 - DNA, 199 bp, Homo sapiens; identical to SEQ ID NO: 4167
  chr11:575603-575802
  hypo

SEQ ID NO: 49305 - DNA, 61 bp, Homo sapiens; identical to SEQ ID NO: 18137
  chr11:609530-609591
  hypo

SEQ ID NO: 49306 - DNA, 36 bp, Homo sapiens; identical to SEQ ID NO: 4170
  chr11:706175-706211
  hypo

SEQ ID NO: 49307 - DNA, 31 bp, Homo sapiens; identical to SEQ ID NO: 4171
  chr11:706385-706416
  hypo

SEQ ID NO: 49308 - DNA, 31 bp, Homo sapiens; identical to SEQ ID NO: 18141
  chr11:724960-724991
  hypo

SEQ ID NO: 49309 - DNA, 149 bp, Homo sapiens; identical to SEQ ID NO: 18142
  chr11:733217-733366
  hypo

SEQ ID NO: 49310 - DNA, 49 bp, Homo sapiens; identical to SEQ ID NO: 18143
  chr11:733367-733416
  hypo

SEQ ID NO: 49311 - DNA, 17 bp, Homo sapiens
  chr11:763286-763303
  hypo
cgccctcacctgtcccc

SEQ ID NO: 49312 - DNA, 31 bp, Homo sapiens; identical to SEQ ID NO: 18150
  chr11:826058-826089
  hypo

SEQ ID NO: 49313 - DNA, 35 bp, Homo sapiens; identical to SEQ ID NO: 4172
  chr11:832780-832815
  hypo

SEQ ID NO: 49314 - DNA, 31 bp, Homo sapiens; identical to SEQ ID NO: 18152
  chr11:850358-850389
  hypo

SEQ ID NO: 49315 - DNA, 44 bp, Homo sapiens; identical to SEQ ID NO: 18156
  chr11:858810-858854
  hypo

SEQ ID NO: 49316 - DNA, 62 bp, Homo sapiens
  chr11:859386-859448
  hypo
ggctcacatgcaccccggctcacacgcaccccctctcacacgcaccccggctcacacgcacc

SEQ ID NO: 49317 - DNA, 31 bp, Homo sapiens; identical to SEQ ID NO: 18159
  chr11:859627-859658
  hypo

SEQ ID NO: 49318 - DNA, 34 bp, Homo sapiens; identical to SEQ ID NO: 18162
  chr11:907517-907551
  hypo

SEQ ID NO: 49319 - DNA, 31 bp, Homo sapiens; identical to SEQ ID NO: 18165
  chr11:991641-991672
  hypo

SEQ ID NO: 49320 - DNA, 42 bp, Homo sapiens; identical to SEQ ID NO: 18166
  chr11:991962-992004
  hypo

SEQ ID NO: 49321 - DNA, 31 bp, Homo sapiens; identical to SEQ ID NO: 18167
  chr11:998036-998067
  hypo

SEQ ID NO: 49322 - DNA, 34 bp, Homo sapiens; identical to SEQ ID NO: 18168
  chr11:998092-998126
  hypo

SEQ ID NO: 49323 - DNA, 62 bp, Homo sapiens; identical to SEQ ID NO: 18169
  chr11:998238-998300
  hypo

SEQ ID NO: 49324 - DNA, 31 bp, Homo sapiens; identical to SEQ ID NO: 18170
  chr11:1025409-1025440
  hypo

SEQ ID NO: 49325 - DNA, 31 bp, Homo sapiens; identical to SEQ ID NO: 18171
  chr11:1043835-1043866
  hypo

SEQ ID NO: 49326 - DNA, 31 bp, Homo sapiens; identical to SEQ ID NO: 18172
  chr11:1055802-1055833
  hypo

SEQ ID NO: 49327 - DNA, 39 bp, Homo sapiens; identical to SEQ ID NO: 18173
  chr11:1056098-1056137
  hypo

SEQ ID NO: 49328 - DNA, 51 bp, Homo sapiens; identical to SEQ ID NO: 18174
  chr11:1082739-1082790
  hypo

SEQ ID NO: 49329 - DNA, 31 bp, Homo sapiens; identical to SEQ ID NO: 4173
  chr11:1139541-1139572
  hypo

SEQ ID NO: 49330 - DNA, 31 bp, Homo sapiens; identical to SEQ ID NO: 18176
  chr11:1158948-1158979
  hypo

SEQ ID NO: 49331 - DNA, 2 bp, Homo sapiens
  chr11:1221702-1221704
  hypo
gt

SEQ ID NO: 49332 - DNA, 59 bp, Homo sapiens; identical to SEQ ID NO: 18183
  chr11:1390810-1390869
  hypo

SEQ ID NO: 49333 - DNA, 88 bp, Homo sapiens; identical to SEQ ID NO: 18184
  chr11:1433175-1433263
  hypo

SEQ ID NO: 49334 - DNA, 30 bp, Homo sapiens
  chr11:1433636-1433666
  hypo
ctgagctgcgctgccccgtcctgcggtggg

SEQ ID NO: 49335 - DNA, 31 bp, Homo sapiens; identical to SEQ ID NO: 18193
  chr11:1477649-1477680
  hypo

SEQ ID NO: 49336 - DNA, 14 bp, Homo sapiens
  chr11:1482006-1482020
  hypo
gccgcccgccctgc

SEQ ID NO: 49337 - DNA, 31 bp, Homo sapiens; identical to SEQ ID NO: 18196
  chr11:1494353-1494384
  hypo

SEQ ID NO: 49338 - DNA, 31 bp, Homo sapiens; identical to SEQ ID NO: 18197
  chr11:1494484-1494515
  hypo

SEQ ID NO: 49339 - DNA, 128 bp, Homo sapiens; identical to SEQ ID NO: 18198
  chr11:1497230-1497358
  hypo

SEQ ID NO: 49340 - DNA, 31 bp, Homo sapiens; identical to SEQ ID NO: 18199
  chr11:1497381-1497412
  hypo

SEQ ID NO: 49341 - DNA, 31 bp, Homo sapiens; identical to SEQ ID NO: 18200
  chr11:1497429-1497460
  hypo

SEQ ID NO: 49342 - DNA, 37 bp, Homo sapiens; identical to SEQ ID NO: 18201
  chr11:1521375-1521412
  hypo

SEQ ID NO: 49343 - DNA, 31 bp, Homo sapiens; identical to SEQ ID NO: 18202
  chr11:1579098-1579129
  hypo

SEQ ID NO: 49344 - DNA, 40 bp, Homo sapiens; identical to SEQ ID NO: 18203
  chr11:1584968-1585008
  hypo

SEQ ID NO: 49345 - DNA, 39 bp, Homo sapiens; identical to SEQ ID NO: 18204
  chr11:1586816-1586855
  hypo

SEQ ID NO: 49346 - DNA, 62 bp, Homo sapiens; identical to SEQ ID NO: 4177
  chr11:1592746-1592808
  hypo

SEQ ID NO: 49347 - DNA, 82 bp, Homo sapiens; identical to SEQ ID NO: 4178
  chr11:1592947-1593029
  hypo

SEQ ID NO: 49348 - DNA, 31 bp, Homo sapiens; identical to SEQ ID NO: 4179
  chr11:1593214-1593245
  hypo

SEQ ID NO: 49349 - DNA, 118 bp, Homo sapiens; identical to SEQ ID NO: 4180
  chr11:1594038-1594156
  hypo

SEQ ID NO: 49350 - DNA, 31 bp, Homo sapiens; identical to SEQ ID NO: 18209
  chr11:1634888-1634919
  hypo

SEQ ID NO: 49351 - DNA, 31 bp, Homo sapiens; identical to SEQ ID NO: 18210
  chr11:1787100-1787131
  hypo

SEQ ID NO: 49352 - DNA, 31 bp, Homo sapiens; identical to SEQ ID NO: 18211
  chr11:1826978-1827009
  hypo

SEQ ID NO: 49353 - DNA, 31 bp, Homo sapiens; identical to SEQ ID NO: 18212
  chr11:1919471-1919502
  hypo

SEQ ID NO: 49354 - DNA, 51 bp, Homo sapiens; identical to SEQ ID NO: 18213
  chr11:1980679-1980730
  hypo

SEQ ID NO: 49355 - DNA, 31 bp, Homo sapiens; identical to SEQ ID NO: 18214
  chr11:1987802-1987833
  hypo

SEQ ID NO: 49356 - DNA, 31 bp, Homo sapiens; identical to SEQ ID NO: 18215
  chr11:2026840-2026871
  hypo

SEQ ID NO: 49357 - DNA, 55 bp, Homo sapiens; identical to SEQ ID NO: 18216
  chr11:2051190-2051245
  hypo

SEQ ID NO: 49358 - DNA, 35 bp, Homo sapiens; identical to SEQ ID NO: 18217
  chr11:2051347-2051382
  hypo

SEQ ID NO: 49359 - DNA, 31 bp, Homo sapiens; identical to SEQ ID NO: 18218
  chr11:2219692-2219723
  hypo

SEQ ID NO: 49360 - DNA, 42 bp, Homo sapiens; identical to SEQ ID NO: 18219
  chr11:2221374-2221416
  hypo

SEQ ID NO: 49361 - DNA, 31 bp, Homo sapiens; identical to SEQ ID NO: 18220
  chr11:2237235-2237266
  hypo

SEQ ID NO: 49362 - DNA, 37 bp, Homo sapiens; identical to SEQ ID NO: 18221
  chr11:2237643-2237680
  hypo

SEQ ID NO: 49363 - DNA, 31 bp, Homo sapiens; identical to SEQ ID NO: 18222
  chr11:2257967-2257998
  hypo

SEQ ID NO: 49364 - DNA, 47 bp, Homo sapiens; identical to SEQ ID NO: 18223
  chr11:2269905-2269952
  hypo

SEQ ID NO: 49365 - DNA, 2 bp, Homo sapiens
  chr11:2278321-2278323
  hypo
ca

SEQ ID NO: 49366 - DNA, 80 bp, Homo sapiens; identical to SEQ ID NO: 18227
  chr11:2294684-2294764
  hypo

SEQ ID NO: 49367 - DNA, 55 bp, Homo sapiens; identical to SEQ ID NO: 18228
  chr11:2328965-2329020
  hypo

SEQ ID NO: 49368 - DNA, 31 bp, Homo sapiens; identical to SEQ ID NO: 18229
  chr11:2329024-2329055
  hypo

SEQ ID NO: 49369 - DNA, 31 bp, Homo sapiens; identical to SEQ ID NO: 18231
  chr11:2413089-2413120
  hypo

SEQ ID NO: 49370 - DNA, 31 bp, Homo sapiens; identical to SEQ ID NO: 18232
  chr11:2413142-2413173
  hypo

SEQ ID NO: 49371 - DNA, 34 bp, Homo sapiens; identical to SEQ ID NO: 18233
  chr11:2413398-2413432
  hypo

SEQ ID NO: 49372 - DNA, 31 bp, Homo sapiens; identical to SEQ ID NO: 18234
  chr11:2441828-2441859
  hypo

SEQ ID NO: 49373 - DNA, 59 bp, Homo sapiens; identical to SEQ ID NO: 18235
  chr11:2560750-2560809
  hypo

SEQ ID NO: 49374 - DNA, 39 bp, Homo sapiens; identical to SEQ ID NO: 18236
  chr11:2562213-2562252
  hypo

SEQ ID NO: 49375 - DNA, 42 bp, Homo sapiens; identical to SEQ ID NO: 18237
  chr11:2579780-2579822
  hypo

SEQ ID NO: 49376 - DNA, 44 bp, Homo sapiens; identical to SEQ ID NO: 18238
  chr11:2581753-2581797
  hypo

SEQ ID NO: 49377 - DNA, 31 bp, Homo sapiens; identical to SEQ ID NO: 18239
  chr11:2594925-2594956
  hypo

SEQ ID NO: 49378 - DNA, 31 bp, Homo sapiens; identical to SEQ ID NO: 18240
  chr11:2595669-2595700
  hypo

SEQ ID NO: 49379 - DNA, 61 bp, Homo sapiens; identical to SEQ ID NO: 18241
  chr11:2596283-2596344
  hypo

SEQ ID NO: 49380 - DNA, 31 bp, Homo sapiens; identical to SEQ ID NO: 18242
  chr11:2597547-2597578
  hypo

SEQ ID NO: 49381 - DNA, 67 bp, Homo sapiens; identical to SEQ ID NO: 18243
  chr11:2610096-2610163
  hypo

SEQ ID NO: 49382 - DNA, 31 bp, Homo sapiens; identical to SEQ ID NO: 18245
  chr11:2832257-2832288
  hypo

SEQ ID NO: 49383 - DNA, 31 bp, Homo sapiens; identical to SEQ ID NO: 18246
  chr11:2842364-2842395
  hypo

SEQ ID NO: 49384 - DNA, 31 bp, Homo sapiens; identical to SEQ ID NO: 18247
  chr11:2874226-2874257
  hypo

SEQ ID NO: 49385 - DNA, 31 bp, Homo sapiens; identical to SEQ ID NO: 18248
  chr11:2896187-2896218
  hypo

SEQ ID NO: 49386 - DNA, 35 bp, Homo sapiens; identical to SEQ ID NO: 38009
  chr11:2906271-2906306
  hypo

SEQ ID NO: 49387 - DNA, 35 bp, Homo sapiens; identical to SEQ ID NO: 4189
  chr11:2906692-2906727
  hypo

SEQ ID NO: 49388 - DNA, 81 bp, Homo sapiens; identical to SEQ ID NO: 38011
  chr11:2906971-2907052
  hypo

SEQ ID NO: 49389 - DNA, 31 bp, Homo sapiens; identical to SEQ ID NO: 18252
  chr11:2910402-2910433
  hypo

SEQ ID NO: 49390 - DNA, 42 bp, Homo sapiens; identical to SEQ ID NO: 18253
  chr11:2910463-2910505
  hypo

SEQ ID NO: 49391 - DNA, 31 bp, Homo sapiens; identical to SEQ ID NO: 18254
  chr11:2934241-2934272
  hypo

SEQ ID NO: 49392 - DNA, 31 bp, Homo sapiens; identical to SEQ ID NO: 18255
  chr11:2938037-2938068
  hypo

SEQ ID NO: 49393 - DNA, 74 bp, Homo sapiens; identical to SEQ ID NO: 18256
  chr11:2939100-2939174
  hypo

SEQ ID NO: 49394 - DNA, 105 bp, Homo sapiens; identical to SEQ ID NO: 18257
  chr11:2939193-2939298
  hypo

SEQ ID NO: 49395 - DNA, 31 bp, Homo sapiens; identical to SEQ ID NO: 18258
  chr11:2942533-2942564
  hypo

SEQ ID NO: 49396 - DNA, 45 bp, Homo sapiens; identical to SEQ ID NO: 18259
  chr11:2942679-2942724
  hypo

SEQ ID NO: 49397 - DNA, 101 bp, Homo sapiens; identical to SEQ ID NO: 18260
  chr11:2942737-2942838
  hypo

SEQ ID NO: 49398 - DNA, 53 bp, Homo sapiens; identical to SEQ ID NO: 18261
  chr11:3060354-3060407
  hypo

SEQ ID NO: 49399 - DNA, 2 bp, Homo sapiens
  chr11:3102364-3102366
  hypo
aa

SEQ ID NO: 49400 - DNA, 54 bp, Homo sapiens; identical to SEQ ID NO: 18264
  chr11:3109134-3109188
  hypo

SEQ ID NO: 49401 - DNA, 31 bp, Homo sapiens; identical to SEQ ID NO: 18265
  chr11:3111263-3111294
  hypo

SEQ ID NO: 49402 - DNA, 31 bp, Homo sapiens; identical to SEQ ID NO: 18266
  chr11:3111798-3111829
  hypo

SEQ ID NO: 49403 - DNA, 31 bp, Homo sapiens; identical to SEQ ID NO: 18267
  chr11:3127013-3127044
  hypo

SEQ ID NO: 49404 - DNA, 98 bp, Homo sapiens; identical to SEQ ID NO: 4195
  chr11:3186352-3186450
  hypo

SEQ ID NO: 49405 - DNA, 47 bp, Homo sapiens; identical to SEQ ID NO: 18269
  chr11:3212406-3212453
  hypo

SEQ ID NO: 49406 - DNA, 31 bp, Homo sapiens; identical to SEQ ID NO: 18270
  chr11:3219913-3219944
  hypo

SEQ ID NO: 49407 - DNA, 35 bp, Homo sapiens; identical to SEQ ID NO: 18271
  chr11:3247716-3247751
  hypo

SEQ ID NO: 49408 - DNA, 243 bp, Homo sapiens; identical to SEQ ID NO: 4197
  chr11:3444552-3444795
  hypo

SEQ ID NO: 49409 - DNA, 31 bp, Homo sapiens; identical to SEQ ID NO: 18273
  chr11:3511140-3511171
  hypo

SEQ ID NO: 49410 - DNA, 31 bp, Homo sapiens; identical to SEQ ID NO: 18275
  chr11:3658467-3658498
  hypo

SEQ ID NO: 49411 - DNA, 31 bp, Homo sapiens; identical to SEQ ID NO: 18276
  chr11:3661448-3661479
  hypo

SEQ ID NO: 49412 - DNA, 35 bp, Homo sapiens; identical to SEQ ID NO: 18280
  chr11:6432991-6433026
  hypo

SEQ ID NO: 49413 - DNA, 31 bp, Homo sapiens; identical to SEQ ID NO: 4203
  chr11:6502786-6502817
  hypo

SEQ ID NO: 49414 - DNA, 31 bp, Homo sapiens; identical to SEQ ID NO: 18284
  chr11:6730929-6730960
  hypo

SEQ ID NO: 49415 - DNA, 31 bp, Homo sapiens; identical to SEQ ID NO: 18285
  chr11:6730988-6731019
  hypo

SEQ ID NO: 49416 - DNA, 31 bp, Homo sapiens; identical to SEQ ID NO: 4204
  chr11:7534832-7534863
  hypo

SEQ ID NO: 49417 - DNA, 31 bp, Homo sapiens; identical to SEQ ID NO: 18287
  chr11:7619001-7619032
  hypo

SEQ ID NO: 49418 - DNA, 31 bp, Homo sapiens; identical to SEQ ID NO: 18288
  chr11:8255581-8255612
  hypo

SEQ ID NO: 49419 - DNA, 31 bp, Homo sapiens; identical to SEQ ID NO: 18289
  chr11:8269569-8269600
  hypo

SEQ ID NO: 49420 - DNA, 31 bp, Homo sapiens; identical to SEQ ID NO: 18290
  chr11:8269642-8269673
  hypo

SEQ ID NO: 49421 - DNA, 54 bp, Homo sapiens; identical to SEQ ID NO: 18291
  chr11:8269718-8269772
  hypo

SEQ ID NO: 49422 - DNA, 31 bp, Homo sapiens; identical to SEQ ID NO: 18295
  chr11:8724437-8724468
  hypo

SEQ ID NO: 49423 - DNA, 31 bp, Homo sapiens; identical to SEQ ID NO: 18296
  chr11:8725355-8725386
  hypo

SEQ ID NO: 49424 - DNA, 31 bp, Homo sapiens; identical to SEQ ID NO: 18297
  chr11:8725390-8725421
  hypo

SEQ ID NO: 49425 - DNA, 31 bp, Homo sapiens; identical to SEQ ID NO: 18298
  chr11:8725426-8725457
  hypo

SEQ ID NO: 49426 - DNA, 31 bp, Homo sapiens; identical to SEQ ID NO: 18299
  chr11:8725494-8725525
  hypo

SEQ ID NO: 49427 - DNA, 32 bp, Homo sapiens; identical to SEQ ID NO: 18300
  chr11:8735204-8735236
  hypo

SEQ ID NO: 49428 - DNA, 42 bp, Homo sapiens; identical to SEQ ID NO: 18301
  chr11:8751525-8751567
  hypo

SEQ ID NO: 49429 - DNA, 62 bp, Homo sapiens; identical to SEQ ID NO: 18302
  chr11:8752346-8752408
  hypo

SEQ ID NO: 49430 - DNA, 31 bp, Homo sapiens; identical to SEQ ID NO: 18303
  chr11:8752682-8752713
  hypo

SEQ ID NO: 49431 - DNA, 31 bp, Homo sapiens; identical to SEQ ID NO: 18304
  chr11:8756389-8756420
  hypo

SEQ ID NO: 49432 - DNA, 62 bp, Homo sapiens; identical to SEQ ID NO: 18305
  chr11:8759789-8759851
  hypo

SEQ ID NO: 49433 - DNA, 90 bp, Homo sapiens; identical to SEQ ID NO: 18306
  chr11:8759879-8759969
  hypo

SEQ ID NO: 49434 - DNA, 36 bp, Homo sapiens; identical to SEQ ID NO: 18307
  chr11:8791119-8791155
  hypo

SEQ ID NO: 49435 - DNA, 31 bp, Homo sapiens; identical to SEQ ID NO: 18309
  chr11:8959627-8959658
  hypo

SEQ ID NO: 49436 - DNA, 31 bp, Homo sapiens; identical to SEQ ID NO: 18311
  chr11:9049167-9049198
  hypo

SEQ ID NO: 49437 - DNA, 50 bp, Homo sapiens; identical to SEQ ID NO: 18312
  chr11:9074511-9074561
  hypo

SEQ ID NO: 49438 - DNA, 31 bp, Homo sapiens; identical to SEQ ID NO: 18313
  chr11:9074608-9074639
  hypo

SEQ ID NO: 49439 - DNA, 31 bp, Homo sapiens; identical to SEQ ID NO: 18314
  chr11:9074671-9074702
  hypo

SEQ ID NO: 49440 - DNA, 2 bp, Homo sapiens
  chr11:9405391-9405393
  hypo
tt

SEQ ID NO: 49441 - DNA, 37 bp, Homo sapiens; identical to SEQ ID NO: 18321
  chr11:9418900-9418937
  hypo

SEQ ID NO: 49442 - DNA, 31 bp, Homo sapiens; identical to SEQ ID NO: 18322
  chr11:9422436-9422467
  hypo

SEQ ID NO: 49443 - DNA, 35 bp, Homo sapiens; identical to SEQ ID NO: 18323
  chr11:9540961-9540996
  hypo

SEQ ID NO: 49444 - DNA, 31 bp, Homo sapiens; identical to SEQ ID NO: 18324
  chr11:9548318-9548349
  hypo

SEQ ID NO: 49445 - DNA, 31 bp, Homo sapiens; identical to SEQ ID NO: 18326
  chr11:9554706-9554737
  hypo

SEQ ID NO: 49446 - DNA, 31 bp, Homo sapiens; identical to SEQ ID NO: 18327
  chr11:9554964-9554995
  hypo

SEQ ID NO: 49447 - DNA, 31 bp, Homo sapiens; identical to SEQ ID NO: 4210
  chr11:9596557-9596588
  hypo

SEQ ID NO: 49448 - DNA, 88 bp, Homo sapiens; identical to SEQ ID NO: 4211
  chr11:9596679-9596767
  hypo

SEQ ID NO: 49449 - DNA, 31 bp, Homo sapiens; identical to SEQ ID NO: 18330
  chr11:9629900-9629931
  hypo

SEQ ID NO: 49450 - DNA, 74 bp, Homo sapiens; identical to SEQ ID NO: 4212
  chr11:9685558-9685632
  hypo

SEQ ID NO: 49451 - DNA, 101 bp, Homo sapiens; identical to SEQ ID NO: 4213
  chr11:9685634-9685735
  hypo

SEQ ID NO: 49452 - DNA, 61 bp, Homo sapiens; identical to SEQ ID NO: 4214
  chr11:9685751-9685812
  hypo

SEQ ID NO: 49453 - DNA, 146 bp, Homo sapiens; identical to SEQ ID NO: 4215
  chr11:9685848-9685994
  hypo

SEQ ID NO: 49454 - DNA, 44 bp, Homo sapiens; identical to SEQ ID NO: 4216
  chr11:9685997-9686041
  hypo

SEQ ID NO: 49455 - DNA, 36 bp, Homo sapiens; identical to SEQ ID NO: 18337
  chr11:9771062-9771098
  hypo

SEQ ID NO: 49456 - DNA, 31 bp, Homo sapiens; identical to SEQ ID NO: 18339
  chr11:10712068-10712099
  hypo

SEQ ID NO: 49457 - DNA, 31 bp, Homo sapiens; identical to SEQ ID NO: 18340
  chr11:10712134-10712165
  hypo

SEQ ID NO: 49458 - DNA, 62 bp, Homo sapiens; identical to SEQ ID NO: 18341
  chr11:10712200-10712262
  hypo

SEQ ID NO: 49459 - DNA, 31 bp, Homo sapiens; identical to SEQ ID NO: 18343
  chr11:11398889-11398920
  hypo

SEQ ID NO: 49460 - DNA, 51 bp, Homo sapiens; identical to SEQ ID NO: 18344
  chr11:11534253-11534304
  hypo

SEQ ID NO: 49461 - DNA, 60 bp, Homo sapiens; identical to SEQ ID NO: 18345
  chr11:11534352-11534412
  hypo

SEQ ID NO: 49462 - DNA, 31 bp, Homo sapiens; identical to SEQ ID NO: 18346
  chr11:11534429-11534460
  hypo

SEQ ID NO: 49463 - DNA, 31 bp, Homo sapiens; identical to SEQ ID NO: 18347
  chr11:11601779-11601810
  hypo

SEQ ID NO: 49464 - DNA, 31 bp, Homo sapiens; identical to SEQ ID NO: 18348
  chr11:11601815-11601846
  hypo

SEQ ID NO: 49465 - DNA, 31 bp, Homo sapiens; identical to SEQ ID NO: 18349
  chr11:11601854-11601885
  hypo

SEQ ID NO: 49466 - DNA, 31 bp, Homo sapiens; identical to SEQ ID NO: 18350
  chr11:11601910-11601941
  hypo

SEQ ID NO: 49467 - DNA, 31 bp, Homo sapiens; identical to SEQ ID NO: 18351
  chr11:11601956-11601987
  hypo

SEQ ID NO: 49468 - DNA, 31 bp, Homo sapiens; identical to SEQ ID NO: 18352
  chr11:11614845-11614876
  hypo

SEQ ID NO: 49469 - DNA, 31 bp, Homo sapiens; identical to SEQ ID NO: 18353
  chr11:11990980-11991011
  hypo

SEQ ID NO: 49470 - DNA, 31 bp, Homo sapiens; identical to SEQ ID NO: 18354
  chr11:12073850-12073881
  hypo

SEQ ID NO: 49471 - DNA, 43 bp, Homo sapiens; identical to SEQ ID NO: 18355
  chr11:12073904-12073947
  hypo

SEQ ID NO: 49472 - DNA, 49 bp, Homo sapiens; identical to SEQ ID NO: 18356
  chr11:12073970-12074019
  hypo

SEQ ID NO: 49473 - DNA, 31 bp, Homo sapiens; identical to SEQ ID NO: 18357
  chr11:12083039-12083070
  hypo

SEQ ID NO: 49474 - DNA, 31 bp, Homo sapiens; identical to SEQ ID NO: 18358
  chr11:12091296-12091327
  hypo

SEQ ID NO: 49475 - DNA, 31 bp, Homo sapiens; identical to SEQ ID NO: 18359
  chr11:12106315-12106346
  hypo

SEQ ID NO: 49476 - DNA, 35 bp, Homo sapiens; identical to SEQ ID NO: 18360
  chr11:12115884-12115919
  hypo

SEQ ID NO: 49477 - DNA, 32 bp, Homo sapiens; identical to SEQ ID NO: 38035
  chr11:12132212-12132244
  hypo

SEQ ID NO: 49478 - DNA, 34 bp, Homo sapiens; identical to SEQ ID NO: 4222
  chr11:12132269-12132303
  hypo

SEQ ID NO: 49479 - DNA, 31 bp, Homo sapiens; identical to SEQ ID NO: 18364
  chr11:12145917-12145948
  hypo

SEQ ID NO: 49480 - DNA, 74 bp, Homo sapiens; identical to SEQ ID NO: 18365
  chr11:12209617-12209691
  hypo

SEQ ID NO: 49481 - DNA, 52 bp, Homo sapiens; identical to SEQ ID NO: 18366
  chr11:12209729-12209781
  hypo

SEQ ID NO: 49482 - DNA, 31 bp, Homo sapiens; identical to SEQ ID NO: 18367
  chr11:12209862-12209893
  hypo

SEQ ID NO: 49483 - DNA, 31 bp, Homo sapiens; identical to SEQ ID NO: 18368
  chr11:12209928-12209959
  hypo

SEQ ID NO: 49484 - DNA, 64 bp, Homo sapiens; identical to SEQ ID NO: 18369
  chr11:12209981-12210045
  hypo

SEQ ID NO: 49485 - DNA, 42 bp, Homo sapiens; identical to SEQ ID NO: 18370
  chr11:12214007-12214049
  hypo

SEQ ID NO: 49486 - DNA, 31 bp, Homo sapiens; identical to SEQ ID NO: 18371
  chr11:12225813-12225844
  hypo

SEQ ID NO: 49487 - DNA, 31 bp, Homo sapiens; identical to SEQ ID NO: 18372
  chr11:12230961-12230992
  hypo

SEQ ID NO: 49488 - DNA, 31 bp, Homo sapiens; identical to SEQ ID NO: 18373
  chr11:12238924-12238955
  hypo

SEQ ID NO: 49489 - DNA, 37 bp, Homo sapiens; identical to SEQ ID NO: 18374
  chr11:12240001-12240038
  hypo

SEQ ID NO: 49490 - DNA, 62 bp, Homo sapiens; identical to SEQ ID NO: 18375
  chr11:12240126-12240188
  hypo

SEQ ID NO: 49491 - DNA, 31 bp, Homo sapiens; identical to SEQ ID NO: 18376
  chr11:12240258-12240289
  hypo

SEQ ID NO: 49492 - DNA, 31 bp, Homo sapiens; identical to SEQ ID NO: 18377
  chr11:12247646-12247677
  hypo

SEQ ID NO: 49493 - DNA, 78 bp, Homo sapiens; identical to SEQ ID NO: 18378
  chr11:12247749-12247827
  hypo

SEQ ID NO: 49494 - DNA, 61 bp, Homo sapiens; identical to SEQ ID NO: 18379
  chr11:12247866-12247927
  hypo

SEQ ID NO: 49495 - DNA, 31 bp, Homo sapiens; identical to SEQ ID NO: 18380
  chr11:12248537-12248568
  hypo

SEQ ID NO: 49496 - DNA, 55 bp, Homo sapiens; identical to SEQ ID NO: 18381
  chr11:12253011-12253066
  hypo

SEQ ID NO: 49497 - DNA, 31 bp, Homo sapiens; identical to SEQ ID NO: 18382
  chr11:12253366-12253397
  hypo

SEQ ID NO: 49498 - DNA, 31 bp, Homo sapiens; identical to SEQ ID NO: 18383
  chr11:12260725-12260756
  hypo

SEQ ID NO: 49499 - DNA, 59 bp, Homo sapiens; identical to SEQ ID NO: 18384
  chr11:12260785-12260844
  hypo

SEQ ID NO: 49500 - DNA, 31 bp, Homo sapiens; identical to SEQ ID NO: 18385
  chr11:12276799-12276830
  hypo

SEQ ID NO: 49501 - DNA, 31 bp, Homo sapiens; identical to SEQ ID NO: 18386
  chr11:12276906-12276937
  hypo

SEQ ID NO: 49502 - DNA, 31 bp, Homo sapiens; identical to SEQ ID NO: 18387
  chr11:12276965-12276996
  hypo

SEQ ID NO: 49503 - DNA, 31 bp, Homo sapiens; identical to SEQ ID NO: 18388
  chr11:12277013-12277044
  hypo

SEQ ID NO: 49504 - DNA, 31 bp, Homo sapiens; identical to SEQ ID NO: 18389
  chr11:12277049-12277080
  hypo

SEQ ID NO: 49505 - DNA, 31 bp, Homo sapiens; identical to SEQ ID NO: 18390
  chr11:12278212-12278243
  hypo

SEQ ID NO: 49506 - DNA, 31 bp, Homo sapiens; identical to SEQ ID NO: 18391
  chr11:12278271-12278302
  hypo

SEQ ID NO: 49507 - DNA, 50 bp, Homo sapiens; identical to SEQ ID NO: 18392
  chr11:12278305-12278355
  hypo

SEQ ID NO: 49508 - DNA, 41 bp, Homo sapiens; identical to SEQ ID NO: 18393
  chr11:12278389-12278430
  hypo

SEQ ID NO: 49509 - DNA, 57 bp, Homo sapiens; identical to SEQ ID NO: 18394
  chr11:12278468-12278525
  hypo

SEQ ID NO: 49510 - DNA, 31 bp, Homo sapiens; identical to SEQ ID NO: 18395
  chr11:12278563-12278594
  hypo

SEQ ID NO: 49511 - DNA, 31 bp, Homo sapiens; identical to SEQ ID NO: 18396
  chr11:12279380-12279411
  hypo

SEQ ID NO: 49512 - DNA, 38 bp, Homo sapiens; identical to SEQ ID NO: 18397
  chr11:12279416-12279454
  hypo

SEQ ID NO: 49513 - DNA, 31 bp, Homo sapiens; identical to SEQ ID NO: 18398
  chr11:12279479-12279510
  hypo

SEQ ID NO: 49514 - DNA, 31 bp, Homo sapiens; identical to SEQ ID NO: 18399
  chr11:12279520-12279551
  hypo

SEQ ID NO: 49515 - DNA, 31 bp, Homo sapiens; identical to SEQ ID NO: 18400
  chr11:12281235-12281266
  hypo

SEQ ID NO: 49516 - DNA, 31 bp, Homo sapiens; identical to SEQ ID NO: 18401
  chr11:12283738-12283769
  hypo

SEQ ID NO: 49517 - DNA, 31 bp, Homo sapiens; identical to SEQ ID NO: 18402
  chr11:12283995-12284026
  hypo

SEQ ID NO: 49518 - DNA, 54 bp, Homo sapiens; identical to SEQ ID NO: 18403
  chr11:12284117-12284171
  hypo

SEQ ID NO: 49519 - DNA, 31 bp, Homo sapiens; identical to SEQ ID NO: 18404
  chr11:12294621-12294652
  hypo

SEQ ID NO: 49520 - DNA, 39 bp, Homo sapiens; identical to SEQ ID NO: 18405
  chr11:12298407-12298446
  hypo

SEQ ID NO: 49521 - DNA, 66 bp, Homo sapiens; identical to SEQ ID NO: 18406
  chr11:12298544-12298610
  hypo

SEQ ID NO: 49522 - DNA, 31 bp, Homo sapiens; identical to SEQ ID NO: 18407
  chr11:12298706-12298737
  hypo

SEQ ID NO: 49523 - DNA, 31 bp, Homo sapiens; identical to SEQ ID NO: 18408
  chr11:12298739-12298770
  hypo

SEQ ID NO: 49524 - DNA, 31 bp, Homo sapiens; identical to SEQ ID NO: 18409
  chr11:12315586-12315617
  hypo

SEQ ID NO: 49525 - DNA, 49 bp, Homo sapiens; identical to SEQ ID NO: 18410
  chr11:12315625-12315674
  hypo

SEQ ID NO: 49526 - DNA, 56 bp, Homo sapiens; identical to SEQ ID NO: 18411
  chr11:12315722-12315778
  hypo

SEQ ID NO: 49527 - DNA, 31 bp, Homo sapiens; identical to SEQ ID NO: 18412
  chr11:12366726-12366757
  hypo

SEQ ID NO: 49528 - DNA, 34 bp, Homo sapiens; identical to SEQ ID NO: 18414
  chr11:12554119-12554153
  hypo

SEQ ID NO: 49529 - DNA, 31 bp, Homo sapiens; identical to SEQ ID NO: 18423
  chr11:12769912-12769943
  hypo

SEQ ID NO: 49530 - DNA, 31 bp, Homo sapiens; identical to SEQ ID NO: 18424
  chr11:12794317-12794348
  hypo

SEQ ID NO: 49531 - DNA, 31 bp, Homo sapiens; identical to SEQ ID NO: 18425
  chr11:12838688-12838719
  hypo

SEQ ID NO: 49532 - DNA, 34 bp, Homo sapiens; identical to SEQ ID NO: 18426
  chr11:12841277-12841311
  hypo

SEQ ID NO: 49533 - DNA, 31 bp, Homo sapiens; identical to SEQ ID NO: 18427
  chr11:12944976-12945007
  hypo

SEQ ID NO: 49534 - DNA, 31 bp, Homo sapiens; identical to SEQ ID NO: 18428
  chr11:12945011-12945042
  hypo

SEQ ID NO: 49535 - DNA, 57 bp, Homo sapiens; identical to SEQ ID NO: 18429
  chr11:12945049-12945106
  hypo

SEQ ID NO: 49536 - DNA, 31 bp, Homo sapiens; identical to SEQ ID NO: 18430
  chr11:13114152-13114183
  hypo

SEQ ID NO: 49537 - DNA, 71 bp, Homo sapiens; identical to SEQ ID NO: 18432
  chr11:13185769-13185840
  hypo

SEQ ID NO: 49538 - DNA, 61 bp, Homo sapiens; identical to SEQ ID NO: 4232
  chr11:13298715-13298776
  hypo

SEQ ID NO: 49539 - DNA, 31 bp, Homo sapiens; identical to SEQ ID NO: 4233
  chr11:13298792-13298823
  hypo

SEQ ID NO: 49540 - DNA, 31 bp, Homo sapiens; identical to SEQ ID NO: 18435
  chr11:14520357-14520388
  hypo

SEQ ID NO: 49541 - DNA, 33 bp, Homo sapiens
  chr11:14520418-14520451
  hypo
tctgaatccattggcacgttaattaacgtgtag

SEQ ID NO: 49542 - DNA, 31 bp, Homo sapiens; identical to SEQ ID NO: 4236
  chr11:15671896-15671927
  hypo

SEQ ID NO: 49543 - DNA, 31 bp, Homo sapiens; identical to SEQ ID NO: 18438
  chr11:15921681-15921712
  hypo

SEQ ID NO: 49544 - DNA, 31 bp, Homo sapiens; identical to SEQ ID NO: 18439
  chr11:16050845-16050876
  hypo

SEQ ID NO: 49545 - DNA, 31 bp, Homo sapiens; identical to SEQ ID NO: 18440
  chr11:16828576-16828607
  hypo

SEQ ID NO: 49546 - DNA, 31 bp, Homo sapiens; identical to SEQ ID NO: 18441
  chr11:16877365-16877396
  hypo

SEQ ID NO: 49547 - DNA, 31 bp, Homo sapiens; identical to SEQ ID NO: 4239
  chr11:17035598-17035629
  hypo

SEQ ID NO: 49548 - DNA, 83 bp, Homo sapiens; identical to SEQ ID NO: 4240
  chr11:17035645-17035728
  hypo

SEQ ID NO: 49549 - DNA, 35 bp, Homo sapiens; identical to SEQ ID NO: 4241
  chr11:17035837-17035872
  hypo

SEQ ID NO: 49550 - DNA, 105 bp, Homo sapiens; identical to SEQ ID NO: 4242
  chr11:17035880-17035985
  hypo

SEQ ID NO: 49551 - DNA, 88 bp, Homo sapiens; identical to SEQ ID NO: 4244
  chr11:17036267-17036355
  hypo

SEQ ID NO: 49552 - DNA, 25 bp, Homo sapiens
  chr11:17037344-17037369
  hypo
tgtgcaacagcgagactcagtctaa

SEQ ID NO: 49553 - DNA, 46 bp, Homo sapiens; identical to SEQ ID NO: 18449
  chr11:17100560-17100606
  hypo

SEQ ID NO: 49554 - DNA, 31 bp, Homo sapiens; identical to SEQ ID NO: 18450
  chr11:17285257-17285288
  hypo

SEQ ID NO: 49555 - DNA, 31 bp, Homo sapiens; identical to SEQ ID NO: 4245
  chr11:17498406-17498437
  hypo

SEQ ID NO: 49556 - DNA, 39 bp, Homo sapiens; identical to SEQ ID NO: 4246
  chr11:18610705-18610744
  hypo

SEQ ID NO: 49557 - DNA, 31 bp, Homo sapiens; identical to SEQ ID NO: 4247
  chr11:18720185-18720216
  hypo

SEQ ID NO: 49558 - DNA, 31 bp, Homo sapiens; identical to SEQ ID NO: 18454
  chr11:19247081-19247112
  hypo

SEQ ID NO: 49559 - DNA, 37 bp, Homo sapiens
  chr11:31533857-31533894
  hypo
cattttactactgccaccgtgacgtcattgtaatttt

SEQ ID NO: 49560 - DNA, 114 bp, Homo sapiens; identical to SEQ ID NO: 18458
  chr11:32851223-32851337
  hypo

SEQ ID NO: 49561 - DNA, 94 bp, Homo sapiens; identical to SEQ ID NO: 4257
  chr11:32851552-32851646
  hypo

SEQ ID NO: 49562 - DNA, 55 bp, Homo sapiens; identical to SEQ ID NO: 18460
  chr11:32912158-32912213
  hypo

SEQ ID NO: 49563 - DNA, 31 bp, Homo sapiens; identical to SEQ ID NO: 18463
  chr11:33277373-33277404
  hypo

SEQ ID NO: 49564 - DNA, 31 bp, Homo sapiens; identical to SEQ ID NO: 18464
  chr11:34133735-34133766
  hypo

SEQ ID NO: 49565 - DNA, 31 bp, Homo sapiens; identical to SEQ ID NO: 18465
  chr11:34184136-34184167
  hypo

SEQ ID NO: 49566 - DNA, 31 bp, Homo sapiens; identical to SEQ ID NO: 18466
  chr11:34186712-34186743
  hypo

SEQ ID NO: 49567 - DNA, 39 bp, Homo sapiens; identical to SEQ ID NO: 18467
  chr11:34192313-34192352
  hypo

SEQ ID NO: 49568 - DNA, 31 bp, Homo sapiens; identical to SEQ ID NO: 18468
  chr11:34206116-34206147
  hypo

SEQ ID NO: 49569 - DNA, 31 bp, Homo sapiens; identical to SEQ ID NO: 18469
  chr11:34219692-34219723
  hypo

SEQ ID NO: 49570 - DNA, 30 bp, Homo sapiens; identical to SEQ ID NO: 18472
  chr11:34270688-34270718
  hypo

SEQ ID NO: 49571 - DNA, 39 bp, Homo sapiens; identical to SEQ ID NO: 18473
  chr11:34270725-34270764
  hypo

SEQ ID NO: 49572 - DNA, 31 bp, Homo sapiens; identical to SEQ ID NO: 18474
  chr11:34378939-34378970
  hypo

SEQ ID NO: 49573 - DNA, 31 bp, Homo sapiens; identical to SEQ ID NO: 18475
  chr11:34407581-34407612
  hypo

SEQ ID NO: 49574 - DNA, 31 bp, Homo sapiens; identical to SEQ ID NO: 18476
  chr11:34511229-34511260
  hypo

SEQ ID NO: 49575 - DNA, 31 bp, Homo sapiens; identical to SEQ ID NO: 18477
  chr11:34511272-34511303
  hypo

SEQ ID NO: 49576 - DNA, 31 bp, Homo sapiens; identical to SEQ ID NO: 18478
  chr11:34511322-34511353
  hypo

SEQ ID NO: 49577 - DNA, 59 bp, Homo sapiens; identical to SEQ ID NO: 18479
  chr11:34511371-34511430
  hypo

SEQ ID NO: 49578 - DNA, 31 bp, Homo sapiens; identical to SEQ ID NO: 18480
  chr11:34527363-34527394
  hypo

SEQ ID NO: 49579 - DNA, 50 bp, Homo sapiens; identical to SEQ ID NO: 18482
  chr11:36248991-36249041
  hypo

SEQ ID NO: 49580 - DNA, 31 bp, Homo sapiens; identical to SEQ ID NO: 18483
  chr11:36277914-36277945
  hypo

SEQ ID NO: 49581 - DNA, 31 bp, Homo sapiens; identical to SEQ ID NO: 18484
  chr11:36277951-36277982
  hypo

SEQ ID NO: 49582 - DNA, 31 bp, Homo sapiens; identical to SEQ ID NO: 18485
  chr11:36278006-36278037
  hypo

SEQ ID NO: 49583 - DNA, 42 bp, Homo sapiens; identical to SEQ ID NO: 18486
  chr11:36278080-36278122
  hypo

SEQ ID NO: 49584 - DNA, 46 bp, Homo sapiens; identical to SEQ ID NO: 18487
  chr11:38195081-38195127
  hypo

SEQ ID NO: 49585 - DNA, 31 bp, Homo sapiens; identical to SEQ ID NO: 18489
  chr11:44096836-44096867
  hypo

SEQ ID NO: 49586 - DNA, 31 bp, Homo sapiens; identical to SEQ ID NO: 18490
  chr11:44616400-44616431
  hypo

SEQ ID NO: 49587 - DNA, 95 bp, Homo sapiens; identical to SEQ ID NO: 18491
  chr11:44621699-44621794
  hypo

SEQ ID NO: 49588 - DNA, 31 bp, Homo sapiens; identical to SEQ ID NO: 18492
  chr11:44637569-44637600
  hypo

SEQ ID NO: 49589 - DNA, 31 bp, Homo sapiens; identical to SEQ ID NO: 18493
  chr11:44637629-44637660
  hypo

SEQ ID NO: 49590 - DNA, 69 bp, Homo sapiens; identical to SEQ ID NO: 18494
  chr11:44640083-44640152
  hypo

SEQ ID NO: 49591 - DNA, 50 bp, Homo sapiens; identical to SEQ ID NO: 18495
  chr11:44640810-44640860
  hypo

SEQ ID NO: 49592 - DNA, 31 bp, Homo sapiens; identical to SEQ ID NO: 18496
  chr11:44640875-44640906
  hypo

SEQ ID NO: 49593 - DNA, 40 bp, Homo sapiens; identical to SEQ ID NO: 18497
  chr11:44640923-44640963
  hypo

SEQ ID NO: 49594 - DNA, 31 bp, Homo sapiens; identical to SEQ ID NO: 18498
  chr11:44675158-44675189
  hypo

SEQ ID NO: 49595 - DNA, 31 bp, Homo sapiens; identical to SEQ ID NO: 18499
  chr11:44675229-44675260
  hypo

SEQ ID NO: 49596 - DNA, 69 bp, Homo sapiens; identical to SEQ ID NO: 18500
  chr11:44675296-44675365
  hypo

SEQ ID NO: 49597 - DNA, 83 bp, Homo sapiens; identical to SEQ ID NO: 38072
  chr11:44748871-44748954
  hypo

SEQ ID NO: 49598 - DNA, 31 bp, Homo sapiens; identical to SEQ ID NO: 18503
  chr11:44968587-44968618
  hypo

SEQ ID NO: 49599 - DNA, 34 bp, Homo sapiens; identical to SEQ ID NO: 18504
  chr11:44993089-44993123
  hypo

SEQ ID NO: 49600 - DNA, 62 bp, Homo sapiens; identical to SEQ ID NO: 18505
  chr11:45248079-45248141
  hypo

SEQ ID NO: 49601 - DNA, 31 bp, Homo sapiens; identical to SEQ ID NO: 18506
  chr11:45417058-45417089
  hypo

SEQ ID NO: 49602 - DNA, 79 bp, Homo sapiens; identical to SEQ ID NO: 18507
  chr11:45417171-45417250
  hypo

SEQ ID NO: 49603 - DNA, 52 bp, Homo sapiens; identical to SEQ ID NO: 4272
  chr11:45684298-45684350
  hypo

SEQ ID NO: 49604 - DNA, 31 bp, Homo sapiens; identical to SEQ ID NO: 4273
  chr11:45684364-45684395
  hypo

SEQ ID NO: 49605 - DNA, 41 bp, Homo sapiens; identical to SEQ ID NO: 18511
  chr11:45951098-45951139
  hypo

SEQ ID NO: 49606 - DNA, 38 bp, Homo sapiens; identical to SEQ ID NO: 18512
  chr11:45951143-45951181
  hypo

SEQ ID NO: 49607 - DNA, 60 bp, Homo sapiens; identical to SEQ ID NO: 18513
  chr11:45951234-45951294
  hypo

SEQ ID NO: 49608 - DNA, 31 bp, Homo sapiens; identical to SEQ ID NO: 18514
  chr11:45956741-45956772
  hypo

SEQ ID NO: 49609 - DNA, 31 bp, Homo sapiens; identical to SEQ ID NO: 18515
  chr11:45956836-45956867
  hypo

SEQ ID NO: 49610 - DNA, 31 bp, Homo sapiens; identical to SEQ ID NO: 18516
  chr11:45956868-45956899
  hypo

SEQ ID NO: 49611 - DNA, 63 bp, Homo sapiens; identical to SEQ ID NO: 4275
  chr11:46264957-46265020
  hypo

SEQ ID NO: 49612 - DNA, 2 bp, Homo sapiens
  chr11:46298482-46298484
  hypo
gt

SEQ ID NO: 49613 - DNA, 45 bp, Homo sapiens; identical to SEQ ID NO: 4276
  chr11:46299546-46299591
  hypo

SEQ ID NO: 49614 - DNA, 31 bp, Homo sapiens; identical to SEQ ID NO: 18520
  chr11:46337892-46337923
  hypo

SEQ ID NO: 49615 - DNA, 31 bp, Homo sapiens; identical to SEQ ID NO: 18521
  chr11:46338009-46338040
  hypo

SEQ ID NO: 49616 - DNA, 31 bp, Homo sapiens; identical to SEQ ID NO: 18522
  chr11:46343982-46344013
  hypo

SEQ ID NO: 49617 - DNA, 31 bp, Homo sapiens; identical to SEQ ID NO: 18524
  chr11:46390769-46390800
  hypo

SEQ ID NO: 49618 - DNA, 49 bp, Homo sapiens; identical to SEQ ID NO: 4277
  chr11:46413560-46413609
  hypo

SEQ ID NO: 49619 - DNA, 31 bp, Homo sapiens; identical to SEQ ID NO: 18528
  chr11:46898129-46898160
  hypo

SEQ ID NO: 49620 - DNA, 31 bp, Homo sapiens; identical to SEQ ID NO: 18529
  chr11:46907965-46907996
  hypo

SEQ ID NO: 49621 - DNA, 31 bp, Homo sapiens; identical to SEQ ID NO: 18531
  chr11:47169577-47169608
  hypo

SEQ ID NO: 49622 - DNA, 31 bp, Homo sapiens; identical to SEQ ID NO: 18532
  chr11:47169618-47169649
  hypo

SEQ ID NO: 49623 - DNA, 31 bp, Homo sapiens; identical to SEQ ID NO: 18533
  chr11:47169686-47169717
  hypo

SEQ ID NO: 49624 - DNA, 39 bp, Homo sapiens; identical to SEQ ID NO: 18534
  chr11:47169725-47169764
  hypo

SEQ ID NO: 49625 - DNA, 29 bp, Homo sapiens
  chr11:47215891-47215920
  hypo
ccgcctcagcaggagacgccccaggagtt

SEQ ID NO: 49626 - DNA, 33 bp, Homo sapiens
  chr11:47358894-47358927
  hypo
ttaactggggagggggcggggggcaggaccagg

SEQ ID NO: 49627 - DNA, 31 bp, Homo sapiens; identical to SEQ ID NO: 18538
  chr11:48001803-48001834
  hypo

SEQ ID NO: 49628 - DNA, 51 bp, Homo sapiens; identical to SEQ ID NO: 4280
  chr11:48002695-48002746
  hypo

SEQ ID NO: 49629 - DNA, 31 bp, Homo sapiens; identical to SEQ ID NO: 18540
  chr11:57010846-57010877
  hypo

SEQ ID NO: 49630 - DNA, 31 bp, Homo sapiens; identical to SEQ ID NO: 18541
  chr11:57010889-57010920
  hypo

SEQ ID NO: 49631 - DNA, 31 bp, Homo sapiens; identical to SEQ ID NO: 18542
  chr11:57058716-57058747
  hypo

SEQ ID NO: 49632 - DNA, 31 bp, Homo sapiens; identical to SEQ ID NO: 18544
  chr11:57115641-57115672
  hypo

SEQ ID NO: 49633 - DNA, 31 bp, Homo sapiens; identical to SEQ ID NO: 18545
  chr11:57116315-57116346
  hypo

SEQ ID NO: 49634 - DNA, 44 bp, Homo sapiens; identical to SEQ ID NO: 18547
  chr11:57207063-57207107
  hypo

SEQ ID NO: 49635 - DNA, 31 bp, Homo sapiens; identical to SEQ ID NO: 18548
  chr11:57254650-57254681
  hypo

SEQ ID NO: 49636 - DNA, 7 bp, Homo sapiens
  chr11:57423906-57423913
  hypo
ttactat

SEQ ID NO: 49637 - DNA, 31 bp, Homo sapiens; identical to SEQ ID NO: 4284
  chr11:57434948-57434979
  hypo

SEQ ID NO: 49638 - DNA, 34 bp, Homo sapiens
  chr11:57500992-57501026
  hypo
tgctgcgattacaggcgtgagtcaccgcgcccag

SEQ ID NO: 49639 - DNA, 10 bp, Homo sapiens
  chr11:58835156-58835166
  hypo
tgtaaataga

SEQ ID NO: 49640 - DNA, 43 bp, Homo sapiens; identical to SEQ ID NO: 18555
  chr11:58949203-58949246
  hypo

SEQ ID NO: 49641 - DNA, 31 bp, Homo sapiens; identical to SEQ ID NO: 18556
  chr11:58949531-58949562
  hypo

SEQ ID NO: 49642 - DNA, 31 bp, Homo sapiens; identical to SEQ ID NO: 18557
  chr11:59031571-59031602
  hypo

SEQ ID NO: 49643 - DNA, 6 bp, Homo sapiens
  chr11:59329209-59329215
  hypo
caaaaa

SEQ ID NO: 49644 - DNA, 31 bp, Homo sapiens; identical to SEQ ID NO: 18559
  chr11:59443884-59443915
  hypo

SEQ ID NO: 49645 - DNA, 36 bp, Homo sapiens; identical to SEQ ID NO: 4291
  chr11:59523185-59523221
  hypo

SEQ ID NO: 49646 - DNA, 31 bp, Homo sapiens; identical to SEQ ID NO: 4292
  chr11:59523285-59523316
  hypo

SEQ ID NO: 49647 - DNA, 31 bp, Homo sapiens; identical to SEQ ID NO: 18562
  chr11:60515940-60515971
  hypo

SEQ ID NO: 49648 - DNA, 50 bp, Homo sapiens; identical to SEQ ID NO: 4293
  chr11:60692120-60692170
  hypo

SEQ ID NO: 49649 - DNA, 108 bp, Homo sapiens; identical to SEQ ID NO: 18564
  chr11:60696095-60696203
  hypo

SEQ ID NO: 49650 - DNA, 43 bp, Homo sapiens; identical to SEQ ID NO: 18565
  chr11:60696212-60696255
  hypo

SEQ ID NO: 49651 - DNA, 61 bp, Homo sapiens; identical to SEQ ID NO: 18566
  chr11:60703903-60703964
  hypo

SEQ ID NO: 49652 - DNA, 59 bp, Homo sapiens; identical to SEQ ID NO: 18567
  chr11:60704009-60704068
  hypo

SEQ ID NO: 49653 - DNA, 2 bp, Homo sapiens
  chr11:60897861-60897863
  hypo
ac

SEQ ID NO: 49654 - DNA, 46 bp, Homo sapiens; identical to SEQ ID NO: 18570
  chr11:60920768-60920814
  hypo

SEQ ID NO: 49655 - DNA, 31 bp, Homo sapiens; identical to SEQ ID NO: 18571
  chr11:60926975-60927006
  hypo

SEQ ID NO: 49656 - DNA, 31 bp, Homo sapiens; identical to SEQ ID NO: 18574
  chr11:61039291-61039322
  hypo

SEQ ID NO: 49657 - DNA, 2 bp, Homo sapiens
  chr11:61049496-61049498
  hypo
gg

SEQ ID NO: 49658 - DNA, 16 bp, Homo sapiens
  chr11:61049655-61049671
  hypo
gcgtggtaggggtaag

SEQ ID NO: 49659 - DNA, 38 bp, Homo sapiens; identical to SEQ ID NO: 18578
  chr11:61056996-61057034
  hypo

SEQ ID NO: 49660 - DNA, 31 bp, Homo sapiens; identical to SEQ ID NO: 18579
  chr11:61076199-61076230
  hypo

SEQ ID NO: 49661 - DNA, 84 bp, Homo sapiens; identical to SEQ ID NO: 18580
  chr11:61076438-61076522
  hypo

SEQ ID NO: 49662 - DNA, 31 bp, Homo sapiens; identical to SEQ ID NO: 18581
  chr11:61106796-61106827
  hypo

SEQ ID NO: 49663 - DNA, 52 bp, Homo sapiens; identical to SEQ ID NO: 18582
  chr11:61108935-61108987
  hypo

SEQ ID NO: 49664 - DNA, 60 bp, Homo sapiens; identical to SEQ ID NO: 18583
  chr11:61109027-61109087
  hypo

SEQ ID NO: 49665 - DNA, 54 bp, Homo sapiens; identical to SEQ ID NO: 18584
  chr11:61118454-61118508
  hypo

SEQ ID NO: 49666 - DNA, 37 bp, Homo sapiens; identical to SEQ ID NO: 18585
  chr11:61122608-61122645
  hypo

SEQ ID NO: 49667 - DNA, 31 bp, Homo sapiens; identical to SEQ ID NO: 4299
  chr11:61160872-61160903
  hypo

SEQ ID NO: 49668 - DNA, 31 bp, Homo sapiens; identical to SEQ ID NO: 18587
  chr11:61292903-61292934
  hypo

SEQ ID NO: 49669 - DNA, 31 bp, Homo sapiens; identical to SEQ ID NO: 18588
  chr11:61305489-61305520
  hypo

SEQ ID NO: 49670 - DNA, 99 bp, Homo sapiens; identical to SEQ ID NO: 4300
  chr11:61348493-61348592
  hypo

SEQ ID NO: 49671 - DNA, 31 bp, Homo sapiens; identical to SEQ ID NO: 18590
  chr11:61416205-61416236
  hypo

SEQ ID NO: 49672 - DNA, 31 bp, Homo sapiens; identical to SEQ ID NO: 18591
  chr11:61423922-61423953
  hypo

SEQ ID NO: 49673 - DNA, 31 bp, Homo sapiens; identical to SEQ ID NO: 18592
  chr11:61458298-61458329
  hypo

SEQ ID NO: 49674 - DNA, 31 bp, Homo sapiens; identical to SEQ ID NO: 18593
  chr11:61473668-61473699
  hypo

SEQ ID NO: 49675 - DNA, 51 bp, Homo sapiens; identical to SEQ ID NO: 18594
  chr11:61474396-61474447
  hypo

SEQ ID NO: 49676 - DNA, 45 bp, Homo sapiens; identical to SEQ ID NO: 18595
  chr11:61476224-61476269
  hypo

SEQ ID NO: 49677 - DNA, 57 bp, Homo sapiens; identical to SEQ ID NO: 18596
  chr11:61478511-61478568
  hypo

SEQ ID NO: 49678 - DNA, 34 bp, Homo sapiens; identical to SEQ ID NO: 18597
  chr11:61479891-61479925
  hypo

SEQ ID NO: 49679 - DNA, 31 bp, Homo sapiens; identical to SEQ ID NO: 18598
  chr11:61479978-61480009
  hypo

SEQ ID NO: 49680 - DNA, 51 bp, Homo sapiens; identical to SEQ ID NO: 18599
  chr11:61480030-61480081
  hypo

SEQ ID NO: 49681 - DNA, 87 bp, Homo sapiens; identical to SEQ ID NO: 18600
  chr11:61488283-61488370
  hypo

SEQ ID NO: 49682 - DNA, 31 bp, Homo sapiens; identical to SEQ ID NO: 18601
  chr11:61488419-61488450
  hypo

SEQ ID NO: 49683 - DNA, 31 bp, Homo sapiens; identical to SEQ ID NO: 18602
  chr11:61490186-61490217
  hypo

SEQ ID NO: 49684 - DNA, 49 bp, Homo sapiens; identical to SEQ ID NO: 18603
  chr11:61490227-61490276
  hypo

SEQ ID NO: 49685 - DNA, 49 bp, Homo sapiens; identical to SEQ ID NO: 18604
  chr11:61490327-61490376
  hypo

SEQ ID NO: 49686 - DNA, 31 bp, Homo sapiens; identical to SEQ ID NO: 18605
  chr11:61490854-61490885
  hypo

SEQ ID NO: 49687 - DNA, 36 bp, Homo sapiens; identical to SEQ ID NO: 18606
  chr11:61494079-61494115
  hypo

SEQ ID NO: 49688 - DNA, 131 bp, Homo sapiens; identical to SEQ ID NO: 18607
  chr11:61495639-61495770
  hypo

SEQ ID NO: 49689 - DNA, 31 bp, Homo sapiens; identical to SEQ ID NO: 18608
  chr11:61498683-61498714
  hypo

SEQ ID NO: 49690 - DNA, 62 bp, Homo sapiens; identical to SEQ ID NO: 18609
  chr11:61502321-61502383
  hypo

SEQ ID NO: 49691 - DNA, 104 bp, Homo sapiens; identical to SEQ ID NO: 18610
  chr11:61502392-61502496
  hypo

SEQ ID NO: 49692 - DNA, 31 bp, Homo sapiens; identical to SEQ ID NO: 18611
  chr11:61508799-61508830
  hypo

SEQ ID NO: 49693 - DNA, 44 bp, Homo sapiens; identical to SEQ ID NO: 18612
  chr11:61511516-61511560
  hypo

SEQ ID NO: 49694 - DNA, 31 bp, Homo sapiens; identical to SEQ ID NO: 18613
  chr11:61511566-61511597
  hypo

SEQ ID NO: 49695 - DNA, 52 bp, Homo sapiens; identical to SEQ ID NO: 18614
  chr11:61511632-61511684
  hypo

SEQ ID NO: 49696 - DNA, 31 bp, Homo sapiens; identical to SEQ ID NO: 18615
  chr11:61511707-61511738
  hypo

SEQ ID NO: 49697 - DNA, 58 bp, Homo sapiens; identical to SEQ ID NO: 18616
  chr11:61511805-61511863
  hypo

SEQ ID NO: 49698 - DNA, 31 bp, Homo sapiens; identical to SEQ ID NO: 18617
  chr11:61512092-61512123
  hypo

SEQ ID NO: 49699 - DNA, 240 bp, Homo sapiens; identical to SEQ ID NO: 4307
  chr11:61520127-61520367
  hypo

SEQ ID NO: 49700 - DNA, 69 bp, Homo sapiens; identical to SEQ ID NO: 18619
  chr11:61525592-61525661
  hypo

SEQ ID NO: 49701 - DNA, 31 bp, Homo sapiens; identical to SEQ ID NO: 18620
  chr11:61533319-61533350
  hypo

SEQ ID NO: 49702 - DNA, 31 bp, Homo sapiens; identical to SEQ ID NO: 18621
  chr11:61592290-61592321
  hypo

SEQ ID NO: 49703 - DNA, 47 bp, Homo sapiens; identical to SEQ ID NO: 18622
  chr11:61615509-61615556
  hypo

SEQ ID NO: 49704 - DNA, 31 bp, Homo sapiens; identical to SEQ ID NO: 18623
  chr11:61619675-61619706
  hypo

SEQ ID NO: 49705 - DNA, 31 bp, Homo sapiens; identical to SEQ ID NO: 18624
  chr11:61621920-61621951
  hypo

SEQ ID NO: 49706 - DNA, 31 bp, Homo sapiens; identical to SEQ ID NO: 18625
  chr11:61624801-61624832
  hypo

SEQ ID NO: 49707 - DNA, 96 bp, Homo sapiens; identical to SEQ ID NO: 18626
  chr11:61632398-61632494
  hypo

SEQ ID NO: 49708 - DNA, 31 bp, Homo sapiens; identical to SEQ ID NO: 18627
  chr11:61632579-61632610
  hypo

SEQ ID NO: 49709 - DNA, 56 bp, Homo sapiens; identical to SEQ ID NO: 18628
  chr11:61632626-61632682
  hypo

SEQ ID NO: 49710 - DNA, 31 bp, Homo sapiens; identical to SEQ ID NO: 18629
  chr11:61632702-61632733
  hypo

SEQ ID NO: 49711 - DNA, 51 bp, Homo sapiens; identical to SEQ ID NO: 18630
  chr11:61632755-61632806
  hypo

SEQ ID NO: 49712 - DNA, 40 bp, Homo sapiens; identical to SEQ ID NO: 18631
  chr11:61634596-61634636
  hypo

SEQ ID NO: 49713 - DNA, 38 bp, Homo sapiens; identical to SEQ ID NO: 18632
  chr11:61634702-61634740
  hypo

SEQ ID NO: 49714 - DNA, 31 bp, Homo sapiens; identical to SEQ ID NO: 18633
  chr11:61634742-61634773
  hypo

SEQ ID NO: 49715 - DNA, 37 bp, Homo sapiens; identical to SEQ ID NO: 18634
  chr11:61635270-61635307
  hypo

SEQ ID NO: 49716 - DNA, 61 bp, Homo sapiens; identical to SEQ ID NO: 18635
  chr11:61640642-61640703
  hypo

SEQ ID NO: 49717 - DNA, 31 bp, Homo sapiens; identical to SEQ ID NO: 18636
  chr11:61646080-61646111
  hypo

SEQ ID NO: 49718 - DNA, 62 bp, Homo sapiens; identical to SEQ ID NO: 18637
  chr11:61646130-61646192
  hypo

SEQ ID NO: 49719 - DNA, 31 bp, Homo sapiens; identical to SEQ ID NO: 18638
  chr11:61647048-61647079
  hypo

SEQ ID NO: 49720 - DNA, 43 bp, Homo sapiens; identical to SEQ ID NO: 18639
  chr11:61653515-61653558
  hypo

SEQ ID NO: 49721 - DNA, 31 bp, Homo sapiens; identical to SEQ ID NO: 18640
  chr11:61667862-61667893
  hypo

SEQ ID NO: 49722 - DNA, 31 bp, Homo sapiens; identical to SEQ ID NO: 18641
  chr11:61668804-61668835
  hypo

SEQ ID NO: 49723 - DNA, 31 bp, Homo sapiens; identical to SEQ ID NO: 18642
  chr11:61669003-61669034
  hypo

SEQ ID NO: 49724 - DNA, 121 bp, Homo sapiens; identical to SEQ ID NO: 18643
  chr11:61672908-61673029
  hypo

SEQ ID NO: 49725 - DNA, 31 bp, Homo sapiens; identical to SEQ ID NO: 18644
  chr11:61673121-61673152
  hypo

SEQ ID NO: 49726 - DNA, 53 bp, Homo sapiens; identical to SEQ ID NO: 18645
  chr11:61674006-61674059
  hypo

SEQ ID NO: 49727 - DNA, 67 bp, Homo sapiens; identical to SEQ ID NO: 18646
  chr11:61674065-61674132
  hypo

SEQ ID NO: 49728 - DNA, 31 bp, Homo sapiens; identical to SEQ ID NO: 18647
  chr11:61679897-61679928
  hypo

SEQ ID NO: 49729 - DNA, 47 bp, Homo sapiens; identical to SEQ ID NO: 18648
  chr11:61679944-61679991
  hypo

SEQ ID NO: 49730 - DNA, 52 bp, Homo sapiens; identical to SEQ ID NO: 18649
  chr11:61680000-61680052
  hypo

SEQ ID NO: 49731 - DNA, 31 bp, Homo sapiens; identical to SEQ ID NO: 18650
  chr11:61713859-61713890
  hypo

SEQ ID NO: 49732 - DNA, 31 bp, Homo sapiens; identical to SEQ ID NO: 18651
  chr11:61713916-61713947
  hypo

SEQ ID NO: 49733 - DNA, 31 bp, Homo sapiens; identical to SEQ ID NO: 18652
  chr11:61727795-61727826
  hypo

SEQ ID NO: 49734 - DNA, 1 bp, Homo sapiens
  chr11:61736670-61736671
  hypo
t

SEQ ID NO: 49735 - DNA, 8 bp, Homo sapiens
  chr11:61736693-61736701
  hypo
ctcatgcc

SEQ ID NO: 49736 - DNA, 31 bp, Homo sapiens; identical to SEQ ID NO: 18654
  chr11:61747021-61747052
  hypo

SEQ ID NO: 49737 - DNA, 31 bp, Homo sapiens; identical to SEQ ID NO: 18655
  chr11:61765125-61765156
  hypo

SEQ ID NO: 49738 - DNA, 31 bp, Homo sapiens; identical to SEQ ID NO: 18657
  chr11:61770071-61770102
  hypo

SEQ ID NO: 49739 - DNA, 31 bp, Homo sapiens; identical to SEQ ID NO: 18658
  chr11:61770720-61770751
  hypo

SEQ ID NO: 49740 - DNA, 31 bp, Homo sapiens; identical to SEQ ID NO: 18659
  chr11:61770752-61770783
  hypo

SEQ ID NO: 49741 - DNA, 64 bp, Homo sapiens; identical to SEQ ID NO: 18660
  chr11:61770805-61770869
  hypo

SEQ ID NO: 49742 - DNA, 31 bp, Homo sapiens; identical to SEQ ID NO: 18661
  chr11:61779428-61779459
  hypo

SEQ ID NO: 49743 - DNA, 34 bp, Homo sapiens; identical to SEQ ID NO: 18662
  chr11:61795461-61795495
  hypo

SEQ ID NO: 49744 - DNA, 45 bp, Homo sapiens; identical to SEQ ID NO: 18663
  chr11:61825692-61825737
  hypo

SEQ ID NO: 49745 - DNA, 31 bp, Homo sapiens; identical to SEQ ID NO: 18664
  chr11:61826063-61826094
  hypo

SEQ ID NO: 49746 - DNA, 31 bp, Homo sapiens; identical to SEQ ID NO: 18666
  chr11:62242405-62242436
  hypo

SEQ ID NO: 49747 - DNA, 60 bp, Homo sapiens; identical to SEQ ID NO: 18667
  chr11:62258006-62258066
  hypo

SEQ ID NO: 49748 - DNA, 149 bp, Homo sapiens; identical to SEQ ID NO: 4308
  chr11:62313645-62313794
  hypo

SEQ ID NO: 49749 - DNA, 201 bp, Homo sapiens; identical to SEQ ID NO: 4309
  chr11:62313806-62314007
  hypo

SEQ ID NO: 49750 - DNA, 91 bp, Homo sapiens; identical to SEQ ID NO: 4310
  chr11:62314023-62314114
  hypo

SEQ ID NO: 49751 - DNA, 56 bp, Homo sapiens; identical to SEQ ID NO: 4311
  chr11:62369473-62369529
  hypo

SEQ ID NO: 49752 - DNA, 31 bp, Homo sapiens; identical to SEQ ID NO: 18672
  chr11:62370822-62370853
  hypo

SEQ ID NO: 49753 - DNA, 9 bp, Homo sapiens
  chr11:62450120-62450129
  hypo
gtgctggaa

SEQ ID NO: 49754 - DNA, 21 bp, Homo sapiens
  chr11:62450206-62450227
  hypo
tacaggcgtgagtgctggaat

SEQ ID NO: 49755 - DNA, 31 bp, Homo sapiens; identical to SEQ ID NO: 18676
  chr11:62484618-62484649
  hypo

SEQ ID NO: 49756 - DNA, 31 bp, Homo sapiens; identical to SEQ ID NO: 18677
  chr11:62700323-62700354
  hypo

SEQ ID NO: 49757 - DNA, 30 bp, Homo sapiens; identical to SEQ ID NO: 18679
  chr11:63442644-63442674
  hypo

SEQ ID NO: 49758 - DNA, 31 bp, Homo sapiens; identical to SEQ ID NO: 18680
  chr11:63444189-63444220
  hypo

SEQ ID NO: 49759 - DNA, 1 bp, Homo sapiens
  chr11:63609979-63609980
  hypo
a

SEQ ID NO: 49760 - DNA, 31 bp, Homo sapiens; identical to SEQ ID NO: 18684
  chr11:63714456-63714487
  hypo

SEQ ID NO: 49761 - DNA, 31 bp, Homo sapiens; identical to SEQ ID NO: 18685
  chr11:63743820-63743851
  hypo

SEQ ID NO: 49762 - DNA, 31 bp, Homo sapiens; identical to SEQ ID NO: 18686
  chr11:63776021-63776052
  hypo

SEQ ID NO: 49763 - DNA, 32 bp, Homo sapiens; identical to SEQ ID NO: 18688
  chr11:63814028-63814060
  hypo

SEQ ID NO: 49764 - DNA, 32 bp, Homo sapiens; identical to SEQ ID NO: 18689
  chr11:63814239-63814271
  hypo

SEQ ID NO: 49765 - DNA, 31 bp, Homo sapiens; identical to SEQ ID NO: 18690
  chr11:63818820-63818851
  hypo

SEQ ID NO: 49766 - DNA, 31 bp, Homo sapiens; identical to SEQ ID NO: 18691
  chr11:63830016-63830047
  hypo

SEQ ID NO: 49767 - DNA, 31 bp, Homo sapiens; identical to SEQ ID NO: 18692
  chr11:63849154-63849185
  hypo

SEQ ID NO: 49768 - DNA, 31 bp, Homo sapiens; identical to SEQ ID NO: 18693
  chr11:63871582-63871613
  hypo

SEQ ID NO: 49769 - DNA, 40 bp, Homo sapiens; identical to SEQ ID NO: 18694
  chr11:63871620-63871660
  hypo

SEQ ID NO: 49770 - DNA, 53 bp, Homo sapiens; identical to SEQ ID NO: 18696
  chr11:63892559-63892612
  hypo

SEQ ID NO: 49771 - DNA, 31 bp, Homo sapiens; identical to SEQ ID NO: 18697
  chr11:63905994-63906025
  hypo

SEQ ID NO: 49772 - DNA, 31 bp, Homo sapiens; identical to SEQ ID NO: 18698
  chr11:63916438-63916469
  hypo

SEQ ID NO: 49773 - DNA, 31 bp, Homo sapiens; identical to SEQ ID NO: 18699
  chr11:63917114-63917145
  hypo

SEQ ID NO: 49774 - DNA, 31 bp, Homo sapiens; identical to SEQ ID NO: 18700
  chr11:63917484-63917515
  hypo

SEQ ID NO: 49775 - DNA, 31 bp, Homo sapiens; identical to SEQ ID NO: 18701
  chr11:63923020-63923051
  hypo

SEQ ID NO: 49776 - DNA, 31 bp, Homo sapiens; identical to SEQ ID NO: 18703
  chr11:63934668-63934699
  hypo

SEQ ID NO: 49777 - DNA, 31 bp, Homo sapiens; identical to SEQ ID NO: 18705
  chr11:63963918-63963949
  hypo

SEQ ID NO: 49778 - DNA, 31 bp, Homo sapiens; identical to SEQ ID NO: 18706
  chr11:63964099-63964130
  hypo

SEQ ID NO: 49779 - DNA, 2 bp, Homo sapiens
  chr11:63978731-63978733
  hypo
ca

SEQ ID NO: 49780 - DNA, 30 bp, Homo sapiens; identical to SEQ ID NO: 18709
  chr11:63990014-63990044
  hypo

SEQ ID NO: 49781 - DNA, 55 bp, Homo sapiens; identical to SEQ ID NO: 18710
  chr11:63990121-63990176
  hypo

SEQ ID NO: 49782 - DNA, 31 bp, Homo sapiens; identical to SEQ ID NO: 18711
  chr11:64019237-64019268
  hypo

SEQ ID NO: 49783 - DNA, 62 bp, Homo sapiens; identical to SEQ ID NO: 18712
  chr11:64055230-64055292
  hypo

SEQ ID NO: 49784 - DNA, 31 bp, Homo sapiens; identical to SEQ ID NO: 18713
  chr11:64056036-64056067
  hypo

SEQ ID NO: 49785 - DNA, 49 bp, Homo sapiens; identical to SEQ ID NO: 18714
  chr11:64056097-64056146
  hypo

SEQ ID NO: 49786 - DNA, 56 bp, Homo sapiens; identical to SEQ ID NO: 18715
  chr11:64056160-64056216
  hypo

SEQ ID NO: 49787 - DNA, 31 bp, Homo sapiens; identical to SEQ ID NO: 18716
  chr11:64069274-64069305
  hypo

SEQ ID NO: 49788 - DNA, 31 bp, Homo sapiens; identical to SEQ ID NO: 18717
  chr11:64069322-64069353
  hypo

SEQ ID NO: 49789 - DNA, 31 bp, Homo sapiens; identical to SEQ ID NO: 18720
  chr11:64118935-64118966
  hypo

SEQ ID NO: 49790 - DNA, 82 bp, Homo sapiens; identical to SEQ ID NO: 18721
  chr11:64119012-64119094
  hypo

SEQ ID NO: 49791 - DNA, 2 bp, Homo sapiens
  chr11:64120221-64120223
  hypo
gc

SEQ ID NO: 49792 - DNA, 31 bp, Homo sapiens; identical to SEQ ID NO: 18724
  chr11:64143232-64143263
  hypo

SEQ ID NO: 49793 - DNA, 53 bp, Homo sapiens; identical to SEQ ID NO: 18725
  chr11:64319241-64319294
  hypo

SEQ ID NO: 49794 - DNA, 31 bp, Homo sapiens; identical to SEQ ID NO: 18726
  chr11:64324827-64324858
  hypo

SEQ ID NO: 49795 - DNA, 31 bp, Homo sapiens; identical to SEQ ID NO: 18727
  chr11:64347187-64347218
  hypo

SEQ ID NO: 49796 - DNA, 60 bp, Homo sapiens; identical to SEQ ID NO: 18728
  chr11:64367836-64367896
  hypo

SEQ ID NO: 49797 - DNA, 31 bp, Homo sapiens; identical to SEQ ID NO: 18729
  chr11:64367907-64367938
  hypo

SEQ ID NO: 49798 - DNA, 50 bp, Homo sapiens; identical to SEQ ID NO: 18730
  chr11:64390386-64390436
  hypo

SEQ ID NO: 49799 - DNA, 59 bp, Homo sapiens; identical to SEQ ID NO: 18731
  chr11:64418854-64418913
  hypo

SEQ ID NO: 49800 - DNA, 31 bp, Homo sapiens; identical to SEQ ID NO: 18732
  chr11:64434773-64434804
  hypo

SEQ ID NO: 49801 - DNA, 31 bp, Homo sapiens; identical to SEQ ID NO: 18735
  chr11:64597831-64597862
  hypo

SEQ ID NO: 49802 - DNA, 100 bp, Homo sapiens; identical to SEQ ID NO: 18736
  chr11:64600134-64600234
  hypo

SEQ ID NO: 49803 - DNA, 31 bp, Homo sapiens; identical to SEQ ID NO: 18737
  chr11:64600281-64600312
  hypo

SEQ ID NO: 49804 - DNA, 31 bp, Homo sapiens; identical to SEQ ID NO: 18738
  chr11:64600772-64600803
  hypo

SEQ ID NO: 49805 - DNA, 31 bp, Homo sapiens; identical to SEQ ID NO: 18739
  chr11:64601738-64601769
  hypo

SEQ ID NO: 49806 - DNA, 31 bp, Homo sapiens; identical to SEQ ID NO: 18740
  chr11:64607056-64607087
  hypo

SEQ ID NO: 49807 - DNA, 49 bp, Homo sapiens; identical to SEQ ID NO: 18741
  chr11:64607091-64607140
  hypo

SEQ ID NO: 49808 - DNA, 87 bp, Homo sapiens; identical to SEQ ID NO: 18742
  chr11:64624926-64625013
  hypo

SEQ ID NO: 49809 - DNA, 31 bp, Homo sapiens; identical to SEQ ID NO: 4320
  chr11:64698944-64698975
  hypo

SEQ ID NO: 49810 - DNA, 31 bp, Homo sapiens; identical to SEQ ID NO: 4321
  chr11:64698988-64699019
  hypo

SEQ ID NO: 49811 - DNA, 31 bp, Homo sapiens; identical to SEQ ID NO: 4322
  chr11:64699020-64699051
  hypo

SEQ ID NO: 49812 - DNA, 55 bp, Homo sapiens; identical to SEQ ID NO: 4323
  chr11:64699088-64699143
  hypo

SEQ ID NO: 49813 - DNA, 31 bp, Homo sapiens; identical to SEQ ID NO: 4324
  chr11:64759021-64759052
  hypo

SEQ ID NO: 49814 - DNA, 31 bp, Homo sapiens; identical to SEQ ID NO: 18749
  chr11:64809968-64809999
  hypo

SEQ ID NO: 49815 - DNA, 169 bp, Homo sapiens; identical to SEQ ID NO: 18750
  chr11:64875618-64875787
  hypo

SEQ ID NO: 49816 - DNA, 15 bp, Homo sapiens
  chr11:64876158-64876173
  hypo
cgcctgggccaccac

SEQ ID NO: 49817 - DNA, 31 bp, Homo sapiens; identical to SEQ ID NO: 18752
  chr11:64876330-64876361
  hypo

SEQ ID NO: 49818 - DNA, 31 bp, Homo sapiens; identical to SEQ ID NO: 18753
  chr11:64898550-64898581
  hypo

SEQ ID NO: 49819 - DNA, 43 bp, Homo sapiens; identical to SEQ ID NO: 18755
  chr11:64950869-64950912
  hypo

SEQ ID NO: 49820 - DNA, 78 bp, Homo sapiens; identical to SEQ ID NO: 18757
  chr11:64955442-64955520
  hypo

SEQ ID NO: 49821 - DNA, 31 bp, Homo sapiens; identical to SEQ ID NO: 18758
  chr11:64977149-64977180
  hypo

SEQ ID NO: 49822 - DNA, 66 bp, Homo sapiens
  chr11:64977534-64977600
  hypo
cctacgagatgcggatggccattgagtcggcaggtgagactccaaggctgacggcacctgtggggc

SEQ ID NO: 49823 - DNA, 43 bp, Homo sapiens; identical to SEQ ID NO: 18760
  chr11:65023026-65023069
  hypo

SEQ ID NO: 49824 - DNA, 2 bp, Homo sapiens
  chr11:65028519-65028521
  hypo
aa

SEQ ID NO: 49825 - DNA, 31 bp, Homo sapiens; identical to SEQ ID NO: 4325
  chr11:65082127-65082158
  hypo

SEQ ID NO: 49826 - DNA, 37 bp, Homo sapiens; identical to SEQ ID NO: 18764
  chr11:65124377-65124414
  hypo

SEQ ID NO: 49827 - DNA, 2 bp, Homo sapiens
  chr11:65306380-65306382
  hypo
aa

SEQ ID NO: 49828 - DNA, 9 bp, Homo sapiens
  chr11:65306767-65306776
  hypo
cccctgccc

SEQ ID NO: 49829 - DNA, 2 bp, Homo sapiens
  chr11:65309027-65309029
  hypo
gg

SEQ ID NO: 49830 - DNA, 51 bp, Homo sapiens; identical to SEQ ID NO: 18768
  chr11:65375070-65375121
  hypo

SEQ ID NO: 49831 - DNA, 31 bp, Homo sapiens; identical to SEQ ID NO: 18769
  chr11:65385209-65385240
  hypo

SEQ ID NO: 49832 - DNA, 2 bp, Homo sapiens
  chr11:65629449-65629451
  hypo
ca

SEQ ID NO: 49833 - DNA, 31 bp, Homo sapiens; identical to SEQ ID NO: 18772
  chr11:65685226-65685257
  hypo

SEQ ID NO: 49834 - DNA, 31 bp, Homo sapiens; identical to SEQ ID NO: 18773
  chr11:65698361-65698392
  hypo

SEQ ID NO: 49835 - DNA, 2 bp, Homo sapiens
  chr11:65722777-65722779
  hypo
aa

SEQ ID NO: 49836 - DNA, 40 bp, Homo sapiens; identical to SEQ ID NO: 18775
  chr11:65754936-65754976
  hypo

SEQ ID NO: 49837 - DNA, 35 bp, Homo sapiens; identical to SEQ ID NO: 18776
  chr11:65787644-65787679
  hypo

SEQ ID NO: 49838 - DNA, 31 bp, Homo sapiens; identical to SEQ ID NO: 18777
  chr11:65935758-65935789
  hypo

SEQ ID NO: 49839 - DNA, 31 bp, Homo sapiens; identical to SEQ ID NO: 18778
  chr11:65935828-65935859
  hypo

SEQ ID NO: 49840 - DNA, 81 bp, Homo sapiens; identical to SEQ ID NO: 18779
  chr11:65935877-65935958
  hypo

SEQ ID NO: 49841 - DNA, 31 bp, Homo sapiens; identical to SEQ ID NO: 18780
  chr11:65935969-65936000
  hypo

SEQ ID NO: 49842 - DNA, 91 bp, Homo sapiens; identical to SEQ ID NO: 18781
  chr11:66052173-66052264
  hypo

SEQ ID NO: 49843 - DNA, 31 bp, Homo sapiens; identical to SEQ ID NO: 18782
  chr11:66061846-66061877
  hypo

SEQ ID NO: 49844 - DNA, 38 bp, Homo sapiens; identical to SEQ ID NO: 18783
  chr11:66099977-66100015
  hypo

SEQ ID NO: 49845 - DNA, 31 bp, Homo sapiens; identical to SEQ ID NO: 18784
  chr11:66100034-66100065
  hypo

SEQ ID NO: 49846 - DNA, 31 bp, Homo sapiens; identical to SEQ ID NO: 18785
  chr11:66100091-66100122
  hypo

SEQ ID NO: 49847 - DNA, 31 bp, Homo sapiens; identical to SEQ ID NO: 18786
  chr11:66100146-66100177
  hypo

SEQ ID NO: 49848 - DNA, 31 bp, Homo sapiens; identical to SEQ ID NO: 18787
  chr11:66101068-66101099
  hypo

SEQ ID NO: 49849 - DNA, 34 bp, Homo sapiens; identical to SEQ ID NO: 18788
  chr11:66113510-66113544
  hypo

SEQ ID NO: 49850 - DNA, 31 bp, Homo sapiens; identical to SEQ ID NO: 18789
  chr11:66128652-66128683
  hypo

SEQ ID NO: 49851 - DNA, 31 bp, Homo sapiens; identical to SEQ ID NO: 4333
  chr11:66176412-66176443
  hypo

SEQ ID NO: 49852 - DNA, 68 bp, Homo sapiens; identical to SEQ ID NO: 4334
  chr11:66176499-66176567
  hypo

SEQ ID NO: 49853 - DNA, 61 bp, Homo sapiens; identical to SEQ ID NO: 4335
  chr11:66176660-66176721
  hypo

SEQ ID NO: 49854 - DNA, 31 bp, Homo sapiens; identical to SEQ ID NO: 18794
  chr11:66333945-66333976
  hypo

SEQ ID NO: 49855 - DNA, 31 bp, Homo sapiens; identical to SEQ ID NO: 18795
  chr11:66373084-66373115
  hypo

SEQ ID NO: 49856 - DNA, 71 bp, Homo sapiens; identical to SEQ ID NO: 18796
  chr11:66373247-66373318
  hypo

SEQ ID NO: 49857 - DNA, 57 bp, Homo sapiens; identical to SEQ ID NO: 18797
  chr11:66411298-66411355
  hypo

SEQ ID NO: 49858 - DNA, 2 bp, Homo sapiens
  chr11:66411367-66411369
  hypo
ct

SEQ ID NO: 49859 - DNA, 10 bp, Homo sapiens
  chr11:66411557-66411567
  hypo
tgagcgggag

SEQ ID NO: 49860 - DNA, 2 bp, Homo sapiens
  chr11:66454423-66454425
  hypo
aa

SEQ ID NO: 49861 - DNA, 35 bp, Homo sapiens; identical to SEQ ID NO: 18803
  chr11:66457264-66457299
  hypo

SEQ ID NO: 49862 - DNA, 48 bp, Homo sapiens; identical to SEQ ID NO: 18804
  chr11:66457306-66457354
  hypo

SEQ ID NO: 49863 - DNA, 67 bp, Homo sapiens; identical to SEQ ID NO: 18805
  chr11:66457463-66457530
  hypo

SEQ ID NO: 49864 - DNA, 2 bp, Homo sapiens
  chr11:66511193-66511195
  hypo
at

SEQ ID NO: 49865 - DNA, 5 bp, Homo sapiens
  chr11:66513253-66513258
  hypo
atatc

SEQ ID NO: 49866 - DNA, 2 bp, Homo sapiens
  chr11:66557366-66557368
  hypo
ta

SEQ ID NO: 49867 - DNA, 44 bp, Homo sapiens; identical to SEQ ID NO: 18814
  chr11:66557794-66557838
  hypo

SEQ ID NO: 49868 - DNA, 41 bp, Homo sapiens
  chr11:66626187-66626228
  hypo
tcctcccgagcccgggctttccccaacgggaccttagagat

SEQ ID NO: 49869 - DNA, 31 bp, Homo sapiens; identical to SEQ ID NO: 18822
  chr11:66629458-66629489
  hypo

SEQ ID NO: 49870 - DNA, 45 bp, Homo sapiens; identical to SEQ ID NO: 18823
  chr11:66629497-66629542
  hypo

SEQ ID NO: 49871 - DNA, 98 bp, Homo sapiens; identical to SEQ ID NO: 18824
  chr11:66637737-66637835
  hypo

SEQ ID NO: 49872 - DNA, 56 bp, Homo sapiens; identical to SEQ ID NO: 18825
  chr11:66652535-66652591
  hypo

SEQ ID NO: 49873 - DNA, 51 bp, Homo sapiens; identical to SEQ ID NO: 18826
  chr11:66655509-66655560
  hypo

SEQ ID NO: 49874 - DNA, 31 bp, Homo sapiens; identical to SEQ ID NO: 18827
  chr11:66664018-66664049
  hypo

SEQ ID NO: 49875 - DNA, 31 bp, Homo sapiens; identical to SEQ ID NO: 18828
  chr11:66665004-66665035
  hypo

SEQ ID NO: 49876 - DNA, 49 bp, Homo sapiens; identical to SEQ ID NO: 18829
  chr11:66665047-66665096
  hypo

SEQ ID NO: 49877 - DNA, 31 bp, Homo sapiens; identical to SEQ ID NO: 18830
  chr11:66676019-66676050
  hypo

SEQ ID NO: 49878 - DNA, 73 bp, Homo sapiens; identical to SEQ ID NO: 18831
  chr11:66676111-66676184
  hypo

SEQ ID NO: 49879 - DNA, 51 bp, Homo sapiens; identical to SEQ ID NO: 18832
  chr11:66676191-66676242
  hypo

SEQ ID NO: 49880 - DNA, 59 bp, Homo sapiens; identical to SEQ ID NO: 18833
  chr11:66676877-66676936
  hypo

SEQ ID NO: 49881 - DNA, 31 bp, Homo sapiens; identical to SEQ ID NO: 18834
  chr11:66683035-66683066
  hypo

SEQ ID NO: 49882 - DNA, 59 bp, Homo sapiens; identical to SEQ ID NO: 18836
  chr11:66695455-66695514
  hypo

SEQ ID NO: 49883 - DNA, 31 bp, Homo sapiens; identical to SEQ ID NO: 18837
  chr11:66695563-66695594
  hypo

SEQ ID NO: 49884 - DNA, 31 bp, Homo sapiens; identical to SEQ ID NO: 18838
  chr11:66701353-66701384
  hypo

SEQ ID NO: 49885 - DNA, 31 bp, Homo sapiens; identical to SEQ ID NO: 18839
  chr11:66701399-66701430
  hypo

SEQ ID NO: 49886 - DNA, 60 bp, Homo sapiens; identical to SEQ ID NO: 18840
  chr11:66701489-66701549
  hypo

SEQ ID NO: 49887 - DNA, 31 bp, Homo sapiens; identical to SEQ ID NO: 18841
  chr11:66701669-66701700
  hypo

SEQ ID NO: 49888 - DNA, 31 bp, Homo sapiens; identical to SEQ ID NO: 18842
  chr11:66706996-66707027
  hypo

SEQ ID NO: 49889 - DNA, 45 bp, Homo sapiens; identical to SEQ ID NO: 18843
  chr11:66710159-66710204
  hypo

SEQ ID NO: 49890 - DNA, 31 bp, Homo sapiens; identical to SEQ ID NO: 18844
  chr11:66718615-66718646
  hypo

SEQ ID NO: 49891 - DNA, 31 bp, Homo sapiens; identical to SEQ ID NO: 18845
  chr11:66744189-66744220
  hypo

SEQ ID NO: 49892 - DNA, 31 bp, Homo sapiens; identical to SEQ ID NO: 18846
  chr11:66749830-66749861
  hypo

SEQ ID NO: 49893 - DNA, 31 bp, Homo sapiens; identical to SEQ ID NO: 18848
  chr11:66817389-66817420
  hypo

SEQ ID NO: 49894 - DNA, 61 bp, Homo sapiens; identical to SEQ ID NO: 4339
  chr11:66886094-66886155
  hypo

SEQ ID NO: 49895 - DNA, 31 bp, Homo sapiens; identical to SEQ ID NO: 18850
  chr11:67051192-67051223
  hypo

SEQ ID NO: 49896 - DNA, 31 bp, Homo sapiens; identical to SEQ ID NO: 18851
  chr11:67051239-67051270
  hypo

SEQ ID NO: 49897 - DNA, 2 bp, Homo sapiens
  chr11:67072100-67072102
  hypo
tc

SEQ ID NO: 49898 - DNA, 37 bp, Homo sapiens; identical to SEQ ID NO: 18855
  chr11:67150730-67150767
  hypo

SEQ ID NO: 49899 - DNA, 64 bp, Homo sapiens; identical to SEQ ID NO: 18856
  chr11:67203569-67203633
  hypo

SEQ ID NO: 49900 - DNA, 35 bp, Homo sapiens; identical to SEQ ID NO: 18857
  chr11:67208821-67208856
  hypo

SEQ ID NO: 49901 - DNA, 95 bp, Homo sapiens; identical to SEQ ID NO: 4342
  chr11:67210850-67210945
  hypo

SEQ ID NO: 49902 - DNA, 42 bp, Homo sapiens; identical to SEQ ID NO: 4343
  chr11:67210962-67211004
  hypo

SEQ ID NO: 49903 - DNA, 31 bp, Homo sapiens; identical to SEQ ID NO: 18860
  chr11:67406910-67406941
  hypo

SEQ ID NO: 49904 - DNA, 31 bp, Homo sapiens; identical to SEQ ID NO: 18861
  chr11:67430154-67430185
  hypo

SEQ ID NO: 49905 - DNA, 31 bp, Homo sapiens; identical to SEQ ID NO: 18862
  chr11:67430257-67430288
  hypo

SEQ ID NO: 49906 - DNA, 41 bp, Homo sapiens; identical to SEQ ID NO: 18863
  chr11:67430298-67430339
  hypo

SEQ ID NO: 49907 - DNA, 31 bp, Homo sapiens; identical to SEQ ID NO: 18864
  chr11:67431647-67431678
  hypo

SEQ ID NO: 49908 - DNA, 42 bp, Homo sapiens; identical to SEQ ID NO: 18865
  chr11:67432664-67432706
  hypo

SEQ ID NO: 49909 - DNA, 31 bp, Homo sapiens; identical to SEQ ID NO: 18866
  chr11:67432757-67432788
  hypo

SEQ ID NO: 49910 - DNA, 67 bp, Homo sapiens; identical to SEQ ID NO: 18867
  chr11:67432865-67432932
  hypo

SEQ ID NO: 49911 - DNA, 2 bp, Homo sapiens
  chr11:67764061-67764063
  hypo
gc

SEQ ID NO: 49912 - DNA, 37 bp, Homo sapiens; identical to SEQ ID NO: 18870
  chr11:67764344-67764381
  hypo

SEQ ID NO: 49913 - DNA, 31 bp, Homo sapiens; identical to SEQ ID NO: 4346
  chr11:67777601-67777632
  hypo

SEQ ID NO: 49914 - DNA, 31 bp, Homo sapiens; identical to SEQ ID NO: 18873
  chr11:67795519-67795550
  hypo

SEQ ID NO: 49915 - DNA, 31 bp, Homo sapiens; identical to SEQ ID NO: 18874
  chr11:67795576-67795607
  hypo

SEQ ID NO: 49916 - DNA, 73 bp, Homo sapiens; identical to SEQ ID NO: 18875
  chr11:67808796-67808869
  hypo

SEQ ID NO: 49917 - DNA, 66 bp, Homo sapiens; identical to SEQ ID NO: 18876
  chr11:67808888-67808954
  hypo

SEQ ID NO: 49918 - DNA, 31 bp, Homo sapiens; identical to SEQ ID NO: 18877
  chr11:67808956-67808987
  hypo

SEQ ID NO: 49919 - DNA, 31 bp, Homo sapiens; identical to SEQ ID NO: 18878
  chr11:67808990-67809021
  hypo

SEQ ID NO: 49920 - DNA, 31 bp, Homo sapiens; identical to SEQ ID NO: 18879
  chr11:67809064-67809095
  hypo

SEQ ID NO: 49921 - DNA, 30 bp, Homo sapiens; identical to SEQ ID NO: 18880
  chr11:67813259-67813289
  hypo

SEQ ID NO: 49922 - DNA, 44 bp, Homo sapiens; identical to SEQ ID NO: 18882
  chr11:67984062-67984106
  hypo

SEQ ID NO: 49923 - DNA, 2 bp, Homo sapiens
  chr11:67984319-67984321
  hypo
cg

SEQ ID NO: 49924 - DNA, 111 bp, Homo sapiens; identical to SEQ ID NO: 4347
  chr11:68080103-68080214
  hypo

SEQ ID NO: 49925 - DNA, 131 bp, Homo sapiens; identical to SEQ ID NO: 4348
  chr11:68080740-68080871
  hypo

SEQ ID NO: 49926 - DNA, 31 bp, Homo sapiens; identical to SEQ ID NO: 18886
  chr11:68086448-68086479
  hypo

SEQ ID NO: 49927 - DNA, 31 bp, Homo sapiens; identical to SEQ ID NO: 18887
  chr11:68093171-68093202
  hypo

SEQ ID NO: 49928 - DNA, 31 bp, Homo sapiens; identical to SEQ ID NO: 18888
  chr11:68118342-68118373
  hypo

SEQ ID NO: 49929 - DNA, 55 bp, Homo sapiens; identical to SEQ ID NO: 18889
  chr11:68119116-68119171
  hypo

SEQ ID NO: 49930 - DNA, 37 bp, Homo sapiens; identical to SEQ ID NO: 18890
  chr11:68119211-68119248
  hypo

SEQ ID NO: 49931 - DNA, 45 bp, Homo sapiens; identical to SEQ ID NO: 18891
  chr11:68119251-68119296
  hypo

SEQ ID NO: 49932 - DNA, 31 bp, Homo sapiens; identical to SEQ ID NO: 18892
  chr11:68119795-68119826
  hypo

SEQ ID NO: 49933 - DNA, 31 bp, Homo sapiens; identical to SEQ ID NO: 18893
  chr11:68121252-68121283
  hypo

SEQ ID NO: 49934 - DNA, 31 bp, Homo sapiens; identical to SEQ ID NO: 18894
  chr11:68131492-68131523
  hypo

SEQ ID NO: 49935 - DNA, 31 bp, Homo sapiens; identical to SEQ ID NO: 18895
  chr11:68143934-68143965
  hypo

SEQ ID NO: 49936 - DNA, 31 bp, Homo sapiens; identical to SEQ ID NO: 18896
  chr11:68153339-68153370
  hypo

SEQ ID NO: 49937 - DNA, 34 bp, Homo sapiens; identical to SEQ ID NO: 18897
  chr11:68153382-68153416
  hypo

SEQ ID NO: 49938 - DNA, 39 bp, Homo sapiens; identical to SEQ ID NO: 18899
  chr11:68158779-68158818
  hypo

SEQ ID NO: 49939 - DNA, 55 bp, Homo sapiens; identical to SEQ ID NO: 18900
  chr11:68161388-68161443
  hypo

SEQ ID NO: 49940 - DNA, 31 bp, Homo sapiens; identical to SEQ ID NO: 18901
  chr11:68161457-68161488
  hypo

SEQ ID NO: 49941 - DNA, 31 bp, Homo sapiens; identical to SEQ ID NO: 18902
  chr11:68161613-68161644
  hypo

SEQ ID NO: 49942 - DNA, 48 bp, Homo sapiens; identical to SEQ ID NO: 18903
  chr11:68162350-68162398
  hypo

SEQ ID NO: 49943 - DNA, 32 bp, Homo sapiens; identical to SEQ ID NO: 18904
  chr11:68162464-68162496
  hypo

SEQ ID NO: 49944 - DNA, 34 bp, Homo sapiens; identical to SEQ ID NO: 18905
  chr11:68165098-68165132
  hypo

SEQ ID NO: 49945 - DNA, 31 bp, Homo sapiens; identical to SEQ ID NO: 18906
  chr11:68172055-68172086
  hypo

SEQ ID NO: 49946 - DNA, 81 bp, Homo sapiens; identical to SEQ ID NO: 18907
  chr11:68177517-68177598
  hypo

SEQ ID NO: 49947 - DNA, 35 bp, Homo sapiens; identical to SEQ ID NO: 18908
  chr11:68177610-68177645
  hypo

SEQ ID NO: 49948 - DNA, 31 bp, Homo sapiens; identical to SEQ ID NO: 18909
  chr11:68178044-68178075
  hypo

SEQ ID NO: 49949 - DNA, 69 bp, Homo sapiens; identical to SEQ ID NO: 18910
  chr11:68189964-68190033
  hypo

SEQ ID NO: 49950 - DNA, 44 bp, Homo sapiens; identical to SEQ ID NO: 18911
  chr11:68190241-68190285
  hypo

SEQ ID NO: 49951 - DNA, 31 bp, Homo sapiens; identical to SEQ ID NO: 18912
  chr11:68190309-68190340
  hypo

SEQ ID NO: 49952 - DNA, 40 bp, Homo sapiens; identical to SEQ ID NO: 18913
  chr11:68190456-68190496
  hypo

SEQ ID NO: 49953 - DNA, 58 bp, Homo sapiens; identical to SEQ ID NO: 18914
  chr11:68190546-68190604
  hypo

SEQ ID NO: 49954 - DNA, 80 bp, Homo sapiens; identical to SEQ ID NO: 18915
  chr11:68190853-68190933
  hypo

SEQ ID NO: 49955 - DNA, 31 bp, Homo sapiens; identical to SEQ ID NO: 18916
  chr11:68191211-68191242
  hypo

SEQ ID NO: 49956 - DNA, 51 bp, Homo sapiens; identical to SEQ ID NO: 18917
  chr11:68191536-68191587
  hypo

SEQ ID NO: 49957 - DNA, 31 bp, Homo sapiens; identical to SEQ ID NO: 18918
  chr11:68191634-68191665
  hypo

SEQ ID NO: 49958 - DNA, 54 bp, Homo sapiens; identical to SEQ ID NO: 18919
  chr11:68191675-68191729
  hypo

SEQ ID NO: 49959 - DNA, 31 bp, Homo sapiens; identical to SEQ ID NO: 18920
  chr11:68191769-68191800
  hypo

SEQ ID NO: 49960 - DNA, 53 bp, Homo sapiens; identical to SEQ ID NO: 18921
  chr11:68192526-68192579
  hypo

SEQ ID NO: 49961 - DNA, 50 bp, Homo sapiens; identical to SEQ ID NO: 18922
  chr11:68192581-68192631
  hypo

SEQ ID NO: 49962 - DNA, 43 bp, Homo sapiens; identical to SEQ ID NO: 18923
  chr11:68192707-68192750
  hypo

SEQ ID NO: 49963 - DNA, 31 bp, Homo sapiens; identical to SEQ ID NO: 18924
  chr11:68192959-68192990
  hypo

SEQ ID NO: 49964 - DNA, 31 bp, Homo sapiens; identical to SEQ ID NO: 18925
  chr11:68193065-68193096
  hypo

SEQ ID NO: 49965 - DNA, 31 bp, Homo sapiens; identical to SEQ ID NO: 18926
  chr11:68193463-68193494
  hypo

SEQ ID NO: 49966 - DNA, 35 bp, Homo sapiens; identical to SEQ ID NO: 18927
  chr11:68193511-68193546
  hypo

SEQ ID NO: 49967 - DNA, 36 bp, Homo sapiens; identical to SEQ ID NO: 18928
  chr11:68193581-68193617
  hypo

SEQ ID NO: 49968 - DNA, 31 bp, Homo sapiens; identical to SEQ ID NO: 18929
  chr11:68193642-68193673
  hypo

SEQ ID NO: 49969 - DNA, 31 bp, Homo sapiens; identical to SEQ ID NO: 18930
  chr11:68193684-68193715
  hypo

SEQ ID NO: 49970 - DNA, 31 bp, Homo sapiens; identical to SEQ ID NO: 18931
  chr11:68194429-68194460
  hypo

SEQ ID NO: 49971 - DNA, 42 bp, Homo sapiens; identical to SEQ ID NO: 18932
  chr11:68196104-68196146
  hypo

SEQ ID NO: 49972 - DNA, 78 bp, Homo sapiens; identical to SEQ ID NO: 18933
  chr11:68199349-68199427
  hypo

SEQ ID NO: 49973 - DNA, 101 bp, Homo sapiens; identical to SEQ ID NO: 18934
  chr11:68201208-68201309
  hypo

SEQ ID NO: 49974 - DNA, 121 bp, Homo sapiens; identical to SEQ ID NO: 18936
  chr11:68203468-68203589
  hypo

SEQ ID NO: 49975 - DNA, 63 bp, Homo sapiens; identical to SEQ ID NO: 18937
  chr11:68206025-68206088
  hypo

SEQ ID NO: 49976 - DNA, 31 bp, Homo sapiens; identical to SEQ ID NO: 18938
  chr11:68216739-68216770
  hypo

SEQ ID NO: 49977 - DNA, 96 bp, Homo sapiens; identical to SEQ ID NO: 18939
  chr11:68216771-68216867
  hypo

SEQ ID NO: 49978 - DNA, 30 bp, Homo sapiens
  chr11:68385503-68385533
  hypo
cccccatggcatgcaccgtggccccgggac

SEQ ID NO: 49979 - DNA, 34 bp, Homo sapiens; identical to SEQ ID NO: 18944
  chr11:68408312-68408346
  hypo

SEQ ID NO: 49980 - DNA, 37 bp, Homo sapiens; identical to SEQ ID NO: 18945
  chr11:68505094-68505131
  hypo

SEQ ID NO: 49981 - DNA, 31 bp, Homo sapiens; identical to SEQ ID NO: 18946
  chr11:68549944-68549975
  hypo

SEQ ID NO: 49982 - DNA, 2 bp, Homo sapiens
  chr11:68564344-68564346
  hypo
ca

SEQ ID NO: 49983 - DNA, 88 bp, Homo sapiens; identical to SEQ ID NO: 18948
  chr11:68727155-68727243
  hypo

SEQ ID NO: 49984 - DNA, 31 bp, Homo sapiens; identical to SEQ ID NO: 18949
  chr11:68728005-68728036
  hypo

SEQ ID NO: 49985 - DNA, 49 bp, Homo sapiens; identical to SEQ ID NO: 18950
  chr11:68728253-68728302
  hypo

SEQ ID NO: 49986 - DNA, 31 bp, Homo sapiens; identical to SEQ ID NO: 18951
  chr11:68747918-68747949
  hypo

SEQ ID NO: 49987 - DNA, 31 bp, Homo sapiens; identical to SEQ ID NO: 18952
  chr11:68785782-68785813
  hypo

SEQ ID NO: 49988 - DNA, 106 bp, Homo sapiens; identical to SEQ ID NO: 18953
  chr11:68838711-68838817
  hypo

SEQ ID NO: 49989 - DNA, 31 bp, Homo sapiens; identical to SEQ ID NO: 18954
  chr11:68838857-68838888
  hypo

SEQ ID NO: 49990 - DNA, 31 bp, Homo sapiens; identical to SEQ ID NO: 18955
  chr11:68968787-68968818
  hypo

SEQ ID NO: 49991 - DNA, 47 bp, Homo sapiens; identical to SEQ ID NO: 18956
  chr11:68968831-68968878
  hypo

SEQ ID NO: 49992 - DNA, 40 bp, Homo sapiens; identical to SEQ ID NO: 18957
  chr11:68968944-68968984
  hypo

SEQ ID NO: 49993 - DNA, 31 bp, Homo sapiens; identical to SEQ ID NO: 18958
  chr11:68970084-68970115
  hypo

SEQ ID NO: 49994 - DNA, 37 bp, Homo sapiens; identical to SEQ ID NO: 18959
  chr11:68972047-68972084
  hypo

SEQ ID NO: 49995 - DNA, 43 bp, Homo sapiens; identical to SEQ ID NO: 18960
  chr11:68972179-68972222
  hypo

SEQ ID NO: 49996 - DNA, 31 bp, Homo sapiens; identical to SEQ ID NO: 18961
  chr11:69464228-69464259
  hypo

SEQ ID NO: 49997 - DNA, 31 bp, Homo sapiens; identical to SEQ ID NO: 18962
  chr11:69593279-69593310
  hypo

SEQ ID NO: 49998 - DNA, 31 bp, Homo sapiens; identical to SEQ ID NO: 18963
  chr11:69593340-69593371
  hypo

SEQ ID NO: 49999 - DNA, 31 bp, Homo sapiens; identical to SEQ ID NO: 18964
  chr11:69944883-69944914
  hypo

SEQ ID NO: 50000 - DNA, 62 bp, Homo sapiens; identical to SEQ ID NO: 18965
  chr11:69946371-69946433
  hypo

SEQ ID NO: 50001 - DNA, 31 bp, Homo sapiens; identical to SEQ ID NO: 18966
  chr11:69960316-69960347
  hypo

SEQ ID NO: 50002 - DNA, 31 bp, Homo sapiens; identical to SEQ ID NO: 18967
  chr11:69972004-69972035
  hypo

SEQ ID NO: 50003 - DNA, 31 bp, Homo sapiens; identical to SEQ ID NO: 18968
  chr11:69977942-69977973
  hypo

SEQ ID NO: 50004 - DNA, 38 bp, Homo sapiens; identical to SEQ ID NO: 18969
  chr11:69978049-69978087
  hypo

SEQ ID NO: 50005 - DNA, 31 bp, Homo sapiens; identical to SEQ ID NO: 18970
  chr11:69978274-69978305
  hypo

SEQ ID NO: 50006 - DNA, 31 bp, Homo sapiens; identical to SEQ ID NO: 18971
  chr11:69979712-69979743
  hypo

SEQ ID NO: 50007 - DNA, 31 bp, Homo sapiens; identical to SEQ ID NO: 18972
  chr11:69995207-69995238
  hypo

SEQ ID NO: 50008 - DNA, 31 bp, Homo sapiens; identical to SEQ ID NO: 4352
  chr11:70016124-70016155
  hypo

SEQ ID NO: 50009 - DNA, 48 bp, Homo sapiens; identical to SEQ ID NO: 18974
  chr11:70020577-70020625
  hypo

SEQ ID NO: 50010 - DNA, 31 bp, Homo sapiens; identical to SEQ ID NO: 18975
  chr11:70269021-70269052
  hypo

SEQ ID NO: 50011 - DNA, 31 bp, Homo sapiens; identical to SEQ ID NO: 18977
  chr11:71192422-71192453
  hypo

SEQ ID NO: 50012 - DNA, 2 bp, Homo sapiens
  chr11:71192647-71192649
  hypo
ac

SEQ ID NO: 50013 - DNA, 31 bp, Homo sapiens; identical to SEQ ID NO: 18981
  chr11:71282210-71282241
  hypo

SEQ ID NO: 50014 - DNA, 31 bp, Homo sapiens; identical to SEQ ID NO: 18984
  chr11:71724723-71724754
  hypo

SEQ ID NO: 50015 - DNA, 45 bp, Homo sapiens; identical to SEQ ID NO: 18985
  chr11:71724760-71724805
  hypo

SEQ ID NO: 50016 - DNA, 50 bp, Homo sapiens; identical to SEQ ID NO: 18986
  chr11:72006578-72006628
  hypo

SEQ ID NO: 50017 - DNA, 31 bp, Homo sapiens; identical to SEQ ID NO: 18989
  chr11:72355681-72355712
  hypo

SEQ ID NO: 50018 - DNA, 31 bp, Homo sapiens; identical to SEQ ID NO: 18990
  chr11:72408212-72408243
  hypo

SEQ ID NO: 50019 - DNA, 52 bp, Homo sapiens; identical to SEQ ID NO: 18991
  chr11:72408276-72408328
  hypo

SEQ ID NO: 50020 - DNA, 69 bp, Homo sapiens; identical to SEQ ID NO: 18992
  chr11:72437782-72437851
  hypo

SEQ ID NO: 50021 - DNA, 36 bp, Homo sapiens; identical to SEQ ID NO: 18993
  chr11:72437854-72437890
  hypo

SEQ ID NO: 50022 - DNA, 2 bp, Homo sapiens
  chr11:72475676-72475678
  hypo
cc

SEQ ID NO: 50023 - DNA, 31 bp, Homo sapiens; identical to SEQ ID NO: 18995
  chr11:72475840-72475871
  hypo

SEQ ID NO: 50024 - DNA, 2 bp, Homo sapiens
  chr11:72532173-72532175
  hypo
cc

SEQ ID NO: 50025 - DNA, 2 bp, Homo sapiens
  chr11:72532612-72532614
  hypo
cg

SEQ ID NO: 50026 - DNA, 39 bp, Homo sapiens; identical to SEQ ID NO: 19000
  chr11:73057917-73057956
  hypo

SEQ ID NO: 50027 - DNA, 31 bp, Homo sapiens; identical to SEQ ID NO: 19001
  chr11:73068913-73068944
  hypo

SEQ ID NO: 50028 - DNA, 31 bp, Homo sapiens; identical to SEQ ID NO: 19002
  chr11:73093211-73093242
  hypo

SEQ ID NO: 50029 - DNA, 49 bp, Homo sapiens; identical to SEQ ID NO: 19003
  chr11:73093255-73093304
  hypo

SEQ ID NO: 50030 - DNA, 2 bp, Homo sapiens
  chr11:73310291-73310293
  hypo
tt

SEQ ID NO: 50031 - DNA, 31 bp, Homo sapiens; identical to SEQ ID NO: 19008
  chr11:73491597-73491628
  hypo

SEQ ID NO: 50032 - DNA, 6 bp, Homo sapiens
  chr11:73663115-73663121
  hypo
cttacc

SEQ ID NO: 50033 - DNA, 2 bp, Homo sapiens
  chr11:73883501-73883503
  hypo
gt

SEQ ID NO: 50034 - DNA, 31 bp, Homo sapiens; identical to SEQ ID NO: 19013
  chr11:73883546-73883577
  hypo

SEQ ID NO: 50035 - DNA, 31 bp, Homo sapiens; identical to SEQ ID NO: 19014
  chr11:73883611-73883642
  hypo

SEQ ID NO: 50036 - DNA, 31 bp, Homo sapiens; identical to SEQ ID NO: 19015
  chr11:73883649-73883680
  hypo

SEQ ID NO: 50037 - DNA, 31 bp, Homo sapiens; identical to SEQ ID NO: 19017
  chr11:74136875-74136906
  hypo

SEQ ID NO: 50038 - DNA, 45 bp, Homo sapiens; identical to SEQ ID NO: 19018
  chr11:74168143-74168188
  hypo

SEQ ID NO: 50039 - DNA, 49 bp, Homo sapiens; identical to SEQ ID NO: 19019
  chr11:74168434-74168483
  hypo

SEQ ID NO: 50040 - DNA, 31 bp, Homo sapiens; identical to SEQ ID NO: 19020
  chr11:74168497-74168528
  hypo

SEQ ID NO: 50041 - DNA, 31 bp, Homo sapiens; identical to SEQ ID NO: 19021
  chr11:74246353-74246384
  hypo

SEQ ID NO: 50042 - DNA, 17 bp, Homo sapiens
  chr11:74246624-74246641
  hypo
attacgggtatgagcca

SEQ ID NO: 50043 - DNA, 31 bp, Homo sapiens; identical to SEQ ID NO: 19023
  chr11:74264083-74264114
  hypo

SEQ ID NO: 50044 - DNA, 50 bp, Homo sapiens; identical to SEQ ID NO: 19024
  chr11:74424485-74424535
  hypo

SEQ ID NO: 50045 - DNA, 31 bp, Homo sapiens; identical to SEQ ID NO: 19025
  chr11:74424549-74424580
  hypo

SEQ ID NO: 50046 - DNA, 31 bp, Homo sapiens; identical to SEQ ID NO: 19026
  chr11:74424613-74424644
  hypo

SEQ ID NO: 50047 - DNA, 31 bp, Homo sapiens; identical to SEQ ID NO: 19027
  chr11:74424652-74424683
  hypo

SEQ ID NO: 50048 - DNA, 31 bp, Homo sapiens; identical to SEQ ID NO: 19029
  chr11:74988583-74988614
  hypo

SEQ ID NO: 50049 - DNA, 31 bp, Homo sapiens; identical to SEQ ID NO: 19030
  chr11:74994441-74994472
  hypo

SEQ ID NO: 50050 - DNA, 78 bp, Homo sapiens; identical to SEQ ID NO: 19031
  chr11:74994474-74994552
  hypo

SEQ ID NO: 50051 - DNA, 65 bp, Homo sapiens; identical to SEQ ID NO: 19032
  chr11:74994558-74994623
  hypo

SEQ ID NO: 50052 - DNA, 31 bp, Homo sapiens; identical to SEQ ID NO: 19033
  chr11:74998667-74998698
  hypo

SEQ ID NO: 50053 - DNA, 31 bp, Homo sapiens; identical to SEQ ID NO: 19034
  chr11:74998711-74998742
  hypo

SEQ ID NO: 50054 - DNA, 68 bp, Homo sapiens; identical to SEQ ID NO: 19035
  chr11:75001249-75001317
  hypo

SEQ ID NO: 50055 - DNA, 31 bp, Homo sapiens; identical to SEQ ID NO: 19036
  chr11:75021190-75021221
  hypo

SEQ ID NO: 50056 - DNA, 31 bp, Homo sapiens; identical to SEQ ID NO: 19037
  chr11:75026126-75026157
  hypo

SEQ ID NO: 50057 - DNA, 31 bp, Homo sapiens; identical to SEQ ID NO: 19038
  chr11:75026191-75026222
  hypo

SEQ ID NO: 50058 - DNA, 53 bp, Homo sapiens; identical to SEQ ID NO: 19039
  chr11:75035740-75035793
  hypo

SEQ ID NO: 50059 - DNA, 430 bp, Homo sapiens; identical to SEQ ID NO: 4358
  chr11:75062272-75062702
  hypo

SEQ ID NO: 50060 - DNA, 70 bp, Homo sapiens; identical to SEQ ID NO: 4359
  chr11:75062708-75062778
  hypo

SEQ ID NO: 50061 - DNA, 181 bp, Homo sapiens; identical to SEQ ID NO: 4360
  chr11:75062806-75062987
  hypo

SEQ ID NO: 50062 - DNA, 41 bp, Homo sapiens; identical to SEQ ID NO: 19044
  chr11:75088629-75088670
  hypo

SEQ ID NO: 50063 - DNA, 31 bp, Homo sapiens; identical to SEQ ID NO: 19046
  chr11:75147837-75147868
  hypo

SEQ ID NO: 50064 - DNA, 31 bp, Homo sapiens; identical to SEQ ID NO: 4362
  chr11:75237128-75237159
  hypo

SEQ ID NO: 50065 - DNA, 51 bp, Homo sapiens; identical to SEQ ID NO: 19048
  chr11:75242018-75242069
  hypo

SEQ ID NO: 50066 - DNA, 52 bp, Homo sapiens; identical to SEQ ID NO: 19049
  chr11:75242094-75242146
  hypo

SEQ ID NO: 50067 - DNA, 70 bp, Homo sapiens; identical to SEQ ID NO: 19050
  chr11:75285549-75285619
  hypo

SEQ ID NO: 50068 - DNA, 31 bp, Homo sapiens; identical to SEQ ID NO: 19051
  chr11:75285683-75285714
  hypo

SEQ ID NO: 50069 - DNA, 31 bp, Homo sapiens; identical to SEQ ID NO: 19052
  chr11:75285721-75285752
  hypo

SEQ ID NO: 50070 - DNA, 31 bp, Homo sapiens; identical to SEQ ID NO: 19053
  chr11:75414896-75414927
  hypo

SEQ ID NO: 50071 - DNA, 2 bp, Homo sapiens
  chr11:75459472-75459474
  hypo
ac

SEQ ID NO: 50072 - DNA, 37 bp, Homo sapiens; identical to SEQ ID NO: 19056
  chr11:75799382-75799419
  hypo

SEQ ID NO: 50073 - DNA, 31 bp, Homo sapiens; identical to SEQ ID NO: 19057
  chr11:75882507-75882538
  hypo

SEQ ID NO: 50074 - DNA, 60 bp, Homo sapiens; identical to SEQ ID NO: 19058
  chr11:75882545-75882605
  hypo

SEQ ID NO: 50075 - DNA, 38 bp, Homo sapiens; identical to SEQ ID NO: 19059
  chr11:75882637-75882675
  hypo

SEQ ID NO: 50076 - DNA, 46 bp, Homo sapiens; identical to SEQ ID NO: 19060
  chr11:75993074-75993120
  hypo

SEQ ID NO: 50077 - DNA, 31 bp, Homo sapiens; identical to SEQ ID NO: 19061
  chr11:75993130-75993161
  hypo

SEQ ID NO: 50078 - DNA, 31 bp, Homo sapiens; identical to SEQ ID NO: 19062
  chr11:76001208-76001239
  hypo

SEQ ID NO: 50079 - DNA, 31 bp, Homo sapiens; identical to SEQ ID NO: 19063
  chr11:76010247-76010278
  hypo

SEQ ID NO: 50080 - DNA, 55 bp, Homo sapiens; identical to SEQ ID NO: 19064
  chr11:76315099-76315154
  hypo

SEQ ID NO: 50081 - DNA, 31 bp, Homo sapiens; identical to SEQ ID NO: 19065
  chr11:76315155-76315186
  hypo

SEQ ID NO: 50082 - DNA, 31 bp, Homo sapiens; identical to SEQ ID NO: 19066
  chr11:76315202-76315233
  hypo

SEQ ID NO: 50083 - DNA, 31 bp, Homo sapiens; identical to SEQ ID NO: 19067
  chr11:76315260-76315291
  hypo

SEQ ID NO: 50084 - DNA, 2 bp, Homo sapiens
  chr11:76382020-76382022
  hypo
gg

SEQ ID NO: 50085 - DNA, 48 bp, Homo sapiens; identical to SEQ ID NO: 19069
  chr11:76408272-76408320
  hypo

SEQ ID NO: 50086 - DNA, 65 bp, Homo sapiens; identical to SEQ ID NO: 19070
  chr11:76408400-76408465
  hypo

SEQ ID NO: 50087 - DNA, 31 bp, Homo sapiens; identical to SEQ ID NO: 19071
  chr11:76450420-76450451
  hypo

SEQ ID NO: 50088 - DNA, 56 bp, Homo sapiens; identical to SEQ ID NO: 19072
  chr11:76463184-76463240
  hypo

SEQ ID NO: 50089 - DNA, 31 bp, Homo sapiens; identical to SEQ ID NO: 4368
  chr11:76466226-76466257
  hypo

SEQ ID NO: 50090 - DNA, 39 bp, Homo sapiens; identical to SEQ ID NO: 19074
  chr11:76506254-76506293
  hypo

SEQ ID NO: 50091 - DNA, 31 bp, Homo sapiens; identical to SEQ ID NO: 19075
  chr11:76506327-76506358
  hypo

SEQ ID NO: 50092 - DNA, 31 bp, Homo sapiens; identical to SEQ ID NO: 19076
  chr11:76506367-76506398
  hypo

SEQ ID NO: 50093 - DNA, 31 bp, Homo sapiens; identical to SEQ ID NO: 19077
  chr11:76507126-76507157
  hypo

SEQ ID NO: 50094 - DNA, 31 bp, Homo sapiens; identical to SEQ ID NO: 19078
  chr11:76516214-76516245
  hypo

SEQ ID NO: 50095 - DNA, 31 bp, Homo sapiens; identical to SEQ ID NO: 4372
  chr11:76682667-76682698
  hypo

SEQ ID NO: 50096 - DNA, 62 bp, Homo sapiens; identical to SEQ ID NO: 19081
  chr11:76905509-76905571
  hypo

SEQ ID NO: 50097 - DNA, 31 bp, Homo sapiens; identical to SEQ ID NO: 19082
  chr11:76905645-76905676
  hypo

SEQ ID NO: 50098 - DNA, 31 bp, Homo sapiens; identical to SEQ ID NO: 19083
  chr11:76910510-76910541
  hypo

SEQ ID NO: 50099 - DNA, 31 bp, Homo sapiens; identical to SEQ ID NO: 19084
  chr11:76912236-76912267
  hypo

SEQ ID NO: 50100 - DNA, 31 bp, Homo sapiens; identical to SEQ ID NO: 19085
  chr11:76924553-76924584
  hypo

SEQ ID NO: 50101 - DNA, 31 bp, Homo sapiens; identical to SEQ ID NO: 19086
  chr11:76924630-76924661
  hypo

SEQ ID NO: 50102 - DNA, 112 bp, Homo sapiens; identical to SEQ ID NO: 4373
  chr11:77184394-77184506
  hypo

SEQ ID NO: 50103 - DNA, 167 bp, Homo sapiens; identical to SEQ ID NO: 4374
  chr11:77184508-77184675
  hypo

SEQ ID NO: 50104 - DNA, 31 bp, Homo sapiens; identical to SEQ ID NO: 4375
  chr11:77184749-77184780
  hypo

SEQ ID NO: 50105 - DNA, 31 bp, Homo sapiens; identical to SEQ ID NO: 4378
  chr11:77184952-77184983
  hypo

SEQ ID NO: 50106 - DNA, 133 bp, Homo sapiens; identical to SEQ ID NO: 4379
  chr11:77185040-77185173
  hypo

SEQ ID NO: 50107 - DNA, 40 bp, Homo sapiens; identical to SEQ ID NO: 19092
  chr11:77383204-77383244
  hypo

SEQ ID NO: 50108 - DNA, 31 bp, Homo sapiens; identical to SEQ ID NO: 19094
  chr11:77728163-77728194
  hypo

SEQ ID NO: 50109 - DNA, 31 bp, Homo sapiens; identical to SEQ ID NO: 19095
  chr11:77883308-77883339
  hypo

SEQ ID NO: 50110 - DNA, 31 bp, Homo sapiens; identical to SEQ ID NO: 19097
  chr11:78984744-78984775
  hypo

SEQ ID NO: 50111 - DNA, 31 bp, Homo sapiens; identical to SEQ ID NO: 19098
  chr11:82843542-82843573
  hypo

SEQ ID NO: 50112 - DNA, 31 bp, Homo sapiens; identical to SEQ ID NO: 19101
  chr11:85319010-85319041
  hypo

SEQ ID NO: 50113 - DNA, 31 bp, Homo sapiens; identical to SEQ ID NO: 19103
  chr11:86218735-86218766
  hypo

SEQ ID NO: 50114 - DNA, 69 bp, Homo sapiens; identical to SEQ ID NO: 19104
  chr11:86408235-86408304
  hypo

SEQ ID NO: 50115 - DNA, 31 bp, Homo sapiens; identical to SEQ ID NO: 19105
  chr11:86408306-86408337
  hypo

SEQ ID NO: 50116 - DNA, 31 bp, Homo sapiens; identical to SEQ ID NO: 19106
  chr11:86408379-86408410
  hypo

SEQ ID NO: 50117 - DNA, 32 bp, Homo sapiens; identical to SEQ ID NO: 19107
  chr11:86464894-86464926
  hypo

SEQ ID NO: 50118 - DNA, 162 bp, Homo sapiens; identical to SEQ ID NO: 4384
  chr11:86511242-86511404
  hypo

SEQ ID NO: 50119 - DNA, 363 bp, Homo sapiens; identical to SEQ ID NO: 4385
  chr11:86511408-86511771
  hypo

SEQ ID NO: 50120 - DNA, 34 bp, Homo sapiens; identical to SEQ ID NO: 4386
  chr11:86511868-86511902
  hypo

SEQ ID NO: 50121 - DNA, 31 bp, Homo sapiens; identical to SEQ ID NO: 4387
  chr11:86511916-86511947
  hypo

SEQ ID NO: 50122 - DNA, 62 bp, Homo sapiens; identical to SEQ ID NO: 4388
  chr11:86511979-86512041
  hypo

SEQ ID NO: 50123 - DNA, 52 bp, Homo sapiens; identical to SEQ ID NO: 4390
  chr11:86666228-86666280
  hypo

SEQ ID NO: 50124 - DNA, 31 bp, Homo sapiens; identical to SEQ ID NO: 4391
  chr11:86666306-86666337
  hypo

SEQ ID NO: 50125 - DNA, 196 bp, Homo sapiens; identical to SEQ ID NO: 4392
  chr11:86666339-86666535
  hypo

SEQ ID NO: 50126 - DNA, 31 bp, Homo sapiens; identical to SEQ ID NO: 19116
  chr11:92648667-92648698
  hypo

SEQ ID NO: 50127 - DNA, 31 bp, Homo sapiens; identical to SEQ ID NO: 4393
  chr11:92931155-92931186
  hypo

SEQ ID NO: 50128 - DNA, 44 bp, Homo sapiens; identical to SEQ ID NO: 19118
  chr11:93065698-93065742
  hypo

SEQ ID NO: 50129 - DNA, 53 bp, Homo sapiens; identical to SEQ ID NO: 19119
  chr11:93065747-93065800
  hypo

SEQ ID NO: 50130 - DNA, 136 bp, Homo sapiens
  chr11:93476546-93476682
  hypo
attcctctgaccccttcgtgggtcttgcggctgcggtgcctcacttacttagcccacggctctcaactcctcgcgggagggggggcgcgagtgaatgaggcgggaactggagtgctggaagccacgaactccagtc

SEQ ID NO: 50131 - DNA, 31 bp, Homo sapiens; identical to SEQ ID NO: 19121
  chr11:94554946-94554977
  hypo

SEQ ID NO: 50132 - DNA, 34 bp, Homo sapiens; identical to SEQ ID NO: 4395
  chr11:95523018-95523052
  hypo

SEQ ID NO: 50133 - DNA, 39 bp, Homo sapiens; identical to SEQ ID NO: 19123
  chr11:95658583-95658622
  hypo

SEQ ID NO: 50134 - DNA, 32 bp, Homo sapiens
  chr11:95658677-95658709
  hypo
ggaataaaaatatctacgtaataggttgtttt

SEQ ID NO: 50135 - DNA, 31 bp, Homo sapiens; identical to SEQ ID NO: 19125
  chr11:95999750-95999781
  hypo

SEQ ID NO: 50136 - DNA, 31 bp, Homo sapiens; identical to SEQ ID NO: 19126
  chr11:101951409-101951440
  hypo

SEQ ID NO: 50137 - DNA, 31 bp, Homo sapiens; identical to SEQ ID NO: 19127
  chr11:101952328-101952359
  hypo

SEQ ID NO: 50138 - DNA, 31 bp, Homo sapiens; identical to SEQ ID NO: 19128
  chr11:101977377-101977408
  hypo

SEQ ID NO: 50139 - DNA, 31 bp, Homo sapiens; identical to SEQ ID NO: 19129
  chr11:102325404-102325435
  hypo

SEQ ID NO: 50140 - DNA, 59 bp, Homo sapiens; identical to SEQ ID NO: 4407
  chr11:108368878-108368937
  hypo

SEQ ID NO: 50141 - DNA, 53 bp, Homo sapiens; identical to SEQ ID NO: 4408
  chr11:108368986-108369039
  hypo

SEQ ID NO: 50142 - DNA, 141 bp, Homo sapiens; identical to SEQ ID NO: 4409
  chr11:108369108-108369249
  hypo

SEQ ID NO: 50143 - DNA, 40 bp, Homo sapiens; identical to SEQ ID NO: 19139
  chr11:109963224-109963264
  hypo

SEQ ID NO: 50144 - DNA, 31 bp, Homo sapiens; identical to SEQ ID NO: 19140
  chr11:109963349-109963380
  hypo

SEQ ID NO: 50145 - DNA, 2 bp, Homo sapiens
  chr11:111154358-111154360
  hypo
cc

SEQ ID NO: 50146 - DNA, 31 bp, Homo sapiens; identical to SEQ ID NO: 4416
  chr11:111945412-111945443
  hypo

SEQ ID NO: 50147 - DNA, 30 bp, Homo sapiens; identical to SEQ ID NO: 19147
  chr11:113752457-113752487
  hypo

SEQ ID NO: 50148 - DNA, 38 bp, Homo sapiens; identical to SEQ ID NO: 19149
  chr11:116365359-116365397
  hypo

SEQ ID NO: 50149 - DNA, 57 bp, Homo sapiens; identical to SEQ ID NO: 19150
  chr11:116591712-116591769
  hypo

SEQ ID NO: 50150 - DNA, 53 bp, Homo sapiens; identical to SEQ ID NO: 19151
  chr11:116591782-116591835
  hypo

SEQ ID NO: 50151 - DNA, 31 bp, Homo sapiens; identical to SEQ ID NO: 19152
  chr11:116591852-116591883
  hypo

SEQ ID NO: 50152 - DNA, 31 bp, Homo sapiens; identical to SEQ ID NO: 19154
  chr11:116672909-116672940
  hypo

SEQ ID NO: 50153 - DNA, 67 bp, Homo sapiens; identical to SEQ ID NO: 19155
  chr11:116691976-116692043
  hypo

SEQ ID NO: 50154 - DNA, 31 bp, Homo sapiens; identical to SEQ ID NO: 19156
  chr11:116692067-116692098
  hypo

SEQ ID NO: 50155 - DNA, 31 bp, Homo sapiens; identical to SEQ ID NO: 19159
  chr11:117068431-117068462
  hypo

SEQ ID NO: 50156 - DNA, 31 bp, Homo sapiens; identical to SEQ ID NO: 19160
  chr11:117068470-117068501
  hypo

SEQ ID NO: 50157 - DNA, 16 bp, Homo sapiens
  chr11:117068517-117068533
  hypo
gcagtgctccctgatg

SEQ ID NO: 50158 - DNA, 31 bp, Homo sapiens; identical to SEQ ID NO: 19162
  chr11:117097880-117097911
  hypo

SEQ ID NO: 50159 - DNA, 81 bp, Homo sapiens; identical to SEQ ID NO: 19163
  chr11:117097915-117097996
  hypo

SEQ ID NO: 50160 - DNA, 262 bp, Homo sapiens; identical to SEQ ID NO: 4421
  chr11:117186648-117186910
  hypo

SEQ ID NO: 50161 - DNA, 34 bp, Homo sapiens; identical to SEQ ID NO: 19165
  chr11:117380435-117380469
  hypo

SEQ ID NO: 50162 - DNA, 31 bp, Homo sapiens; identical to SEQ ID NO: 19166
  chr11:117380512-117380543
  hypo

SEQ ID NO: 50163 - DNA, 41 bp, Homo sapiens; identical to SEQ ID NO: 19167
  chr11:117380593-117380634
  hypo

SEQ ID NO: 50164 - DNA, 31 bp, Homo sapiens; identical to SEQ ID NO: 19168
  chr11:117941634-117941665
  hypo

SEQ ID NO: 50165 - DNA, 33 bp, Homo sapiens; identical to SEQ ID NO: 19169
  chr11:117977481-117977514
  hypo

SEQ ID NO: 50166 - DNA, 37 bp, Homo sapiens; identical to SEQ ID NO: 19170
  chr11:117994511-117994548
  hypo

SEQ ID NO: 50167 - DNA, 31 bp, Homo sapiens; identical to SEQ ID NO: 19171
  chr11:118088741-118088772
  hypo

SEQ ID NO: 50168 - DNA, 31 bp, Homo sapiens; identical to SEQ ID NO: 19172
  chr11:118193731-118193762
  hypo

SEQ ID NO: 50169 - DNA, 34 bp, Homo sapiens; identical to SEQ ID NO: 4427
  chr11:118662850-118662884
  hypo

SEQ ID NO: 50170 - DNA, 31 bp, Homo sapiens; identical to SEQ ID NO: 4428
  chr11:118662982-118663013
  hypo

SEQ ID NO: 50171 - DNA, 45 bp, Homo sapiens; identical to SEQ ID NO: 19175
  chr11:118772065-118772110
  hypo

SEQ ID NO: 50172 - DNA, 31 bp, Homo sapiens; identical to SEQ ID NO: 19176
  chr11:118780997-118781028
  hypo

SEQ ID NO: 50173 - DNA, 31 bp, Homo sapiens; identical to SEQ ID NO: 19177
  chr11:118983356-118983387
  hypo

SEQ ID NO: 50174 - DNA, 41 bp, Homo sapiens; identical to SEQ ID NO: 19178
  chr11:119019635-119019676
  hypo

SEQ ID NO: 50175 - DNA, 31 bp, Homo sapiens; identical to SEQ ID NO: 19179
  chr11:119029537-119029568
  hypo

SEQ ID NO: 50176 - DNA, 31 bp, Homo sapiens; identical to SEQ ID NO: 19180
  chr11:119032604-119032635
  hypo

SEQ ID NO: 50177 - DNA, 31 bp, Homo sapiens; identical to SEQ ID NO: 19181
  chr11:119058471-119058502
  hypo

SEQ ID NO: 50178 - DNA, 31 bp, Homo sapiens; identical to SEQ ID NO: 19182
  chr11:119058917-119058948
  hypo

SEQ ID NO: 50179 - DNA, 31 bp, Homo sapiens; identical to SEQ ID NO: 19183
  chr11:119216683-119216714
  hypo

SEQ ID NO: 50180 - DNA, 31 bp, Homo sapiens; identical to SEQ ID NO: 19184
  chr11:119243047-119243078
  hypo

SEQ ID NO: 50181 - DNA, 31 bp, Homo sapiens; identical to SEQ ID NO: 19185
  chr11:119243135-119243166
  hypo

SEQ ID NO: 50182 - DNA, 38 bp, Homo sapiens; identical to SEQ ID NO: 19186
  chr11:119243174-119243212
  hypo

SEQ ID NO: 50183 - DNA, 31 bp, Homo sapiens; identical to SEQ ID NO: 19187
  chr11:119243325-119243356
  hypo

SEQ ID NO: 50184 - DNA, 77 bp, Homo sapiens; identical to SEQ ID NO: 19188
  chr11:119244099-119244176
  hypo

SEQ ID NO: 50185 - DNA, 31 bp, Homo sapiens; identical to SEQ ID NO: 19189
  chr11:119244259-119244290
  hypo

SEQ ID NO: 50186 - DNA, 31 bp, Homo sapiens; identical to SEQ ID NO: 19190
  chr11:119286647-119286678
  hypo

SEQ ID NO: 50187 - DNA, 31 bp, Homo sapiens; identical to SEQ ID NO: 19191
  chr11:119287463-119287494
  hypo

SEQ ID NO: 50188 - DNA, 56 bp, Homo sapiens; identical to SEQ ID NO: 19192
  chr11:119352935-119352991
  hypo

SEQ ID NO: 50189 - DNA, 31 bp, Homo sapiens; identical to SEQ ID NO: 19193
  chr11:119405864-119405895
  hypo

SEQ ID NO: 50190 - DNA, 31 bp, Homo sapiens; identical to SEQ ID NO: 19194
  chr11:119493274-119493305
  hypo

SEQ ID NO: 50191 - DNA, 31 bp, Homo sapiens; identical to SEQ ID NO: 19195
  chr11:119493729-119493760
  hypo

SEQ ID NO: 50192 - DNA, 36 bp, Homo sapiens
  chr11:119524226-119524262
  hypo
ctggtgggtcgtggtgcgagacgacgtcaatcagag

SEQ ID NO: 50193 - DNA, 31 bp, Homo sapiens; identical to SEQ ID NO: 19197
  chr11:119532000-119532031
  hypo

SEQ ID NO: 50194 - DNA, 47 bp, Homo sapiens; identical to SEQ ID NO: 19198
  chr11:119532427-119532474
  hypo

SEQ ID NO: 50195 - DNA, 106 bp, Homo sapiens; identical to SEQ ID NO: 19199
  chr11:119535583-119535689
  hypo

SEQ ID NO: 50196 - DNA, 44 bp, Homo sapiens; identical to SEQ ID NO: 19200
  chr11:119535941-119535985
  hypo

SEQ ID NO: 50197 - DNA, 31 bp, Homo sapiens; identical to SEQ ID NO: 19201
  chr11:119536027-119536058
  hypo

SEQ ID NO: 50198 - DNA, 37 bp, Homo sapiens; identical to SEQ ID NO: 19202
  chr11:119541000-119541037
  hypo

SEQ ID NO: 50199 - DNA, 31 bp, Homo sapiens; identical to SEQ ID NO: 19203
  chr11:119541073-119541104
  hypo

SEQ ID NO: 50200 - DNA, 31 bp, Homo sapiens; identical to SEQ ID NO: 19204
  chr11:119541113-119541144
  hypo

SEQ ID NO: 50201 - DNA, 31 bp, Homo sapiens; identical to SEQ ID NO: 19205
  chr11:119541698-119541729
  hypo

SEQ ID NO: 50202 - DNA, 31 bp, Homo sapiens; identical to SEQ ID NO: 19206
  chr11:119547317-119547348
  hypo

SEQ ID NO: 50203 - DNA, 31 bp, Homo sapiens; identical to SEQ ID NO: 19207
  chr11:119548208-119548239
  hypo

SEQ ID NO: 50204 - DNA, 57 bp, Homo sapiens; identical to SEQ ID NO: 19208
  chr11:119548254-119548311
  hypo

SEQ ID NO: 50205 - DNA, 31 bp, Homo sapiens; identical to SEQ ID NO: 19209
  chr11:119548508-119548539
  hypo

SEQ ID NO: 50206 - DNA, 31 bp, Homo sapiens; identical to SEQ ID NO: 19210
  chr11:119548554-119548585
  hypo

SEQ ID NO: 50207 - DNA, 52 bp, Homo sapiens; identical to SEQ ID NO: 19211
  chr11:119548608-119548660
  hypo

SEQ ID NO: 50208 - DNA, 81 bp, Homo sapiens; identical to SEQ ID NO: 19212
  chr11:119549115-119549196
  hypo

SEQ ID NO: 50209 - DNA, 110 bp, Homo sapiens; identical to SEQ ID NO: 19213
  chr11:119549200-119549310
  hypo

SEQ ID NO: 50210 - DNA, 31 bp, Homo sapiens; identical to SEQ ID NO: 19214
  chr11:119549861-119549892
  hypo

SEQ ID NO: 50211 - DNA, 31 bp, Homo sapiens; identical to SEQ ID NO: 19215
  chr11:119574676-119574707
  hypo

SEQ ID NO: 50212 - DNA, 39 bp, Homo sapiens; identical to SEQ ID NO: 19216
  chr11:119574757-119574796
  hypo

SEQ ID NO: 50213 - DNA, 31 bp, Homo sapiens; identical to SEQ ID NO: 19217
  chr11:119574824-119574855
  hypo

SEQ ID NO: 50214 - DNA, 74 bp, Homo sapiens; identical to SEQ ID NO: 19218
  chr11:119576249-119576323
  hypo

SEQ ID NO: 50215 - DNA, 31 bp, Homo sapiens; identical to SEQ ID NO: 19219
  chr11:119579304-119579335
  hypo

SEQ ID NO: 50216 - DNA, 34 bp, Homo sapiens; identical to SEQ ID NO: 4430
  chr11:119587837-119587871
  hypo

SEQ ID NO: 50217 - DNA, 51 bp, Homo sapiens; identical to SEQ ID NO: 4431
  chr11:119587875-119587926
  hypo

SEQ ID NO: 50218 - DNA, 136 bp, Homo sapiens; identical to SEQ ID NO: 4432
  chr11:119587931-119588067
  hypo

SEQ ID NO: 50219 - DNA, 31 bp, Homo sapiens; identical to SEQ ID NO: 19223
  chr11:119588119-119588150
  hypo

SEQ ID NO: 50220 - DNA, 31 bp, Homo sapiens; identical to SEQ ID NO: 19224
  chr11:119588397-119588428
  hypo

SEQ ID NO: 50221 - DNA, 50 bp, Homo sapiens; identical to SEQ ID NO: 19225
  chr11:119588449-119588499
  hypo

SEQ ID NO: 50222 - DNA, 52 bp, Homo sapiens; identical to SEQ ID NO: 19226
  chr11:119588504-119588556
  hypo

SEQ ID NO: 50223 - DNA, 31 bp, Homo sapiens; identical to SEQ ID NO: 19227
  chr11:119590697-119590728
  hypo

SEQ ID NO: 50224 - DNA, 31 bp, Homo sapiens; identical to SEQ ID NO: 4433
  chr11:119598324-119598355
  hypo

SEQ ID NO: 50225 - DNA, 104 bp, Homo sapiens; identical to SEQ ID NO: 4434
  chr11:119598366-119598470
  hypo

SEQ ID NO: 50226 - DNA, 31 bp, Homo sapiens; identical to SEQ ID NO: 4435
  chr11:119598481-119598512
  hypo

SEQ ID NO: 50227 - DNA, 57 bp, Homo sapiens; identical to SEQ ID NO: 4438
  chr11:119599093-119599150
  hypo

SEQ ID NO: 50228 - DNA, 166 bp, Homo sapiens; identical to SEQ ID NO: 4439
  chr11:119599159-119599325
  hypo

SEQ ID NO: 50229 - DNA, 58 bp, Homo sapiens; identical to SEQ ID NO: 4440
  chr11:119600031-119600089
  hypo

SEQ ID NO: 50230 - DNA, 31 bp, Homo sapiens; identical to SEQ ID NO: 19234
  chr11:119602221-119602252
  hypo

SEQ ID NO: 50231 - DNA, 31 bp, Homo sapiens; identical to SEQ ID NO: 19235
  chr11:119683416-119683447
  hypo

SEQ ID NO: 50232 - DNA, 59 bp, Homo sapiens; identical to SEQ ID NO: 19236
  chr11:119757772-119757831
  hypo

SEQ ID NO: 50233 - DNA, 31 bp, Homo sapiens; identical to SEQ ID NO: 19237
  chr11:119757872-119757903
  hypo

SEQ ID NO: 50234 - DNA, 31 bp, Homo sapiens; identical to SEQ ID NO: 19238
  chr11:120041662-120041693
  hypo

SEQ ID NO: 50235 - DNA, 31 bp, Homo sapiens; identical to SEQ ID NO: 19239
  chr11:120041709-120041740
  hypo

SEQ ID NO: 50236 - DNA, 62 bp, Homo sapiens; identical to SEQ ID NO: 19240
  chr11:120043748-120043810
  hypo

SEQ ID NO: 50237 - DNA, 59 bp, Homo sapiens; identical to SEQ ID NO: 19241
  chr11:120043843-120043902
  hypo

SEQ ID NO: 50238 - DNA, 31 bp, Homo sapiens; identical to SEQ ID NO: 19242
  chr11:120178423-120178454
  hypo

SEQ ID NO: 50239 - DNA, 31 bp, Homo sapiens; identical to SEQ ID NO: 4444
  chr11:120206517-120206548
  hypo

SEQ ID NO: 50240 - DNA, 31 bp, Homo sapiens; identical to SEQ ID NO: 19244
  chr11:120298674-120298705
  hypo

SEQ ID NO: 50241 - DNA, 31 bp, Homo sapiens; identical to SEQ ID NO: 19245
  chr11:120338502-120338533
  hypo

SEQ ID NO: 50242 - DNA, 37 bp, Homo sapiens; identical to SEQ ID NO: 19246
  chr11:120338583-120338620
  hypo

SEQ ID NO: 50243 - DNA, 44 bp, Homo sapiens; identical to SEQ ID NO: 19247
  chr11:120338639-120338683
  hypo

SEQ ID NO: 50244 - DNA, 2 bp, Homo sapiens
  chr11:120367602-120367604
  hypo
tc

SEQ ID NO: 50245 - DNA, 36 bp, Homo sapiens; identical to SEQ ID NO: 19249
  chr11:120950503-120950539
  hypo

SEQ ID NO: 50246 - DNA, 2 bp, Homo sapiens
  chr11:121000903-121000905
  hypo
ga

SEQ ID NO: 50247 - DNA, 2 bp, Homo sapiens
  chr11:121023610-121023612
  hypo
gc

SEQ ID NO: 50248 - DNA, 31 bp, Homo sapiens; identical to SEQ ID NO: 19253
  chr11:121517066-121517097
  hypo

SEQ ID NO: 50249 - DNA, 31 bp, Homo sapiens; identical to SEQ ID NO: 19254
  chr11:122933146-122933177
  hypo

SEQ ID NO: 50250 - DNA, 40 bp, Homo sapiens; identical to SEQ ID NO: 19255
  chr11:123027336-123027376
  hypo

SEQ ID NO: 50251 - DNA, 31 bp, Homo sapiens; identical to SEQ ID NO: 4447
  chr11:123084067-123084098
  hypo

SEQ ID NO: 50252 - DNA, 31 bp, Homo sapiens; identical to SEQ ID NO: 4458
  chr11:123326582-123326613
  hypo

SEQ ID NO: 50253 - DNA, 31 bp, Homo sapiens; identical to SEQ ID NO: 19266
  chr11:125817157-125817188
  hypo

SEQ ID NO: 50254 - DNA, 42 bp, Homo sapiens; identical to SEQ ID NO: 19267
  chr11:125817623-125817665
  hypo

SEQ ID NO: 50255 - DNA, 31 bp, Homo sapiens; identical to SEQ ID NO: 19268
  chr11:125817778-125817809
  hypo

SEQ ID NO: 50256 - DNA, 79 bp, Homo sapiens; identical to SEQ ID NO: 19269
  chr11:125824156-125824235
  hypo

SEQ ID NO: 50257 - DNA, 31 bp, Homo sapiens; identical to SEQ ID NO: 19270
  chr11:125824304-125824335
  hypo

SEQ ID NO: 50258 - DNA, 31 bp, Homo sapiens; identical to SEQ ID NO: 19271
  chr11:125836034-125836065
  hypo

SEQ ID NO: 50259 - DNA, 31 bp, Homo sapiens; identical to SEQ ID NO: 19272
  chr11:125836293-125836324
  hypo

SEQ ID NO: 50260 - DNA, 31 bp, Homo sapiens; identical to SEQ ID NO: 19274
  chr11:125843433-125843464
  hypo

SEQ ID NO: 50261 - DNA, 31 bp, Homo sapiens; identical to SEQ ID NO: 19275
  chr11:125902448-125902479
  hypo

SEQ ID NO: 50262 - DNA, 57 bp, Homo sapiens; identical to SEQ ID NO: 19276
  chr11:125902513-125902570
  hypo

SEQ ID NO: 50263 - DNA, 48 bp, Homo sapiens; identical to SEQ ID NO: 19277
  chr11:125902579-125902627
  hypo

SEQ ID NO: 50264 - DNA, 45 bp, Homo sapiens; identical to SEQ ID NO: 4463
  chr11:125932493-125932538
  hypo

SEQ ID NO: 50265 - DNA, 186 bp, Homo sapiens; identical to SEQ ID NO: 4465
  chr11:125932556-125932742
  hypo

SEQ ID NO: 50266 - DNA, 125 bp, Homo sapiens; identical to SEQ ID NO: 4466
  chr11:125932778-125932903
  hypo

SEQ ID NO: 50267 - DNA, 88 bp, Homo sapiens; identical to SEQ ID NO: 4467
  chr11:125932904-125932992
  hypo

SEQ ID NO: 50268 - DNA, 31 bp, Homo sapiens; identical to SEQ ID NO: 4468
  chr11:125933297-125933328
  hypo

SEQ ID NO: 50269 - DNA, 41 bp, Homo sapiens; identical to SEQ ID NO: 19284
  chr11:125945775-125945816
  hypo

SEQ ID NO: 50270 - DNA, 43 bp, Homo sapiens; identical to SEQ ID NO: 19285
  chr11:125971128-125971171
  hypo

SEQ ID NO: 50271 - DNA, 72 bp, Homo sapiens; identical to SEQ ID NO: 19286
  chr11:125971174-125971246
  hypo

SEQ ID NO: 50272 - DNA, 36 bp, Homo sapiens; identical to SEQ ID NO: 19287
  chr11:125971290-125971326
  hypo

SEQ ID NO: 50273 - DNA, 31 bp, Homo sapiens; identical to SEQ ID NO: 19288
  chr11:125988782-125988813
  hypo

SEQ ID NO: 50274 - DNA, 31 bp, Homo sapiens; identical to SEQ ID NO: 19289
  chr11:126030446-126030477
  hypo

SEQ ID NO: 50275 - DNA, 99 bp, Homo sapiens; identical to SEQ ID NO: 19290
  chr11:126055440-126055539
  hypo

SEQ ID NO: 50276 - DNA, 31 bp, Homo sapiens; identical to SEQ ID NO: 19291
  chr11:126055545-126055576
  hypo

SEQ ID NO: 50277 - DNA, 2 bp, Homo sapiens
  chr11:126273041-126273043
  hypo
cc

SEQ ID NO: 50278 - DNA, 66 bp, Homo sapiens; identical to SEQ ID NO: 4469
  chr11:128392687-128392753
  hypo

SEQ ID NO: 50279 - DNA, 31 bp, Homo sapiens; identical to SEQ ID NO: 19308
  chr11:128634800-128634831
  hypo

SEQ ID NO: 50280 - DNA, 31 bp, Homo sapiens; identical to SEQ ID NO: 19309
  chr11:128634832-128634863
  hypo

SEQ ID NO: 50281 - DNA, 31 bp, Homo sapiens; identical to SEQ ID NO: 19310
  chr11:128737283-128737314
  hypo

SEQ ID NO: 50282 - DNA, 31 bp, Homo sapiens; identical to SEQ ID NO: 19311
  chr11:128781365-128781396
  hypo

SEQ ID NO: 50283 - DNA, 145 bp, Homo sapiens; identical to SEQ ID NO: 4486
  chr11:129148572-129148717
  hypo

SEQ ID NO: 50284 - DNA, 83 bp, Homo sapiens; identical to SEQ ID NO: 4487
  chr11:129148740-129148823
  hypo

SEQ ID NO: 50285 - DNA, 111 bp, Homo sapiens; identical to SEQ ID NO: 4488
  chr11:129148827-129148938
  hypo

SEQ ID NO: 50286 - DNA, 35 bp, Homo sapiens; identical to SEQ ID NO: 4489
  chr11:129149096-129149131
  hypo

SEQ ID NO: 50287 - DNA, 253 bp, Homo sapiens; identical to SEQ ID NO: 4490
  chr11:129149291-129149544
  hypo

SEQ ID NO: 50288 - DNA, 145 bp, Homo sapiens; identical to SEQ ID NO: 4491
  chr11:129149553-129149698
  hypo

SEQ ID NO: 50289 - DNA, 31 bp, Homo sapiens; identical to SEQ ID NO: 19318
  chr11:129207797-129207828
  hypo

SEQ ID NO: 50290 - DNA, 31 bp, Homo sapiens; identical to SEQ ID NO: 19321
  chr11:129324012-129324043
  hypo

SEQ ID NO: 50291 - DNA, 71 bp, Homo sapiens; identical to SEQ ID NO: 4493
  chr11:129765559-129765630
  hypo

SEQ ID NO: 50292 - DNA, 31 bp, Homo sapiens; identical to SEQ ID NO: 4494
  chr11:129765636-129765667
  hypo

SEQ ID NO: 50293 - DNA, 80 bp, Homo sapiens; identical to SEQ ID NO: 4495
  chr11:129765696-129765776
  hypo

SEQ ID NO: 50294 - DNA, 38 bp, Homo sapiens; identical to SEQ ID NO: 19325
  chr11:129785493-129785531
  hypo

SEQ ID NO: 50295 - DNA, 43 bp, Homo sapiens; identical to SEQ ID NO: 19326
  chr11:129785576-129785619
  hypo

SEQ ID NO: 50296 - DNA, 31 bp, Homo sapiens; identical to SEQ ID NO: 19327
  chr11:129849604-129849635
  hypo

SEQ ID NO: 50297 - DNA, 31 bp, Homo sapiens; identical to SEQ ID NO: 19329
  chr11:129897989-129898020
  hypo

SEQ ID NO: 50298 - DNA, 31 bp, Homo sapiens; identical to SEQ ID NO: 19331
  chr11:129994925-129994956
  hypo

SEQ ID NO: 50299 - DNA, 31 bp, Homo sapiens; identical to SEQ ID NO: 19332
  chr11:130005549-130005580
  hypo

SEQ ID NO: 50300 - DNA, 2 bp, Homo sapiens
  chr11:130060257-130060259
  hypo
ct

SEQ ID NO: 50301 - DNA, 31 bp, Homo sapiens; identical to SEQ ID NO: 19334
  chr11:130074762-130074793
  hypo

SEQ ID NO: 50302 - DNA, 31 bp, Homo sapiens; identical to SEQ ID NO: 19335
  chr11:130082174-130082205
  hypo

SEQ ID NO: 50303 - DNA, 31 bp, Homo sapiens; identical to SEQ ID NO: 4498
  chr11:130083143-130083174
  hypo

SEQ ID NO: 50304 - DNA, 65 bp, Homo sapiens; identical to SEQ ID NO: 19338
  chr11:130250619-130250684
  hypo

SEQ ID NO: 50305 - DNA, 31 bp, Homo sapiens; identical to SEQ ID NO: 19339
  chr11:130250704-130250735
  hypo

SEQ ID NO: 50306 - DNA, 31 bp, Homo sapiens; identical to SEQ ID NO: 19340
  chr11:130250762-130250793
  hypo

SEQ ID NO: 50307 - DNA, 45 bp, Homo sapiens; identical to SEQ ID NO: 19341
  chr11:130264260-130264305
  hypo

SEQ ID NO: 50308 - DNA, 31 bp, Homo sapiens; identical to SEQ ID NO: 19342
  chr11:130275555-130275586
  hypo

SEQ ID NO: 50309 - DNA, 45 bp, Homo sapiens; identical to SEQ ID NO: 19343
  chr11:130785376-130785421
  hypo

SEQ ID NO: 50310 - DNA, 2 bp, Homo sapiens
  chr11:130785457-130785459
  hypo
gc

SEQ ID NO: 50311 - DNA, 31 bp, Homo sapiens; identical to SEQ ID NO: 19346
  chr11:131794182-131794213
  hypo

SEQ ID NO: 50312 - DNA, 31 bp, Homo sapiens; identical to SEQ ID NO: 19347
  chr11:133735295-133735326
  hypo

SEQ ID NO: 50313 - DNA, 55 bp, Homo sapiens; identical to SEQ ID NO: 19348
  chr11:133795667-133795722
  hypo

SEQ ID NO: 50314 - DNA, 36 bp, Homo sapiens; identical to SEQ ID NO: 19349
  chr11:133800384-133800420
  hypo

SEQ ID NO: 50315 - DNA, 72 bp, Homo sapiens; identical to SEQ ID NO: 19350
  chr11:133805839-133805911
  hypo

SEQ ID NO: 50316 - DNA, 31 bp, Homo sapiens; identical to SEQ ID NO: 19351
  chr11:134015726-134015757
  hypo

SEQ ID NO: 50317 - DNA, 53 bp, Homo sapiens; identical to SEQ ID NO: 19352
  chr11:134027874-134027927
  hypo

SEQ ID NO: 50318 - DNA, 54 bp, Homo sapiens; identical to SEQ ID NO: 19353
  chr11:134212828-134212882
  hypo

SEQ ID NO: 50319 - DNA, 37 bp, Homo sapiens; identical to SEQ ID NO: 19354
  chr11:134252932-134252969
  hypo

SEQ ID NO: 50320 - DNA, 31 bp, Homo sapiens; identical to SEQ ID NO: 19355
  chr11:134260004-134260035
  hypo

SEQ ID NO: 50321 - DNA, 41 bp, Homo sapiens; identical to SEQ ID NO: 19356
  chr11:134378731-134378772
  hypo

SEQ ID NO: 50322 - DNA, 38 bp, Homo sapiens; identical to SEQ ID NO: 19357
  chr11:134378890-134378928
  hypo

SEQ ID NO: 50323 - DNA, 34 bp, Homo sapiens; identical to SEQ ID NO: 19359
  chr11:134534371-134534405
  hypo

SEQ ID NO: 50324 - DNA, 31 bp, Homo sapiens; identical to SEQ ID NO: 19360
  chr12:417386-417417
  hypo

SEQ ID NO: 50325 - DNA, 31 bp, Homo sapiens; identical to SEQ ID NO: 19361
  chr12:562775-562806
  hypo

SEQ ID NO: 50326 - DNA, 31 bp, Homo sapiens; identical to SEQ ID NO: 19362
  chr12:631679-631710
  hypo

SEQ ID NO: 50327 - DNA, 109 bp, Homo sapiens; identical to SEQ ID NO: 19364
  chr12:658732-658841
  hypo

SEQ ID NO: 50328 - DNA, 31 bp, Homo sapiens; identical to SEQ ID NO: 19365
  chr12:667261-667292
  hypo

SEQ ID NO: 50329 - DNA, 31 bp, Homo sapiens; identical to SEQ ID NO: 19366
  chr12:674437-674468
  hypo

SEQ ID NO: 50330 - DNA, 50 bp, Homo sapiens; identical to SEQ ID NO: 4504
  chr12:694939-694989
  hypo

SEQ ID NO: 50331 - DNA, 47 bp, Homo sapiens; identical to SEQ ID NO: 4505
  chr12:695005-695052
  hypo

SEQ ID NO: 50332 - DNA, 31 bp, Homo sapiens; identical to SEQ ID NO: 4506
  chr12:695118-695149
  hypo

SEQ ID NO: 50333 - DNA, 49 bp, Homo sapiens; identical to SEQ ID NO: 19370
  chr12:718309-718358
  hypo

SEQ ID NO: 50334 - DNA, 31 bp, Homo sapiens; identical to SEQ ID NO: 19371
  chr12:885904-885935
  hypo

SEQ ID NO: 50335 - DNA, 54 bp, Homo sapiens; identical to SEQ ID NO: 19372
  chr12:934132-934186
  hypo

SEQ ID NO: 50336 - DNA, 62 bp, Homo sapiens; identical to SEQ ID NO: 19373
  chr12:934234-934296
  hypo

SEQ ID NO: 50337 - DNA, 31 bp, Homo sapiens; identical to SEQ ID NO: 19374
  chr12:934308-934339
  hypo

SEQ ID NO: 50338 - DNA, 2 bp, Homo sapiens
  chr12:1079111-1079113
  hypo
ct

SEQ ID NO: 50339 - DNA, 2 bp, Homo sapiens
  chr12:1716716-1716718
  hypo
ca

SEQ ID NO: 50340 - DNA, 36 bp, Homo sapiens; identical to SEQ ID NO: 19380
  chr12:1766310-1766346
  hypo

SEQ ID NO: 50341 - DNA, 31 bp, Homo sapiens; identical to SEQ ID NO: 19381
  chr12:1980942-1980973
  hypo

SEQ ID NO: 50342 - DNA, 98 bp, Homo sapiens
  chr12:2017664-2017762
  hypo
cctcggcctctcccacgcggtgttggagggcgtgctaggattgcctccggtggagccccggccccgtttcctccacacgaccgggttcacacctgaac

SEQ ID NO: 50343 - DNA, 12 bp, Homo sapiens
  chr12:2017874-2017886
  hypo
caactcccacgc

SEQ ID NO: 50344 - DNA, 31 bp, Homo sapiens; identical to SEQ ID NO: 19383
  chr12:2046151-2046182
  hypo

SEQ ID NO: 50345 - DNA, 31 bp, Homo sapiens; identical to SEQ ID NO: 19384
  chr12:2047230-2047261
  hypo

SEQ ID NO: 50346 - DNA, 31 bp, Homo sapiens; identical to SEQ ID NO: 19385
  chr12:2048956-2048987
  hypo

SEQ ID NO: 50347 - DNA, 31 bp, Homo sapiens; identical to SEQ ID NO: 19388
  chr12:2516314-2516345
  hypo

SEQ ID NO: 50348 - DNA, 31 bp, Homo sapiens; identical to SEQ ID NO: 19389
  chr12:2632289-2632320
  hypo

SEQ ID NO: 50349 - DNA, 31 bp, Homo sapiens; identical to SEQ ID NO: 19395
  chr12:3116195-3116226
  hypo

SEQ ID NO: 50350 - DNA, 31 bp, Homo sapiens; identical to SEQ ID NO: 19396
  chr12:3118650-3118681
  hypo

SEQ ID NO: 50351 - DNA, 48 bp, Homo sapiens; identical to SEQ ID NO: 19397
  chr12:3118737-3118785
  hypo

SEQ ID NO: 50352 - DNA, 47 bp, Homo sapiens; identical to SEQ ID NO: 19398
  chr12:3118800-3118847
  hypo

SEQ ID NO: 50353 - DNA, 31 bp, Homo sapiens; identical to SEQ ID NO: 19399
  chr12:3119177-3119208
  hypo

SEQ ID NO: 50354 - DNA, 31 bp, Homo sapiens; identical to SEQ ID NO: 19400
  chr12:3129380-3129411
  hypo

SEQ ID NO: 50355 - DNA, 31 bp, Homo sapiens; identical to SEQ ID NO: 19401
  chr12:3129426-3129457
  hypo

SEQ ID NO: 50356 - DNA, 31 bp, Homo sapiens; identical to SEQ ID NO: 4522
  chr12:3129486-3129517
  hypo

SEQ ID NO: 50357 - DNA, 75 bp, Homo sapiens; identical to SEQ ID NO: 4523
  chr12:3129530-3129605
  hypo

SEQ ID NO: 50358 - DNA, 31 bp, Homo sapiens; identical to SEQ ID NO: 19404
  chr12:3131347-3131378
  hypo

SEQ ID NO: 50359 - DNA, 37 bp, Homo sapiens; identical to SEQ ID NO: 19405
  chr12:3147029-3147066
  hypo

SEQ ID NO: 50360 - DNA, 31 bp, Homo sapiens; identical to SEQ ID NO: 19406
  chr12:3181109-3181140
  hypo

SEQ ID NO: 50361 - DNA, 40 bp, Homo sapiens; identical to SEQ ID NO: 4526
  chr12:3186500-3186540
  hypo

SEQ ID NO: 50362 - DNA, 268 bp, Homo sapiens; identical to SEQ ID NO: 4527
  chr12:3186576-3186844
  hypo

SEQ ID NO: 50363 - DNA, 71 bp, Homo sapiens; identical to SEQ ID NO: 4528
  chr12:3186910-3186981
  hypo

SEQ ID NO: 50364 - DNA, 47 bp, Homo sapiens; identical to SEQ ID NO: 19410
  chr12:3215226-3215273
  hypo

SEQ ID NO: 50365 - DNA, 31 bp, Homo sapiens; identical to SEQ ID NO: 19411
  chr12:3266174-3266205
  hypo

SEQ ID NO: 50366 - DNA, 31 bp, Homo sapiens; identical to SEQ ID NO: 19413
  chr12:3292083-3292114
  hypo

SEQ ID NO: 50367 - DNA, 37 bp, Homo sapiens; identical to SEQ ID NO: 19414
  chr12:3302734-3302771
  hypo

SEQ ID NO: 50368 - DNA, 31 bp, Homo sapiens; identical to SEQ ID NO: 19415
  chr12:3302778-3302809
  hypo

SEQ ID NO: 50369 - DNA, 31 bp, Homo sapiens; identical to SEQ ID NO: 19416
  chr12:3302850-3302881
  hypo

SEQ ID NO: 50370 - DNA, 31 bp, Homo sapiens; identical to SEQ ID NO: 19417
  chr12:3302882-3302913
  hypo

SEQ ID NO: 50371 - DNA, 55 bp, Homo sapiens; identical to SEQ ID NO: 19418
  chr12:3316790-3316845
  hypo

SEQ ID NO: 50372 - DNA, 42 bp, Homo sapiens; identical to SEQ ID NO: 19419
  chr12:3316889-3316931
  hypo

SEQ ID NO: 50373 - DNA, 31 bp, Homo sapiens; identical to SEQ ID NO: 19420
  chr12:3316943-3316974
  hypo

SEQ ID NO: 50374 - DNA, 46 bp, Homo sapiens; identical to SEQ ID NO: 19421
  chr12:3333940-3333986
  hypo

SEQ ID NO: 50375 - DNA, 31 bp, Homo sapiens; identical to SEQ ID NO: 19423
  chr12:3361965-3361996
  hypo

SEQ ID NO: 50376 - DNA, 55 bp, Homo sapiens; identical to SEQ ID NO: 19424
  chr12:3370678-3370733
  hypo

SEQ ID NO: 50377 - DNA, 44 bp, Homo sapiens; identical to SEQ ID NO: 19425
  chr12:3370744-3370788
  hypo

SEQ ID NO: 50378 - DNA, 31 bp, Homo sapiens; identical to SEQ ID NO: 19426
  chr12:3389521-3389552
  hypo

SEQ ID NO: 50379 - DNA, 79 bp, Homo sapiens; identical to SEQ ID NO: 19427
  chr12:3389718-3389797
  hypo

SEQ ID NO: 50380 - DNA, 112 bp, Homo sapiens; identical to SEQ ID NO: 19428
  chr12:3390416-3390528
  hypo

SEQ ID NO: 50381 - DNA, 31 bp, Homo sapiens; identical to SEQ ID NO: 19429
  chr12:3392413-3392444
  hypo

SEQ ID NO: 50382 - DNA, 83 bp, Homo sapiens; identical to SEQ ID NO: 19430
  chr12:3392501-3392584
  hypo

SEQ ID NO: 50383 - DNA, 64 bp, Homo sapiens; identical to SEQ ID NO: 19431
  chr12:3392630-3392694
  hypo

SEQ ID NO: 50384 - DNA, 60 bp, Homo sapiens; identical to SEQ ID NO: 19432
  chr12:3409752-3409812
  hypo

SEQ ID NO: 50385 - DNA, 69 bp, Homo sapiens; identical to SEQ ID NO: 19433
  chr12:3409819-3409888
  hypo

SEQ ID NO: 50386 - DNA, 31 bp, Homo sapiens; identical to SEQ ID NO: 4531
  chr12:4377793-4377824
  hypo

SEQ ID NO: 50387 - DNA, 40 bp, Homo sapiens; identical to SEQ ID NO: 38273
  chr12:4377855-4377895
  hypo

SEQ ID NO: 50388 - DNA, 211 bp, Homo sapiens; identical to SEQ ID NO: 4539
  chr12:4378560-4378771
  hypo

SEQ ID NO: 50389 - DNA, 2 bp, Homo sapiens
  chr12:4378801-4378803
  hypo
tt

SEQ ID NO: 50390 - DNA, 86 bp, Homo sapiens; identical to SEQ ID NO: 4550
  chr12:4380199-4380285
  hypo

SEQ ID NO: 50391 - DNA, 2 bp, Homo sapiens
  chr12:5540931-5540933
  hypo
aa

SEQ ID NO: 50392 - DNA, 31 bp, Homo sapiens; identical to SEQ ID NO: 19453
  chr12:6185879-6185910
  hypo

SEQ ID NO: 50393 - DNA, 40 bp, Homo sapiens; identical to SEQ ID NO: 19455
  chr12:6220827-6220867
  hypo

SEQ ID NO: 50394 - DNA, 31 bp, Homo sapiens; identical to SEQ ID NO: 19456
  chr12:6247504-6247535
  hypo

SEQ ID NO: 50395 - DNA, 31 bp, Homo sapiens; identical to SEQ ID NO: 19458
  chr12:6284863-6284894
  hypo

SEQ ID NO: 50396 - DNA, 31 bp, Homo sapiens; identical to SEQ ID NO: 19459
  chr12:6284916-6284947
  hypo

SEQ ID NO: 50397 - DNA, 81 bp, Homo sapiens; identical to SEQ ID NO: 19460
  chr12:6294431-6294512
  hypo

SEQ ID NO: 50398 - DNA, 132 bp, Homo sapiens; identical to SEQ ID NO: 4571
  chr12:6309397-6309529
  hypo

SEQ ID NO: 50399 - DNA, 95 bp, Homo sapiens; identical to SEQ ID NO: 4572
  chr12:6309534-6309629
  hypo

SEQ ID NO: 50400 - DNA, 31 bp, Homo sapiens; identical to SEQ ID NO: 4573
  chr12:6309653-6309684
  hypo

SEQ ID NO: 50401 - DNA, 31 bp, Homo sapiens; identical to SEQ ID NO: 4574
  chr12:6309693-6309724
  hypo

SEQ ID NO: 50402 - DNA, 31 bp, Homo sapiens; identical to SEQ ID NO: 19465
  chr12:6350370-6350401
  hypo

SEQ ID NO: 50403 - DNA, 42 bp, Homo sapiens; identical to SEQ ID NO: 4578
  chr12:6387949-6387991
  hypo

SEQ ID NO: 50404 - DNA, 64 bp, Homo sapiens; identical to SEQ ID NO: 4579
  chr12:6388070-6388134
  hypo

SEQ ID NO: 50405 - DNA, 51 bp, Homo sapiens; identical to SEQ ID NO: 19469
  chr12:6422990-6423041
  hypo

SEQ ID NO: 50406 - DNA, 31 bp, Homo sapiens; identical to SEQ ID NO: 19470
  chr12:6425105-6425136
  hypo

SEQ ID NO: 50407 - DNA, 40 bp, Homo sapiens; identical to SEQ ID NO: 19471
  chr12:6425446-6425486
  hypo

SEQ ID NO: 50408 - DNA, 31 bp, Homo sapiens; identical to SEQ ID NO: 19472
  chr12:6425661-6425692
  hypo

SEQ ID NO: 50409 - DNA, 31 bp, Homo sapiens; identical to SEQ ID NO: 19473
  chr12:6464387-6464418
  hypo

SEQ ID NO: 50410 - DNA, 39 bp, Homo sapiens; identical to SEQ ID NO: 19474
  chr12:6464447-6464486
  hypo

SEQ ID NO: 50411 - DNA, 45 bp, Homo sapiens; identical to SEQ ID NO: 19475
  chr12:6464501-6464546
  hypo

SEQ ID NO: 50412 - DNA, 31 bp, Homo sapiens; identical to SEQ ID NO: 19476
  chr12:6475367-6475398
  hypo

SEQ ID NO: 50413 - DNA, 31 bp, Homo sapiens; identical to SEQ ID NO: 19477
  chr12:6490845-6490876
  hypo

SEQ ID NO: 50414 - DNA, 24 bp, Homo sapiens
  chr12:6493330-6493354
  hypo
cccacttcctgagctccgccatgg

SEQ ID NO: 50415 - DNA, 31 bp, Homo sapiens; identical to SEQ ID NO: 4583
  chr12:6493590-6493621
  hypo

SEQ ID NO: 50416 - DNA, 30 bp, Homo sapiens; identical to SEQ ID NO: 19480
  chr12:6516224-6516254
  hypo

SEQ ID NO: 50417 - DNA, 58 bp, Homo sapiens; identical to SEQ ID NO: 19481
  chr12:6637924-6637982
  hypo

SEQ ID NO: 50418 - DNA, 39 bp, Homo sapiens; identical to SEQ ID NO: 19482
  chr12:6749346-6749385
  hypo

SEQ ID NO: 50419 - DNA, 31 bp, Homo sapiens; identical to SEQ ID NO: 19483
  chr12:6757458-6757489
  hypo

SEQ ID NO: 50420 - DNA, 48 bp, Homo sapiens; identical to SEQ ID NO: 19484
  chr12:6868197-6868245
  hypo

SEQ ID NO: 50421 - DNA, 32 bp, Homo sapiens; identical to SEQ ID NO: 19485
  chr12:8180904-8180936
  hypo

SEQ ID NO: 50422 - DNA, 12 bp, Homo sapiens
  chr12:8386002-8386014
  hypo
cagccagcctcc

SEQ ID NO: 50423 - DNA, 31 bp, Homo sapiens; identical to SEQ ID NO: 19487
  chr12:8808504-8808535
  hypo

SEQ ID NO: 50424 - DNA, 31 bp, Homo sapiens; identical to SEQ ID NO: 19488
  chr12:8936108-8936139
  hypo

SEQ ID NO: 50425 - DNA, 31 bp, Homo sapiens; identical to SEQ ID NO: 19490
  chr12:9071260-9071291
  hypo

SEQ ID NO: 50426 - DNA, 31 bp, Homo sapiens; identical to SEQ ID NO: 19492
  chr12:9574344-9574375
  hypo

SEQ ID NO: 50427 - DNA, 2 bp, Homo sapiens
  chr12:10363277-10363279
  hypo
ca

SEQ ID NO: 50428 - DNA, 31 bp, Homo sapiens; identical to SEQ ID NO: 19494
  chr12:11720902-11720933
  hypo

SEQ ID NO: 50429 - DNA, 45 bp, Homo sapiens; identical to SEQ ID NO: 4593
  chr12:11801642-11801687
  hypo

SEQ ID NO: 50430 - DNA, 31 bp, Homo sapiens; identical to SEQ ID NO: 19496
  chr12:12208458-12208489
  hypo

SEQ ID NO: 50431 - DNA, 8 bp, Homo sapiens
  chr12:12504472-12504480
  hypo
ccattatt

SEQ ID NO: 50432 - DNA, 40 bp, Homo sapiens; identical to SEQ ID NO: 19498
  chr12:12605389-12605429
  hypo

SEQ ID NO: 50433 - DNA, 31 bp, Homo sapiens; identical to SEQ ID NO: 19499
  chr12:12764238-12764269
  hypo

SEQ ID NO: 50434 - DNA, 2 bp, Homo sapiens
  chr12:12848340-12848342
  hypo
gg

SEQ ID NO: 50435 - DNA, 2 bp, Homo sapiens
  chr12:13035994-13035996
  hypo
ac

SEQ ID NO: 50436 - DNA, 35 bp, Homo sapiens; identical to SEQ ID NO: 4599
  chr12:13069192-13069227
  hypo

SEQ ID NO: 50437 - DNA, 127 bp, Homo sapiens; identical to SEQ ID NO: 4602
  chr12:13153040-13153167
  hypo

SEQ ID NO: 50438 - DNA, 38 bp, Homo sapiens; identical to SEQ ID NO: 4603
  chr12:13153354-13153392
  hypo

SEQ ID NO: 50439 - DNA, 94 bp, Homo sapiens; identical to SEQ ID NO: 4604
  chr12:13154240-13154334
  hypo

SEQ ID NO: 50440 - DNA, 31 bp, Homo sapiens; identical to SEQ ID NO: 19513
  chr12:13173188-13173219
  hypo

SEQ ID NO: 50441 - DNA, 31 bp, Homo sapiens; identical to SEQ ID NO: 19514
  chr12:13173238-13173269
  hypo

SEQ ID NO: 50442 - DNA, 31 bp, Homo sapiens; identical to SEQ ID NO: 19515
  chr12:13173286-13173317
  hypo

SEQ ID NO: 50443 - DNA, 39 bp, Homo sapiens; identical to SEQ ID NO: 19516
  chr12:13173326-13173365
  hypo

SEQ ID NO: 50444 - DNA, 31 bp, Homo sapiens; identical to SEQ ID NO: 19517
  chr12:13173391-13173422
  hypo

SEQ ID NO: 50445 - DNA, 31 bp, Homo sapiens; identical to SEQ ID NO: 19519
  chr12:13222375-13222406
  hypo

SEQ ID NO: 50446 - DNA, 102 bp, Homo sapiens; identical to SEQ ID NO: 19520
  chr12:13222448-13222550
  hypo

SEQ ID NO: 50447 - DNA, 31 bp, Homo sapiens; identical to SEQ ID NO: 19521
  chr12:13237736-13237767
  hypo

SEQ ID NO: 50448 - DNA, 31 bp, Homo sapiens; identical to SEQ ID NO: 19522
  chr12:13237897-13237928
  hypo

SEQ ID NO: 50449 - DNA, 37 bp, Homo sapiens; identical to SEQ ID NO: 19523
  chr12:14469617-14469654
  hypo

SEQ ID NO: 50450 - DNA, 113 bp, Homo sapiens; identical to SEQ ID NO: 4607
  chr12:15941833-15941946
  hypo

SEQ ID NO: 50451 - DNA, 391 bp, Homo sapiens; identical to SEQ ID NO: 4608
  chr12:15941963-15942354
  hypo

SEQ ID NO: 50452 - DNA, 184 bp, Homo sapiens; identical to SEQ ID NO: 4609
  chr12:15942443-15942627
  hypo

SEQ ID NO: 50453 - DNA, 31 bp, Homo sapiens; identical to SEQ ID NO: 19529
  chr12:19260899-19260930
  hypo

SEQ ID NO: 50454 - DNA, 31 bp, Homo sapiens; identical to SEQ ID NO: 19530
  chr12:19261247-19261278
  hypo

SEQ ID NO: 50455 - DNA, 79 bp, Homo sapiens; identical to SEQ ID NO: 4610
  chr12:19282572-19282651
  hypo

SEQ ID NO: 50456 - DNA, 184 bp, Homo sapiens; identical to SEQ ID NO: 4611
  chr12:19282815-19282999
  hypo

SEQ ID NO: 50457 - DNA, 101 bp, Homo sapiens; identical to SEQ ID NO: 4613
  chr12:19283482-19283583
  hypo

SEQ ID NO: 50458 - DNA, 31 bp, Homo sapiens; identical to SEQ ID NO: 19537
  chr12:19459335-19459366
  hypo

SEQ ID NO: 50459 - DNA, 53 bp, Homo sapiens; identical to SEQ ID NO: 19538
  chr12:19459368-19459421
  hypo

SEQ ID NO: 50460 - DNA, 111 bp, Homo sapiens; identical to SEQ ID NO: 19539
  chr12:19459536-19459647
  hypo

SEQ ID NO: 50461 - DNA, 31 bp, Homo sapiens; identical to SEQ ID NO: 19541
  chr12:19497743-19497774
  hypo

SEQ ID NO: 50462 - DNA, 31 bp, Homo sapiens; identical to SEQ ID NO: 19542
  chr12:19512468-19512499
  hypo

SEQ ID NO: 50463 - DNA, 37 bp, Homo sapiens; identical to SEQ ID NO: 19544
  chr12:19539886-19539923
  hypo

SEQ ID NO: 50464 - DNA, 31 bp, Homo sapiens; identical to SEQ ID NO: 19546
  chr12:22529505-22529536
  hypo

SEQ ID NO: 50465 - DNA, 2 bp, Homo sapiens
  chr12:25101374-25101376
  hypo
tt

SEQ ID NO: 50466 - DNA, 39 bp, Homo sapiens; identical to SEQ ID NO: 4627
  chr12:25404450-25404489
  hypo

SEQ ID NO: 50467 - DNA, 47 bp, Homo sapiens; identical to SEQ ID NO: 4628
  chr12:25404551-25404598
  hypo

SEQ ID NO: 50468 - DNA, 31 bp, Homo sapiens; identical to SEQ ID NO: 19556
  chr12:26265814-26265845
  hypo

SEQ ID NO: 50469 - DNA, 31 bp, Homo sapiens; identical to SEQ ID NO: 19557
  chr12:26278876-26278907
  hypo

SEQ ID NO: 50470 - DNA, 31 bp, Homo sapiens; identical to SEQ ID NO: 4630
  chr12:27485803-27485834
  hypo

SEQ ID NO: 50471 - DNA, 31 bp, Homo sapiens; identical to SEQ ID NO: 19559
  chr12:27523815-27523846
  hypo

SEQ ID NO: 50472 - DNA, 31 bp, Homo sapiens; identical to SEQ ID NO: 19561
  chr12:27749980-27750011
  hypo

SEQ ID NO: 50473 - DNA, 31 bp, Homo sapiens; identical to SEQ ID NO: 19562
  chr12:29373866-29373897
  hypo

SEQ ID NO: 50474 - DNA, 15 bp, Homo sapiens
  chr12:29374085-29374100
  hypo
cgctttacctcttag

SEQ ID NO: 50475 - DNA, 46 bp, Homo sapiens; identical to SEQ ID NO: 19564
  chr12:29889830-29889876
  hypo

SEQ ID NO: 50476 - DNA, 31 bp, Homo sapiens; identical to SEQ ID NO: 19565
  chr12:30861037-30861068
  hypo

SEQ ID NO: 50477 - DNA, 52 bp, Homo sapiens; identical to SEQ ID NO: 19566
  chr12:30861077-30861129
  hypo

SEQ ID NO: 50478 - DNA, 50 bp, Homo sapiens; identical to SEQ ID NO: 19567
  chr12:30861178-30861228
  hypo

SEQ ID NO: 50479 - DNA, 31 bp, Homo sapiens; identical to SEQ ID NO: 19568
  chr12:31381945-31381976
  hypo

SEQ ID NO: 50480 - DNA, 31 bp, Homo sapiens; identical to SEQ ID NO: 19569
  chr12:31385501-31385532
  hypo

SEQ ID NO: 50481 - DNA, 37 bp, Homo sapiens; identical to SEQ ID NO: 19570
  chr12:31986809-31986846
  hypo

SEQ ID NO: 50482 - DNA, 31 bp, Homo sapiens; identical to SEQ ID NO: 19572
  chr12:32140941-32140972
  hypo

SEQ ID NO: 50483 - DNA, 2 bp, Homo sapiens
  chr12:32831139-32831141
  hypo
tt

SEQ ID NO: 50484 - DNA, 5 bp, Homo sapiens
  chr12:32831180-32831185
  hypo
ttttt

SEQ ID NO: 50485 - DNA, 31 bp, Homo sapiens; identical to SEQ ID NO: 19575
  chr12:32995456-32995487
  hypo

SEQ ID NO: 50486 - DNA, 31 bp, Homo sapiens; identical to SEQ ID NO: 4635
  chr12:33049889-33049920
  hypo

SEQ ID NO: 50487 - DNA, 57 bp, Homo sapiens; identical to SEQ ID NO: 38331
  chr12:33049945-33050002
  hypo

SEQ ID NO: 50488 - DNA, 50 bp, Homo sapiens; identical to SEQ ID NO: 4641
  chr12:40618248-40618298
  hypo

SEQ ID NO: 50489 - DNA, 31 bp, Homo sapiens; identical to SEQ ID NO: 19579
  chr12:42661936-42661967
  hypo

SEQ ID NO: 50490 - DNA, 80 bp, Homo sapiens; identical to SEQ ID NO: 4647
  chr12:48576996-48577076
  hypo

SEQ ID NO: 50491 - DNA, 72 bp, Homo sapiens; identical to SEQ ID NO: 4648
  chr12:48577359-48577431
  hypo

SEQ ID NO: 50492 - DNA, 36 bp, Homo sapiens; identical to SEQ ID NO: 38340
  chr12:48577434-48577470
  hypo

SEQ ID NO: 50493 - DNA, 33 bp, Homo sapiens; identical to SEQ ID NO: 19586
  chr12:48727660-48727693
  hypo

SEQ ID NO: 50494 - DNA, 31 bp, Homo sapiens; identical to SEQ ID NO: 19587
  chr12:48745137-48745168
  hypo

SEQ ID NO: 50495 - DNA, 31 bp, Homo sapiens; identical to SEQ ID NO: 19589
  chr12:49150047-49150078
  hypo

SEQ ID NO: 50496 - DNA, 70 bp, Homo sapiens; identical to SEQ ID NO: 4650
  chr12:49182446-49182516
  hypo

SEQ ID NO: 50497 - DNA, 54 bp, Homo sapiens; identical to SEQ ID NO: 4651
  chr12:49182531-49182585
  hypo

SEQ ID NO: 50498 - DNA, 56 bp, Homo sapiens; identical to SEQ ID NO: 4652
  chr12:49182603-49182659
  hypo

SEQ ID NO: 50499 - DNA, 94 bp, Homo sapiens; identical to SEQ ID NO: 4653
  chr12:49182688-49182782
  hypo

SEQ ID NO: 50500 - DNA, 51 bp, Homo sapiens; identical to SEQ ID NO: 4654
  chr12:49183195-49183246
  hypo

SEQ ID NO: 50501 - DNA, 31 bp, Homo sapiens; identical to SEQ ID NO: 4655
  chr12:49183299-49183330
  hypo

SEQ ID NO: 50502 - DNA, 60 bp, Homo sapiens; identical to SEQ ID NO: 4657
  chr12:49351295-49351355
  hypo

SEQ ID NO: 50503 - DNA, 95 bp, Homo sapiens; identical to SEQ ID NO: 4658
  chr12:49371750-49371845
  hypo

SEQ ID NO: 50504 - DNA, 31 bp, Homo sapiens; identical to SEQ ID NO: 19598
  chr12:49566959-49566990
  hypo

SEQ ID NO: 50505 - DNA, 49 bp, Homo sapiens; identical to SEQ ID NO: 4664
  chr12:49761540-49761589
  hypo

SEQ ID NO: 50506 - DNA, 31 bp, Homo sapiens; identical to SEQ ID NO: 4665
  chr12:49761771-49761802
  hypo

SEQ ID NO: 50507 - DNA, 31 bp, Homo sapiens; identical to SEQ ID NO: 4666
  chr12:49761811-49761842
  hypo

SEQ ID NO: 50508 - DNA, 48 bp, Homo sapiens; identical to SEQ ID NO: 19605
  chr12:50037802-50037850
  hypo

SEQ ID NO: 50509 - DNA, 31 bp, Homo sapiens; identical to SEQ ID NO: 19606
  chr12:50185745-50185776
  hypo

SEQ ID NO: 50510 - DNA, 31 bp, Homo sapiens; identical to SEQ ID NO: 19607
  chr12:50185863-50185894
  hypo

SEQ ID NO: 50511 - DNA, 31 bp, Homo sapiens; identical to SEQ ID NO: 19608
  chr12:50185897-50185928
  hypo

SEQ ID NO: 50512 - DNA, 39 bp, Homo sapiens; identical to SEQ ID NO: 19609
  chr12:50262262-50262301
  hypo

SEQ ID NO: 50513 - DNA, 31 bp, Homo sapiens; identical to SEQ ID NO: 19610
  chr12:50262514-50262545
  hypo

SEQ ID NO: 50514 - DNA, 41 bp, Homo sapiens; identical to SEQ ID NO: 19611
  chr12:50269010-50269051
  hypo

SEQ ID NO: 50515 - DNA, 31 bp, Homo sapiens; identical to SEQ ID NO: 19612
  chr12:50269082-50269113
  hypo

SEQ ID NO: 50516 - DNA, 34 bp, Homo sapiens; identical to SEQ ID NO: 19613
  chr12:50269170-50269204
  hypo

SEQ ID NO: 50517 - DNA, 47 bp, Homo sapiens; identical to SEQ ID NO: 19615
  chr12:50282792-50282839
  hypo

SEQ ID NO: 50518 - DNA, 31 bp, Homo sapiens; identical to SEQ ID NO: 19616
  chr12:50290502-50290533
  hypo

SEQ ID NO: 50519 - DNA, 31 bp, Homo sapiens; identical to SEQ ID NO: 19617
  chr12:50296426-50296457
  hypo

SEQ ID NO: 50520 - DNA, 86 bp, Homo sapiens; identical to SEQ ID NO: 19618
  chr12:50296486-50296572
  hypo

SEQ ID NO: 50521 - DNA, 31 bp, Homo sapiens; identical to SEQ ID NO: 19619
  chr12:50296580-50296611
  hypo

SEQ ID NO: 50522 - DNA, 31 bp, Homo sapiens; identical to SEQ ID NO: 19620
  chr12:50370399-50370430
  hypo

SEQ ID NO: 50523 - DNA, 109 bp, Homo sapiens; identical to SEQ ID NO: 19621
  chr12:50400183-50400292
  hypo

SEQ ID NO: 50524 - DNA, 31 bp, Homo sapiens; identical to SEQ ID NO: 19622
  chr12:50400294-50400325
  hypo

SEQ ID NO: 50525 - DNA, 51 bp, Homo sapiens; identical to SEQ ID NO: 19623
  chr12:50400366-50400417
  hypo

SEQ ID NO: 50526 - DNA, 31 bp, Homo sapiens; identical to SEQ ID NO: 19625
  chr12:50470988-50471019
  hypo

SEQ ID NO: 50527 - DNA, 31 bp, Homo sapiens; identical to SEQ ID NO: 19626
  chr12:50472154-50472185
  hypo

SEQ ID NO: 50528 - DNA, 31 bp, Homo sapiens; identical to SEQ ID NO: 19627
  chr12:50499947-50499978
  hypo

SEQ ID NO: 50529 - DNA, 43 bp, Homo sapiens; identical to SEQ ID NO: 4674
  chr12:50677370-50677413
  hypo

SEQ ID NO: 50530 - DNA, 31 bp, Homo sapiens; identical to SEQ ID NO: 19636
  chr12:51421649-51421680
  hypo

SEQ ID NO: 50531 - DNA, 51 bp, Homo sapiens; identical to SEQ ID NO: 19638
  chr12:51478164-51478215
  hypo

SEQ ID NO: 50532 - DNA, 31 bp, Homo sapiens; identical to SEQ ID NO: 19641
  chr12:51919653-51919684
  hypo

SEQ ID NO: 50533 - DNA, 38 bp, Homo sapiens; identical to SEQ ID NO: 4675
  chr12:52345763-52345801
  hypo

SEQ ID NO: 50534 - DNA, 35 bp, Homo sapiens; identical to SEQ ID NO: 19643
  chr12:52462475-52462510
  hypo

SEQ ID NO: 50535 - DNA, 2 bp, Homo sapiens
  chr12:52467637-52467639
  hypo
tt

SEQ ID NO: 50536 - DNA, 57 bp, Homo sapiens; identical to SEQ ID NO: 19645
  chr12:52477807-52477864
  hypo

SEQ ID NO: 50537 - DNA, 31 bp, Homo sapiens; identical to SEQ ID NO: 19646
  chr12:52539825-52539856
  hypo

SEQ ID NO: 50538 - DNA, 31 bp, Homo sapiens; identical to SEQ ID NO: 19647
  chr12:52566972-52567003
  hypo

SEQ ID NO: 50539 - DNA, 31 bp, Homo sapiens; identical to SEQ ID NO: 19648
  chr12:52567343-52567374
  hypo

SEQ ID NO: 50540 - DNA, 31 bp, Homo sapiens; identical to SEQ ID NO: 19649
  chr12:52567612-52567643
  hypo

SEQ ID NO: 50541 - DNA, 31 bp, Homo sapiens; identical to SEQ ID NO: 19650
  chr12:52635223-52635254
  hypo

SEQ ID NO: 50542 - DNA, 31 bp, Homo sapiens; identical to SEQ ID NO: 19651
  chr12:52742300-52742331
  hypo

SEQ ID NO: 50543 - DNA, 60 bp, Homo sapiens; identical to SEQ ID NO: 19652
  chr12:52750115-52750175
  hypo

SEQ ID NO: 50544 - DNA, 31 bp, Homo sapiens; identical to SEQ ID NO: 19653
  chr12:52793640-52793671
  hypo

SEQ ID NO: 50545 - DNA, 31 bp, Homo sapiens; identical to SEQ ID NO: 19654
  chr12:53183639-53183670
  hypo

SEQ ID NO: 50546 - DNA, 84 bp, Homo sapiens; identical to SEQ ID NO: 19655
  chr12:53214327-53214411
  hypo

SEQ ID NO: 50547 - DNA, 38 bp, Homo sapiens; identical to SEQ ID NO: 19656
  chr12:53214493-53214531
  hypo

SEQ ID NO: 50548 - DNA, 31 bp, Homo sapiens; identical to SEQ ID NO: 19657
  chr12:53215666-53215697
  hypo

SEQ ID NO: 50549 - DNA, 31 bp, Homo sapiens; identical to SEQ ID NO: 4676
  chr12:53272442-53272473
  hypo

SEQ ID NO: 50550 - DNA, 59 bp, Homo sapiens; identical to SEQ ID NO: 19659
  chr12:53547965-53548024
  hypo

SEQ ID NO: 50551 - DNA, 31 bp, Homo sapiens; identical to SEQ ID NO: 19660
  chr12:53641241-53641272
  hypo

SEQ ID NO: 50552 - DNA, 2 bp, Homo sapiens
  chr12:53662983-53662985
  hypo
ag

SEQ ID NO: 50553 - DNA, 24 bp, Homo sapiens
  chr12:53668185-53668209
  hypo
aactgaagcagctgcacgagggat

SEQ ID NO: 50554 - DNA, 31 bp, Homo sapiens; identical to SEQ ID NO: 19667
  chr12:53796887-53796918
  hypo

SEQ ID NO: 50555 - DNA, 31 bp, Homo sapiens; identical to SEQ ID NO: 19668
  chr12:53822881-53822912
  hypo

SEQ ID NO: 50556 - DNA, 44 bp, Homo sapiens; identical to SEQ ID NO: 19669
  chr12:53823276-53823320
  hypo

SEQ ID NO: 50557 - DNA, 27 bp, Homo sapiens
  chr12:53832349-53832376
  hypo
ccaagatcgtgccactgcactccagcc

SEQ ID NO: 50558 - DNA, 31 bp, Homo sapiens; identical to SEQ ID NO: 19673
  chr12:54051790-54051821
  hypo

SEQ ID NO: 50559 - DNA, 42 bp, Homo sapiens; identical to SEQ ID NO: 4694
  chr12:56390555-56390597
  hypo

SEQ ID NO: 50560 - DNA, 31 bp, Homo sapiens; identical to SEQ ID NO: 4695
  chr12:56390676-56390707
  hypo

SEQ ID NO: 50561 - DNA, 2 bp, Homo sapiens
  chr12:56441276-56441278
  hypo
aa

SEQ ID NO: 50562 - DNA, 43 bp, Homo sapiens; identical to SEQ ID NO: 4697
  chr12:56472776-56472819
  hypo

SEQ ID NO: 50563 - DNA, 60 bp, Homo sapiens; identical to SEQ ID NO: 19681
  chr12:56601394-56601454
  hypo

SEQ ID NO: 50564 - DNA, 70 bp, Homo sapiens; identical to SEQ ID NO: 19682
  chr12:56601473-56601543
  hypo

SEQ ID NO: 50565 - DNA, 31 bp, Homo sapiens; identical to SEQ ID NO: 4700
  chr12:56958137-56958168
  hypo

SEQ ID NO: 50566 - DNA, 31 bp, Homo sapiens; identical to SEQ ID NO: 19685
  chr12:57213866-57213897
  hypo

SEQ ID NO: 50567 - DNA, 31 bp, Homo sapiens; identical to SEQ ID NO: 19686
  chr12:57403584-57403615
  hypo

SEQ ID NO: 50568 - DNA, 31 bp, Homo sapiens; identical to SEQ ID NO: 19687
  chr12:57422731-57422762
  hypo

SEQ ID NO: 50569 - DNA, 31 bp, Homo sapiens; identical to SEQ ID NO: 19688
  chr12:57431636-57431667
  hypo

SEQ ID NO: 50570 - DNA, 43 bp, Homo sapiens; identical to SEQ ID NO: 19689
  chr12:57431669-57431712
  hypo

SEQ ID NO: 50571 - DNA, 31 bp, Homo sapiens; identical to SEQ ID NO: 19690
  chr12:57431714-57431745
  hypo

SEQ ID NO: 50572 - DNA, 75 bp, Homo sapiens; identical to SEQ ID NO: 19692
  chr12:57499241-57499316
  hypo

SEQ ID NO: 50573 - DNA, 31 bp, Homo sapiens; identical to SEQ ID NO: 19693
  chr12:57539050-57539081
  hypo

SEQ ID NO: 50574 - DNA, 31 bp, Homo sapiens; identical to SEQ ID NO: 19694
  chr12:57552057-57552088
  hypo

SEQ ID NO: 50575 - DNA, 46 bp, Homo sapiens; identical to SEQ ID NO: 19695
  chr12:57571126-57571172
  hypo

SEQ ID NO: 50576 - DNA, 36 bp, Homo sapiens; identical to SEQ ID NO: 19696
  chr12:57572147-57572183
  hypo

SEQ ID NO: 50577 - DNA, 31 bp, Homo sapiens; identical to SEQ ID NO: 19697
  chr12:57572885-57572916
  hypo

SEQ ID NO: 50578 - DNA, 31 bp, Homo sapiens; identical to SEQ ID NO: 19698
  chr12:57574072-57574103
  hypo

SEQ ID NO: 50579 - DNA, 31 bp, Homo sapiens; identical to SEQ ID NO: 19699
  chr12:57582407-57582438
  hypo

SEQ ID NO: 50580 - DNA, 31 bp, Homo sapiens; identical to SEQ ID NO: 19700
  chr12:57583523-57583554
  hypo

SEQ ID NO: 50581 - DNA, 31 bp, Homo sapiens; identical to SEQ ID NO: 19701
  chr12:57583577-57583608
  hypo

SEQ ID NO: 50582 - DNA, 31 bp, Homo sapiens; identical to SEQ ID NO: 19702
  chr12:57583612-57583643
  hypo

SEQ ID NO: 50583 - DNA, 59 bp, Homo sapiens; identical to SEQ ID NO: 19703
  chr12:57583647-57583706
  hypo

SEQ ID NO: 50584 - DNA, 31 bp, Homo sapiens; identical to SEQ ID NO: 19704
  chr12:57591466-57591497
  hypo

SEQ ID NO: 50585 - DNA, 42 bp, Homo sapiens; identical to SEQ ID NO: 19705
  chr12:57593154-57593196
  hypo

SEQ ID NO: 50586 - DNA, 31 bp, Homo sapiens; identical to SEQ ID NO: 19706
  chr12:57596872-57596903
  hypo

SEQ ID NO: 50587 - DNA, 70 bp, Homo sapiens; identical to SEQ ID NO: 19707
  chr12:57596952-57597022
  hypo

SEQ ID NO: 50588 - DNA, 31 bp, Homo sapiens; identical to SEQ ID NO: 19710
  chr12:57986078-57986109
  hypo

SEQ ID NO: 50589 - DNA, 31 bp, Homo sapiens; identical to SEQ ID NO: 4706
  chr12:59313599-59313630
  hypo

SEQ ID NO: 50590 - DNA, 42 bp, Homo sapiens; identical to SEQ ID NO: 4707
  chr12:59314238-59314280
  hypo

SEQ ID NO: 50591 - DNA, 31 bp, Homo sapiens; identical to SEQ ID NO: 19713
  chr12:63014932-63014963
  hypo

SEQ ID NO: 50592 - DNA, 31 bp, Homo sapiens; identical to SEQ ID NO: 19714
  chr12:63014964-63014995
  hypo

SEQ ID NO: 50593 - DNA, 42 bp, Homo sapiens; identical to SEQ ID NO: 19715
  chr12:63015048-63015090
  hypo

SEQ ID NO: 50594 - DNA, 2 bp, Homo sapiens
  chr12:63033700-63033702
  hypo
cc

SEQ ID NO: 50595 - DNA, 24 bp, Homo sapiens
  chr12:63195712-63195736
  hypo
gcgcagggaggctgcccgggtcag

SEQ ID NO: 50596 - DNA, 31 bp, Homo sapiens; identical to SEQ ID NO: 19718
  chr12:63318526-63318557
  hypo

SEQ ID NO: 50597 - DNA, 34 bp, Homo sapiens; identical to SEQ ID NO: 19719
  chr12:63397757-63397791
  hypo

SEQ ID NO: 50598 - DNA, 158 bp, Homo sapiens; identical to SEQ ID NO: 4708
  chr12:64237614-64237772
  hypo

SEQ ID NO: 50599 - DNA, 52 bp, Homo sapiens; identical to SEQ ID NO: 4709
  chr12:64237892-64237944
  hypo

SEQ ID NO: 50600 - DNA, 111 bp, Homo sapiens; identical to SEQ ID NO: 4710
  chr12:64238194-64238305
  hypo

SEQ ID NO: 50601 - DNA, 37 bp, Homo sapiens; identical to SEQ ID NO: 19724
  chr12:64373752-64373789
  hypo

SEQ ID NO: 50602 - DNA, 31 bp, Homo sapiens; identical to SEQ ID NO: 19725
  chr12:64373791-64373822
  hypo

SEQ ID NO: 50603 - DNA, 31 bp, Homo sapiens; identical to SEQ ID NO: 19726
  chr12:64383904-64383935
  hypo

SEQ ID NO: 50604 - DNA, 31 bp, Homo sapiens; identical to SEQ ID NO: 19727
  chr12:64458621-64458652
  hypo

SEQ ID NO: 50605 - DNA, 31 bp, Homo sapiens; identical to SEQ ID NO: 19728
  chr12:64521628-64521659
  hypo

SEQ ID NO: 50606 - DNA, 62 bp, Homo sapiens; identical to SEQ ID NO: 19729
  chr12:64521661-64521723
  hypo

SEQ ID NO: 50607 - DNA, 31 bp, Homo sapiens; identical to SEQ ID NO: 19730
  chr12:64521873-64521904
  hypo

SEQ ID NO: 50608 - DNA, 31 bp, Homo sapiens; identical to SEQ ID NO: 19731
  chr12:64543910-64543941
  hypo

SEQ ID NO: 50609 - DNA, 62 bp, Homo sapiens; identical to SEQ ID NO: 19732
  chr12:64783040-64783102
  hypo

SEQ ID NO: 50610 - DNA, 41 bp, Homo sapiens; identical to SEQ ID NO: 19733
  chr12:64797362-64797403
  hypo

SEQ ID NO: 50611 - DNA, 31 bp, Homo sapiens; identical to SEQ ID NO: 4713
  chr12:64845174-64845205
  hypo

SEQ ID NO: 50612 - DNA, 52 bp, Homo sapiens; identical to SEQ ID NO: 4714
  chr12:64845222-64845274
  hypo

SEQ ID NO: 50613 - DNA, 50 bp, Homo sapiens; identical to SEQ ID NO: 4715
  chr12:64845320-64845370
  hypo

SEQ ID NO: 50614 - DNA, 36 bp, Homo sapiens; identical to SEQ ID NO: 4716
  chr12:64845434-64845470
  hypo

SEQ ID NO: 50615 - DNA, 63 bp, Homo sapiens; identical to SEQ ID NO: 4717
  chr12:64845507-64845570
  hypo

SEQ ID NO: 50616 - DNA, 33 bp, Homo sapiens; identical to SEQ ID NO: 19740
  chr12:65030350-65030383
  hypo

SEQ ID NO: 50617 - DNA, 31 bp, Homo sapiens; identical to SEQ ID NO: 19742
  chr12:65557470-65557501
  hypo

SEQ ID NO: 50618 - DNA, 2 bp, Homo sapiens
  chr12:68978218-68978220
  hypo
ca

SEQ ID NO: 50619 - DNA, 40 bp, Homo sapiens; identical to SEQ ID NO: 4725
  chr12:69241506-69241546
  hypo

SEQ ID NO: 50620 - DNA, 31 bp, Homo sapiens; identical to SEQ ID NO: 19749
  chr12:69644223-69644254
  hypo

SEQ ID NO: 50621 - DNA, 31 bp, Homo sapiens; identical to SEQ ID NO: 19750
  chr12:69644282-69644313
  hypo

SEQ ID NO: 50622 - DNA, 31 bp, Homo sapiens; identical to SEQ ID NO: 19752
  chr12:69999223-69999254
  hypo

SEQ ID NO: 50623 - DNA, 31 bp, Homo sapiens; identical to SEQ ID NO: 19753
  chr12:69999284-69999315
  hypo

SEQ ID NO: 50624 - DNA, 31 bp, Homo sapiens; identical to SEQ ID NO: 19755
  chr12:70023345-70023376
  hypo

SEQ ID NO: 50625 - DNA, 31 bp, Homo sapiens; identical to SEQ ID NO: 19758
  chr12:70648186-70648217
  hypo

SEQ ID NO: 50626 - DNA, 31 bp, Homo sapiens; identical to SEQ ID NO: 19759
  chr12:70648238-70648269
  hypo

SEQ ID NO: 50627 - DNA, 31 bp, Homo sapiens; identical to SEQ ID NO: 19760
  chr12:70648287-70648318
  hypo

SEQ ID NO: 50628 - DNA, 31 bp, Homo sapiens; identical to SEQ ID NO: 19761
  chr12:70648327-70648358
  hypo

SEQ ID NO: 50629 - DNA, 31 bp, Homo sapiens; identical to SEQ ID NO: 19762
  chr12:70765936-70765967
  hypo

SEQ ID NO: 50630 - DNA, 36 bp, Homo sapiens; identical to SEQ ID NO: 19763
  chr12:70766004-70766040
  hypo

SEQ ID NO: 50631 - DNA, 31 bp, Homo sapiens; identical to SEQ ID NO: 19764
  chr12:70766057-70766088
  hypo

SEQ ID NO: 50632 - DNA, 31 bp, Homo sapiens; identical to SEQ ID NO: 19765
  chr12:70766111-70766142
  hypo

SEQ ID NO: 50633 - DNA, 31 bp, Homo sapiens; identical to SEQ ID NO: 19766
  chr12:70954497-70954528
  hypo

SEQ ID NO: 50634 - DNA, 39 bp, Homo sapiens; identical to SEQ ID NO: 19767
  chr12:70954529-70954568
  hypo

SEQ ID NO: 50635 - DNA, 38 bp, Homo sapiens; identical to SEQ ID NO: 19768
  chr12:70954654-70954692
  hypo

SEQ ID NO: 50636 - DNA, 31 bp, Homo sapiens; identical to SEQ ID NO: 19769
  chr12:72147562-72147593
  hypo

SEQ ID NO: 50637 - DNA, 3 bp, Homo sapiens
  chr12:72165404-72165407
  hypo
ttg

SEQ ID NO: 50638 - DNA, 31 bp, Homo sapiens; identical to SEQ ID NO: 19774
  chr12:76417874-76417905
  hypo

SEQ ID NO: 50639 - DNA, 43 bp, Homo sapiens; identical to SEQ ID NO: 4735
  chr12:77272815-77272858
  hypo

SEQ ID NO: 50640 - DNA, 33 bp, Homo sapiens; identical to SEQ ID NO: 19777
  chr12:77453496-77453529
  hypo

SEQ ID NO: 50641 - DNA, 31 bp, Homo sapiens; identical to SEQ ID NO: 4737
  chr12:80083437-80083468
  hypo

SEQ ID NO: 50642 - DNA, 78 bp, Homo sapiens; identical to SEQ ID NO: 4738
  chr12:80084656-80084734
  hypo

SEQ ID NO: 50643 - DNA, 72 bp, Homo sapiens; identical to SEQ ID NO: 4739
  chr12:80084905-80084977
  hypo

SEQ ID NO: 50644 - DNA, 109 bp, Homo sapiens; identical to SEQ ID NO: 4740
  chr12:80084980-80085089
  hypo

SEQ ID NO: 50645 - DNA, 38 bp, Homo sapiens; identical to SEQ ID NO: 4743
  chr12:83080990-83081028
  hypo

SEQ ID NO: 50646 - DNA, 192 bp, Homo sapiens; identical to SEQ ID NO: 4744
  chr12:83081030-83081222
  hypo

SEQ ID NO: 50647 - DNA, 41 bp, Homo sapiens; identical to SEQ ID NO: 19784
  chr12:89020038-89020079
  hypo

SEQ ID NO: 50648 - DNA, 31 bp, Homo sapiens; identical to SEQ ID NO: 4754
  chr12:89747141-89747172
  hypo

SEQ ID NO: 50649 - DNA, 34 bp, Homo sapiens; identical to SEQ ID NO: 4756
  chr12:89747338-89747372
  hypo

SEQ ID NO: 50650 - DNA, 66 bp, Homo sapiens; identical to SEQ ID NO: 4757
  chr12:89747400-89747466
  hypo

SEQ ID NO: 50651 - DNA, 42 bp, Homo sapiens; identical to SEQ ID NO: 4758
  chr12:89747549-89747591
  hypo

SEQ ID NO: 50652 - DNA, 31 bp, Homo sapiens; identical to SEQ ID NO: 19790
  chr12:89919632-89919663
  hypo

SEQ ID NO: 50653 - DNA, 48 bp, Homo sapiens; identical to SEQ ID NO: 19791
  chr12:90313457-90313505
  hypo

SEQ ID NO: 50654 - DNA, 2 bp, Homo sapiens
  chr12:90313511-90313513
  hypo
ac

SEQ ID NO: 50655 - DNA, 45 bp, Homo sapiens; identical to SEQ ID NO: 19794
  chr12:93710943-93710988
  hypo

SEQ ID NO: 50656 - DNA, 31 bp, Homo sapiens; identical to SEQ ID NO: 19795
  chr12:93710993-93711024
  hypo

SEQ ID NO: 50657 - DNA, 2 bp, Homo sapiens
  chr12:93711080-93711082
  hypo
tt

SEQ ID NO: 50658 - DNA, 31 bp, Homo sapiens; identical to SEQ ID NO: 19798
  chr12:93738882-93738913
  hypo

SEQ ID NO: 50659 - DNA, 2 bp, Homo sapiens
  chr12:94541896-94541898
  hypo
ct

SEQ ID NO: 50660 - DNA, 169 bp, Homo sapiens; identical to SEQ ID NO: 4762
  chr12:94542775-94542944
  hypo

SEQ ID NO: 50661 - DNA, 103 bp, Homo sapiens; identical to SEQ ID NO: 4763
  chr12:94542961-94543064
  hypo

SEQ ID NO: 50662 - DNA, 21 bp, Homo sapiens
  chr12:94543068-94543089
  hypo
ctgctgctgccctaccgcgag

SEQ ID NO: 50663 - DNA, 21 bp, Homo sapiens
  chr12:94543992-94544013
  hypo
ggagcacggcctgaggtcccc

SEQ ID NO: 50664 - DNA, 30 bp, Homo sapiens; identical to SEQ ID NO: 12076
  chr12:95492651-95492681
  hypo

SEQ ID NO: 50665 - DNA, 31 bp, Homo sapiens; identical to SEQ ID NO: 19809
  chr12:95802944-95802975
  hypo

SEQ ID NO: 50666 - DNA, 31 bp, Homo sapiens; identical to SEQ ID NO: 19812
  chr12:96043430-96043461
  hypo

SEQ ID NO: 50667 - DNA, 31 bp, Homo sapiens; identical to SEQ ID NO: 19813
  chr12:96437260-96437291
  hypo

SEQ ID NO: 50668 - DNA, 31 bp, Homo sapiens; identical to SEQ ID NO: 19814
  chr12:96437474-96437505
  hypo

SEQ ID NO: 50669 - DNA, 31 bp, Homo sapiens; identical to SEQ ID NO: 19815
  chr12:98815582-98815613
  hypo

SEQ ID NO: 50670 - DNA, 8 bp, Homo sapiens
  chr12:98895905-98895913
  hypo
tgtaatcc

SEQ ID NO: 50671 - DNA, 4 bp, Homo sapiens
  chr12:98947860-98947864
  hypo
gtgc

SEQ ID NO: 50672 - DNA, 5 bp, Homo sapiens
  chr12:98947901-98947906
  hypo
tctag

SEQ ID NO: 50673 - DNA, 31 bp, Homo sapiens; identical to SEQ ID NO: 19822
  chr12:98983723-98983754
  hypo

SEQ ID NO: 50674 - DNA, 31 bp, Homo sapiens; identical to SEQ ID NO: 19823
  chr12:98983770-98983801
  hypo

SEQ ID NO: 50675 - DNA, 31 bp, Homo sapiens; identical to SEQ ID NO: 19825
  chr12:100352715-100352746
  hypo

SEQ ID NO: 50676 - DNA, 31 bp, Homo sapiens; identical to SEQ ID NO: 19826
  chr12:100710890-100710921
  hypo

SEQ ID NO: 50677 - DNA, 31 bp, Homo sapiens; identical to SEQ ID NO: 19828
  chr12:102457127-102457158
  hypo

SEQ ID NO: 50678 - DNA, 35 bp, Homo sapiens; identical to SEQ ID NO: 38442
  chr12:104323141-104323176
  hypo

SEQ ID NO: 50679 - DNA, 173 bp, Homo sapiens; identical to SEQ ID NO: 4781
  chr12:104323184-104323357
  hypo

SEQ ID NO: 50680 - DNA, 200 bp, Homo sapiens; identical to SEQ ID NO: 38448
  chr12:104851694-104851894
  hypo

SEQ ID NO: 50681 - DNA, 31 bp, Homo sapiens; identical to SEQ ID NO: 19847
  chr12:105955872-105955903
  hypo

SEQ ID NO: 50682 - DNA, 31 bp, Homo sapiens; identical to SEQ ID NO: 19848
  chr12:105955913-105955944
  hypo

SEQ ID NO: 50683 - DNA, 59 bp, Homo sapiens; identical to SEQ ID NO: 19849
  chr12:105955964-105956023
  hypo

SEQ ID NO: 50684 - DNA, 31 bp, Homo sapiens; identical to SEQ ID NO: 19850
  chr12:105956046-105956077
  hypo

SEQ ID NO: 50685 - DNA, 37 bp, Homo sapiens; identical to SEQ ID NO: 19851
  chr12:106460687-106460724
  hypo

SEQ ID NO: 50686 - DNA, 52 bp, Homo sapiens; identical to SEQ ID NO: 19852
  chr12:106460753-106460805
  hypo

SEQ ID NO: 50687 - DNA, 31 bp, Homo sapiens; identical to SEQ ID NO: 4803
  chr12:106532782-106532813
  hypo

SEQ ID NO: 50688 - DNA, 31 bp, Homo sapiens; identical to SEQ ID NO: 19854
  chr12:106537677-106537708
  hypo

SEQ ID NO: 50689 - DNA, 181 bp, Homo sapiens; identical to SEQ ID NO: 4806
  chr12:106640991-106641172
  hypo

SEQ ID NO: 50690 - DNA, 59 bp, Homo sapiens; identical to SEQ ID NO: 4807
  chr12:106641197-106641256
  hypo

SEQ ID NO: 50691 - DNA, 55 bp, Homo sapiens; identical to SEQ ID NO: 4808
  chr12:106641514-106641569
  hypo

SEQ ID NO: 50692 - DNA, 45 bp, Homo sapiens; identical to SEQ ID NO: 19858
  chr12:106881471-106881516
  hypo

SEQ ID NO: 50693 - DNA, 31 bp, Homo sapiens; identical to SEQ ID NO: 19859
  chr12:106881541-106881572
  hypo

SEQ ID NO: 50694 - DNA, 51 bp, Homo sapiens; identical to SEQ ID NO: 19860
  chr12:106881610-106881661
  hypo

SEQ ID NO: 50695 - DNA, 44 bp, Homo sapiens; identical to SEQ ID NO: 4809
  chr12:107167935-107167979
  hypo

SEQ ID NO: 50696 - DNA, 59 bp, Homo sapiens; identical to SEQ ID NO: 4810
  chr12:107167981-107168040
  hypo

SEQ ID NO: 50697 - DNA, 190 bp, Homo sapiens; identical to SEQ ID NO: 4811
  chr12:107168227-107168417
  hypo

SEQ ID NO: 50698 - DNA, 65 bp, Homo sapiens; identical to SEQ ID NO: 19864
  chr12:107436702-107436767
  hypo

SEQ ID NO: 50699 - DNA, 42 bp, Homo sapiens; identical to SEQ ID NO: 19865
  chr12:107436789-107436831
  hypo

SEQ ID NO: 50700 - DNA, 42 bp, Homo sapiens; identical to SEQ ID NO: 19866
  chr12:107436840-107436882
  hypo

SEQ ID NO: 50701 - DNA, 31 bp, Homo sapiens; identical to SEQ ID NO: 19867
  chr12:108012257-108012288
  hypo

SEQ ID NO: 50702 - DNA, 33 bp, Homo sapiens; identical to SEQ ID NO: 19868
  chr12:108963689-108963722
  hypo

SEQ ID NO: 50703 - DNA, 31 bp, Homo sapiens; identical to SEQ ID NO: 19870
  chr12:109208576-109208607
  hypo

SEQ ID NO: 50704 - DNA, 31 bp, Homo sapiens; identical to SEQ ID NO: 19871
  chr12:109506483-109506514
  hypo

SEQ ID NO: 50705 - DNA, 31 bp, Homo sapiens; identical to SEQ ID NO: 19872
  chr12:109520626-109520657
  hypo

SEQ ID NO: 50706 - DNA, 31 bp, Homo sapiens; identical to SEQ ID NO: 19873
  chr12:109717148-109717179
  hypo

SEQ ID NO: 50707 - DNA, 31 bp, Homo sapiens; identical to SEQ ID NO: 19874
  chr12:109717328-109717359
  hypo

SEQ ID NO: 50708 - DNA, 31 bp, Homo sapiens; identical to SEQ ID NO: 19875
  chr12:109873229-109873260
  hypo

SEQ ID NO: 50709 - DNA, 31 bp, Homo sapiens; identical to SEQ ID NO: 19876
  chr12:109916249-109916280
  hypo

SEQ ID NO: 50710 - DNA, 31 bp, Homo sapiens; identical to SEQ ID NO: 19877
  chr12:109916586-109916617
  hypo

SEQ ID NO: 50711 - DNA, 76 bp, Homo sapiens; identical to SEQ ID NO: 19878
  chr12:110019851-110019927
  hypo

SEQ ID NO: 50712 - DNA, 42 bp, Homo sapiens; identical to SEQ ID NO: 19879
  chr12:110019982-110020024
  hypo

SEQ ID NO: 50713 - DNA, 31 bp, Homo sapiens; identical to SEQ ID NO: 19880
  chr12:110169314-110169345
  hypo

SEQ ID NO: 50714 - DNA, 31 bp, Homo sapiens; identical to SEQ ID NO: 19881
  chr12:110224373-110224404
  hypo

SEQ ID NO: 50715 - DNA, 83 bp, Homo sapiens; identical to SEQ ID NO: 19882
  chr12:110224629-110224712
  hypo

SEQ ID NO: 50716 - DNA, 31 bp, Homo sapiens; identical to SEQ ID NO: 19883
  chr12:110250927-110250958
  hypo

SEQ ID NO: 50717 - DNA, 57 bp, Homo sapiens; identical to SEQ ID NO: 19885
  chr12:110353037-110353094
  hypo

SEQ ID NO: 50718 - DNA, 31 bp, Homo sapiens; identical to SEQ ID NO: 19886
  chr12:110353108-110353139
  hypo

SEQ ID NO: 50719 - DNA, 31 bp, Homo sapiens; identical to SEQ ID NO: 19887
  chr12:110782523-110782554
  hypo

SEQ ID NO: 50720 - DNA, 70 bp, Homo sapiens; identical to SEQ ID NO: 19888
  chr12:110782587-110782657
  hypo

SEQ ID NO: 50721 - DNA, 2 bp, Homo sapiens
  chr12:110782678-110782680
  hypo
gt

SEQ ID NO: 50722 - DNA, 2 bp, Homo sapiens
  chr12:110784091-110784093
  hypo
gc

SEQ ID NO: 50723 - DNA, 36 bp, Homo sapiens; identical to SEQ ID NO: 19892
  chr12:110784842-110784878
  hypo

SEQ ID NO: 50724 - DNA, 73 bp, Homo sapiens; identical to SEQ ID NO: 19893
  chr12:110784879-110784952
  hypo

SEQ ID NO: 50725 - DNA, 31 bp, Homo sapiens; identical to SEQ ID NO: 19894
  chr12:110784954-110784985
  hypo

SEQ ID NO: 50726 - DNA, 31 bp, Homo sapiens; identical to SEQ ID NO: 19896
  chr12:111590541-111590572
  hypo

SEQ ID NO: 50727 - DNA, 131 bp, Homo sapiens; identical to SEQ ID NO: 4824
  chr12:111844274-111844405
  hypo

SEQ ID NO: 50728 - DNA, 31 bp, Homo sapiens; identical to SEQ ID NO: 4825
  chr12:111844407-111844438
  hypo

SEQ ID NO: 50729 - DNA, 93 bp, Homo sapiens; identical to SEQ ID NO: 4826
  chr12:111844495-111844588
  hypo

SEQ ID NO: 50730 - DNA, 42 bp, Homo sapiens; identical to SEQ ID NO: 19900
  chr12:112015341-112015383
  hypo

SEQ ID NO: 50731 - DNA, 31 bp, Homo sapiens; identical to SEQ ID NO: 19901
  chr12:112430857-112430888
  hypo

SEQ ID NO: 50732 - DNA, 2 bp, Homo sapiens
  chr12:112628548-112628550
  hypo
cc

SEQ ID NO: 50733 - DNA, 39 bp, Homo sapiens; identical to SEQ ID NO: 4829
  chr12:112689850-112689889
  hypo

SEQ ID NO: 50734 - DNA, 31 bp, Homo sapiens; identical to SEQ ID NO: 19911
  chr12:113595320-113595351
  hypo

SEQ ID NO: 50735 - DNA, 31 bp, Homo sapiens; identical to SEQ ID NO: 19912
  chr12:113598990-113599021
  hypo

SEQ ID NO: 50736 - DNA, 97 bp, Homo sapiens; identical to SEQ ID NO: 19913
  chr12:113599066-113599163
  hypo

SEQ ID NO: 50737 - DNA, 31 bp, Homo sapiens; identical to SEQ ID NO: 19914
  chr12:113609784-113609815
  hypo

SEQ ID NO: 50738 - DNA, 204 bp, Homo sapiens; identical to SEQ ID NO: 4834
  chr12:113796496-113796700
  hypo

SEQ ID NO: 50739 - DNA, 159 bp, Homo sapiens; identical to SEQ ID NO: 4835
  chr12:113796701-113796860
  hypo

SEQ ID NO: 50740 - DNA, 31 bp, Homo sapiens; identical to SEQ ID NO: 19918
  chr12:113872021-113872052
  hypo

SEQ ID NO: 50741 - DNA, 35 bp, Homo sapiens
  chr12:114273732-114273767
  hypo
aaaacacagggttctgcgcacggatttcttccata

SEQ ID NO: 50742 - DNA, 53 bp, Homo sapiens
  chr12:114273850-114273903
  hypo
ttgtaacacgctcaggaagaaaaggacacagccagcggcggactttcctcttt

SEQ ID NO: 50743 - DNA, 42 bp, Homo sapiens; identical to SEQ ID NO: 19920
  chr12:114273956-114273998
  hypo

SEQ ID NO: 50744 - DNA, 31 bp, Homo sapiens; identical to SEQ ID NO: 19921
  chr12:114290637-114290668
  hypo

SEQ ID NO: 50745 - DNA, 31 bp, Homo sapiens; identical to SEQ ID NO: 19922
  chr12:114294979-114295010
  hypo

SEQ ID NO: 50746 - DNA, 4 bp, Homo sapiens
  chr12:114337760-114337764
  hypo
ggtt

SEQ ID NO: 50747 - DNA, 18 bp, Homo sapiens
  chr12:114337922-114337940
  hypo
aaaacgccagctgcagcg

SEQ ID NO: 50748 - DNA, 80 bp, Homo sapiens; identical to SEQ ID NO: 19925
  chr12:114349903-114349983
  hypo

SEQ ID NO: 50749 - DNA, 31 bp, Homo sapiens; identical to SEQ ID NO: 19926
  chr12:114349988-114350019
  hypo

SEQ ID NO: 50750 - DNA, 31 bp, Homo sapiens; identical to SEQ ID NO: 19927
  chr12:114350024-114350055
  hypo

SEQ ID NO: 50751 - DNA, 31 bp, Homo sapiens; identical to SEQ ID NO: 19928
  chr12:114393632-114393663
  hypo

SEQ ID NO: 50752 - DNA, 31 bp, Homo sapiens; identical to SEQ ID NO: 19929
  chr12:115192171-115192202
  hypo

SEQ ID NO: 50753 - DNA, 2 bp, Homo sapiens
  chr12:116842261-116842263
  hypo
gt

SEQ ID NO: 50754 - DNA, 31 bp, Homo sapiens; identical to SEQ ID NO: 19936
  chr12:117136041-117136072
  hypo

SEQ ID NO: 50755 - DNA, 2 bp, Homo sapiens
  chr12:117408105-117408107
  hypo
ca

SEQ ID NO: 50756 - DNA, 31 bp, Homo sapiens; identical to SEQ ID NO: 19938
  chr12:117408283-117408314
  hypo

SEQ ID NO: 50757 - DNA, 31 bp, Homo sapiens; identical to SEQ ID NO: 19939
  chr12:117466360-117466391
  hypo

SEQ ID NO: 50758 - DNA, 2 bp, Homo sapiens
  chr12:117472594-117472596
  hypo
ag

SEQ ID NO: 50759 - DNA, 31 bp, Homo sapiens; identical to SEQ ID NO: 19942
  chr12:117588695-117588726
  hypo

SEQ ID NO: 50760 - DNA, 38 bp, Homo sapiens; identical to SEQ ID NO: 19944
  chr12:117588864-117588902
  hypo

SEQ ID NO: 50761 - DNA, 31 bp, Homo sapiens; identical to SEQ ID NO: 19945
  chr12:117597669-117597700
  hypo

SEQ ID NO: 50762 - DNA, 31 bp, Homo sapiens; identical to SEQ ID NO: 19946
  chr12:118293459-118293490
  hypo

SEQ ID NO: 50763 - DNA, 31 bp, Homo sapiens; identical to SEQ ID NO: 19947
  chr12:118293654-118293685
  hypo

SEQ ID NO: 50764 - DNA, 58 bp, Homo sapiens; identical to SEQ ID NO: 19948
  chr12:118318418-118318476
  hypo

SEQ ID NO: 50765 - DNA, 39 bp, Homo sapiens; identical to SEQ ID NO: 19950
  chr12:118474261-118474300
  hypo

SEQ ID NO: 50766 - DNA, 31 bp, Homo sapiens; identical to SEQ ID NO: 19952
  chr12:118481571-118481602
  hypo

SEQ ID NO: 50767 - DNA, 31 bp, Homo sapiens; identical to SEQ ID NO: 19953
  chr12:118481630-118481661
  hypo

SEQ ID NO: 50768 - DNA, 49 bp, Homo sapiens; identical to SEQ ID NO: 19954
  chr12:118533280-118533329
  hypo

SEQ ID NO: 50769 - DNA, 31 bp, Homo sapiens; identical to SEQ ID NO: 19955
  chr12:118583594-118583625
  hypo

SEQ ID NO: 50770 - DNA, 31 bp, Homo sapiens; identical to SEQ ID NO: 19956
  chr12:118583834-118583865
  hypo

SEQ ID NO: 50771 - DNA, 31 bp, Homo sapiens; identical to SEQ ID NO: 19957
  chr12:118583889-118583920
  hypo

SEQ ID NO: 50772 - DNA, 31 bp, Homo sapiens; identical to SEQ ID NO: 19959
  chr12:118870538-118870569
  hypo

SEQ ID NO: 50773 - DNA, 62 bp, Homo sapiens; identical to SEQ ID NO: 19960
  chr12:119626327-119626389
  hypo

SEQ ID NO: 50774 - DNA, 31 bp, Homo sapiens; identical to SEQ ID NO: 19961
  chr12:119626392-119626423
  hypo

SEQ ID NO: 50775 - DNA, 2 bp, Homo sapiens
  chr12:120148730-120148732
  hypo
aa

SEQ ID NO: 50776 - DNA, 98 bp, Homo sapiens; identical to SEQ ID NO: 19967
  chr12:120214486-120214584
  hypo

SEQ ID NO: 50777 - DNA, 31 bp, Homo sapiens; identical to SEQ ID NO: 19968
  chr12:120234817-120234848
  hypo

SEQ ID NO: 50778 - DNA, 36 bp, Homo sapiens; identical to SEQ ID NO: 19969
  chr12:120545352-120545388
  hypo

SEQ ID NO: 50779 - DNA, 31 bp, Homo sapiens; identical to SEQ ID NO: 19970
  chr12:120571412-120571443
  hypo

SEQ ID NO: 50780 - DNA, 12 bp, Homo sapiens
  chr12:120574315-120574327
  hypo
aagaggctgagt

SEQ ID NO: 50781 - DNA, 37 bp, Homo sapiens; identical to SEQ ID NO: 19973
  chr12:120927817-120927854
  hypo

SEQ ID NO: 50782 - DNA, 41 bp, Homo sapiens; identical to SEQ ID NO: 19974
  chr12:120983606-120983647
  hypo

SEQ ID NO: 50783 - DNA, 36 bp, Homo sapiens; identical to SEQ ID NO: 19976
  chr12:121328590-121328626
  hypo

SEQ ID NO: 50784 - DNA, 59 bp, Homo sapiens; identical to SEQ ID NO: 19977
  chr12:121328642-121328701
  hypo

SEQ ID NO: 50785 - DNA, 2 bp, Homo sapiens
  chr12:121653406-121653408
  hypo
gt

SEQ ID NO: 50786 - DNA, 20 bp, Homo sapiens
  chr12:121653437-121653457
  hypo
agtcacgagaatctttaaag

SEQ ID NO: 50787 - DNA, 2 bp, Homo sapiens
  chr12:121667859-121667861
  hypo
gc

SEQ ID NO: 50788 - DNA, 31 bp, Homo sapiens; identical to SEQ ID NO: 19981
  chr12:121691829-121691860
  hypo

SEQ ID NO: 50789 - DNA, 2 bp, Homo sapiens
  chr12:121740281-121740283
  hypo
ct

SEQ ID NO: 50790 - DNA, 31 bp, Homo sapiens; identical to SEQ ID NO: 19983
  chr12:122192853-122192884
  hypo

SEQ ID NO: 50791 - DNA, 36 bp, Homo sapiens; identical to SEQ ID NO: 4838
  chr12:122214227-122214263
  hypo

SEQ ID NO: 50792 - DNA, 77 bp, Homo sapiens; identical to SEQ ID NO: 4839
  chr12:122231545-122231622
  hypo

SEQ ID NO: 50793 - DNA, 55 bp, Homo sapiens; identical to SEQ ID NO: 19986
  chr12:122246167-122246222
  hypo

SEQ ID NO: 50794 - DNA, 47 bp, Homo sapiens; identical to SEQ ID NO: 19987
  chr12:122246223-122246270
  hypo

SEQ ID NO: 50795 - DNA, 42 bp, Homo sapiens; identical to SEQ ID NO: 19988
  chr12:122282338-122282380
  hypo

SEQ ID NO: 50796 - DNA, 31 bp, Homo sapiens; identical to SEQ ID NO: 19990
  chr12:122319020-122319051
  hypo

SEQ ID NO: 50797 - DNA, 35 bp, Homo sapiens; identical to SEQ ID NO: 19991
  chr12:122425315-122425350
  hypo

SEQ ID NO: 50798 - DNA, 59 bp, Homo sapiens; identical to SEQ ID NO: 19992
  chr12:122438022-122438081
  hypo

SEQ ID NO: 50799 - DNA, 31 bp, Homo sapiens; identical to SEQ ID NO: 19993
  chr12:122444564-122444595
  hypo

SEQ ID NO: 50800 - DNA, 198 bp, Homo sapiens; identical to SEQ ID NO: 4843
  chr12:122459881-122460079
  hypo

SEQ ID NO: 50801 - DNA, 31 bp, Homo sapiens; identical to SEQ ID NO: 4844
  chr12:122461112-122461143
  hypo

SEQ ID NO: 50802 - DNA, 31 bp, Homo sapiens; identical to SEQ ID NO: 4845
  chr12:122461164-122461195
  hypo

SEQ ID NO: 50803 - DNA, 102 bp, Homo sapiens; identical to SEQ ID NO: 4846
  chr12:122461278-122461380
  hypo

SEQ ID NO: 50804 - DNA, 77 bp, Homo sapiens; identical to SEQ ID NO: 20000
  chr12:122463062-122463139
  hypo

SEQ ID NO: 50805 - DNA, 31 bp, Homo sapiens; identical to SEQ ID NO: 20001
  chr12:122472063-122472094
  hypo

SEQ ID NO: 50806 - DNA, 31 bp, Homo sapiens; identical to SEQ ID NO: 20002
  chr12:122472661-122472692
  hypo

SEQ ID NO: 50807 - DNA, 31 bp, Homo sapiens; identical to SEQ ID NO: 20003
  chr12:122472715-122472746
  hypo

SEQ ID NO: 50808 - DNA, 31 bp, Homo sapiens; identical to SEQ ID NO: 20005
  chr12:122474626-122474657
  hypo

SEQ ID NO: 50809 - DNA, 31 bp, Homo sapiens; identical to SEQ ID NO: 4847
  chr12:122478893-122478924
  hypo

SEQ ID NO: 50810 - DNA, 70 bp, Homo sapiens; identical to SEQ ID NO: 20007
  chr12:122481848-122481918
  hypo

SEQ ID NO: 50811 - DNA, 46 bp, Homo sapiens; identical to SEQ ID NO: 20008
  chr12:122481972-122482018
  hypo

SEQ ID NO: 50812 - DNA, 71 bp, Homo sapiens; identical to SEQ ID NO: 20010
  chr12:122483299-122483370
  hypo

SEQ ID NO: 50813 - DNA, 31 bp, Homo sapiens; identical to SEQ ID NO: 20011
  chr12:122483377-122483408
  hypo

SEQ ID NO: 50814 - DNA, 31 bp, Homo sapiens; identical to SEQ ID NO: 20013
  chr12:122491262-122491293
  hypo

SEQ ID NO: 50815 - DNA, 31 bp, Homo sapiens; identical to SEQ ID NO: 20014
  chr12:122492518-122492549
  hypo

SEQ ID NO: 50816 - DNA, 31 bp, Homo sapiens; identical to SEQ ID NO: 20015
  chr12:122493938-122493969
  hypo

SEQ ID NO: 50817 - DNA, 66 bp, Homo sapiens; identical to SEQ ID NO: 20016
  chr12:122493996-122494062
  hypo

SEQ ID NO: 50818 - DNA, 31 bp, Homo sapiens; identical to SEQ ID NO: 20017
  chr12:122494103-122494134
  hypo

SEQ ID NO: 50819 - DNA, 31 bp, Homo sapiens; identical to SEQ ID NO: 20019
  chr12:122602776-122602807
  hypo

SEQ ID NO: 50820 - DNA, 28 bp, Homo sapiens
  chr12:122602835-122602863
  hypo
taatattttcagacagcggttgatcatg

SEQ ID NO: 50821 - DNA, 31 bp, Homo sapiens; identical to SEQ ID NO: 20021
  chr12:122623938-122623969
  hypo

SEQ ID NO: 50822 - DNA, 11 bp, Homo sapiens
  chr12:122623980-122623991
  hypo
cttccaggtgg

SEQ ID NO: 50823 - DNA, 31 bp, Homo sapiens; identical to SEQ ID NO: 20023
  chr12:122667355-122667386
  hypo

SEQ ID NO: 50824 - DNA, 2 bp, Homo sapiens
  chr12:122691181-122691183
  hypo
tg

SEQ ID NO: 50825 - DNA, 31 bp, Homo sapiens; identical to SEQ ID NO: 20025
  chr12:122712136-122712167
  hypo

SEQ ID NO: 50826 - DNA, 31 bp, Homo sapiens; identical to SEQ ID NO: 20026
  chr12:122970497-122970528
  hypo

SEQ ID NO: 50827 - DNA, 138 bp, Homo sapiens; identical to SEQ ID NO: 4849
  chr12:123380520-123380658
  hypo

SEQ ID NO: 50828 - DNA, 31 bp, Homo sapiens; identical to SEQ ID NO: 20031
  chr12:123400986-123401017
  hypo

SEQ ID NO: 50829 - DNA, 31 bp, Homo sapiens; identical to SEQ ID NO: 20032
  chr12:123401349-123401380
  hypo

SEQ ID NO: 50830 - DNA, 31 bp, Homo sapiens; identical to SEQ ID NO: 4851
  chr12:123414419-123414450
  hypo

SEQ ID NO: 50831 - DNA, 53 bp, Homo sapiens; identical to SEQ ID NO: 20034
  chr12:123481906-123481959
  hypo

SEQ ID NO: 50832 - DNA, 31 bp, Homo sapiens; identical to SEQ ID NO: 20035
  chr12:123485544-123485575
  hypo

SEQ ID NO: 50833 - DNA, 31 bp, Homo sapiens; identical to SEQ ID NO: 20036
  chr12:123490025-123490056
  hypo

SEQ ID NO: 50834 - DNA, 31 bp, Homo sapiens; identical to SEQ ID NO: 4852
  chr12:123497425-123497456
  hypo

SEQ ID NO: 50835 - DNA, 31 bp, Homo sapiens; identical to SEQ ID NO: 20038
  chr12:123751043-123751074
  hypo

SEQ ID NO: 50836 - DNA, 31 bp, Homo sapiens; identical to SEQ ID NO: 4853
  chr12:123754991-123755022
  hypo

SEQ ID NO: 50837 - DNA, 31 bp, Homo sapiens; identical to SEQ ID NO: 20040
  chr12:123775023-123775054
  hypo

SEQ ID NO: 50838 - DNA, 31 bp, Homo sapiens; identical to SEQ ID NO: 4857
  chr12:123920746-123920777
  hypo

SEQ ID NO: 50839 - DNA, 55 bp, Homo sapiens; identical to SEQ ID NO: 20044
  chr12:124111671-124111726
  hypo

SEQ ID NO: 50840 - DNA, 44 bp, Homo sapiens; identical to SEQ ID NO: 20045
  chr12:124111753-124111797
  hypo

SEQ ID NO: 50841 - DNA, 31 bp, Homo sapiens; identical to SEQ ID NO: 20046
  chr12:124141810-124141841
  hypo

SEQ ID NO: 50842 - DNA, 69 bp, Homo sapiens; identical to SEQ ID NO: 20047
  chr12:124141889-124141958
  hypo

SEQ ID NO: 50843 - DNA, 31 bp, Homo sapiens; identical to SEQ ID NO: 4858
  chr12:124156317-124156348
  hypo

SEQ ID NO: 50844 - DNA, 31 bp, Homo sapiens; identical to SEQ ID NO: 20050
  chr12:124330450-124330481
  hypo

SEQ ID NO: 50845 - DNA, 46 bp, Homo sapiens; identical to SEQ ID NO: 20051
  chr12:124335327-124335373
  hypo

SEQ ID NO: 50846 - DNA, 36 bp, Homo sapiens; identical to SEQ ID NO: 20052
  chr12:124335504-124335540
  hypo

SEQ ID NO: 50847 - DNA, 31 bp, Homo sapiens; identical to SEQ ID NO: 20053
  chr12:124341872-124341903
  hypo

SEQ ID NO: 50848 - DNA, 31 bp, Homo sapiens; identical to SEQ ID NO: 20054
  chr12:124423711-124423742
  hypo

SEQ ID NO: 50849 - DNA, 50 bp, Homo sapiens; identical to SEQ ID NO: 20055
  chr12:124423764-124423814
  hypo

SEQ ID NO: 50850 - DNA, 37 bp, Homo sapiens; identical to SEQ ID NO: 20056
  chr12:124444124-124444161
  hypo

SEQ ID NO: 50851 - DNA, 31 bp, Homo sapiens; identical to SEQ ID NO: 20057
  chr12:124716558-124716589
  hypo

SEQ ID NO: 50852 - DNA, 31 bp, Homo sapiens; identical to SEQ ID NO: 4861
  chr12:124790623-124790654
  hypo

SEQ ID NO: 50853 - DNA, 2 bp, Homo sapiens
  chr12:124869875-124869877
  hypo
gg

SEQ ID NO: 50854 - DNA, 52 bp, Homo sapiens; identical to SEQ ID NO: 20061
  chr12:124881336-124881388
  hypo

SEQ ID NO: 50855 - DNA, 31 bp, Homo sapiens; identical to SEQ ID NO: 20062
  chr12:124929888-124929919
  hypo

SEQ ID NO: 50856 - DNA, 31 bp, Homo sapiens; identical to SEQ ID NO: 20063
  chr12:124967299-124967330
  hypo

SEQ ID NO: 50857 - DNA, 129 bp, Homo sapiens; identical to SEQ ID NO: 20064
  chr12:124971792-124971921
  hypo

SEQ ID NO: 50858 - DNA, 56 bp, Homo sapiens; identical to SEQ ID NO: 20065
  chr12:124979223-124979279
  hypo

SEQ ID NO: 50859 - DNA, 31 bp, Homo sapiens; identical to SEQ ID NO: 20066
  chr12:124979284-124979315
  hypo

SEQ ID NO: 50860 - DNA, 37 bp, Homo sapiens; identical to SEQ ID NO: 20067
  chr12:124979330-124979367
  hypo

SEQ ID NO: 50861 - DNA, 31 bp, Homo sapiens; identical to SEQ ID NO: 20068
  chr12:124979396-124979427
  hypo

SEQ ID NO: 50862 - DNA, 31 bp, Homo sapiens; identical to SEQ ID NO: 20069
  chr12:124979541-124979572
  hypo

SEQ ID NO: 50863 - DNA, 31 bp, Homo sapiens; identical to SEQ ID NO: 20070
  chr12:124979653-124979684
  hypo

SEQ ID NO: 50864 - DNA, 31 bp, Homo sapiens; identical to SEQ ID NO: 20071
  chr12:124979935-124979966
  hypo

SEQ ID NO: 50865 - DNA, 31 bp, Homo sapiens; identical to SEQ ID NO: 20072
  chr12:124980536-124980567
  hypo

SEQ ID NO: 50866 - DNA, 31 bp, Homo sapiens; identical to SEQ ID NO: 20073
  chr12:124980569-124980600
  hypo

SEQ ID NO: 50867 - DNA, 31 bp, Homo sapiens; identical to SEQ ID NO: 20075
  chr12:125009056-125009087
  hypo

SEQ ID NO: 50868 - DNA, 41 bp, Homo sapiens; identical to SEQ ID NO: 20076
  chr12:125009125-125009166
  hypo

SEQ ID NO: 50869 - DNA, 51 bp, Homo sapiens; identical to SEQ ID NO: 20077
  chr12:125009175-125009226
  hypo

SEQ ID NO: 50870 - DNA, 2 bp, Homo sapiens
  chr12:125009275-125009277
  hypo
ct

SEQ ID NO: 50871 - DNA, 31 bp, Homo sapiens; identical to SEQ ID NO: 20079
  chr12:125012455-125012486
  hypo

SEQ ID NO: 50872 - DNA, 31 bp, Homo sapiens; identical to SEQ ID NO: 20080
  chr12:125123326-125123357
  hypo

SEQ ID NO: 50873 - DNA, 31 bp, Homo sapiens; identical to SEQ ID NO: 20082
  chr12:125128990-125129021
  hypo

SEQ ID NO: 50874 - DNA, 40 bp, Homo sapiens; identical to SEQ ID NO: 20083
  chr12:125223878-125223918
  hypo

SEQ ID NO: 50875 - DNA, 31 bp, Homo sapiens; identical to SEQ ID NO: 20084
  chr12:125276597-125276628
  hypo

SEQ ID NO: 50876 - DNA, 31 bp, Homo sapiens; identical to SEQ ID NO: 20085
  chr12:125298971-125299002
  hypo

SEQ ID NO: 50877 - DNA, 31 bp, Homo sapiens; identical to SEQ ID NO: 20086
  chr12:125299401-125299432
  hypo

SEQ ID NO: 50878 - DNA, 50 bp, Homo sapiens; identical to SEQ ID NO: 20087
  chr12:125299578-125299628
  hypo

SEQ ID NO: 50879 - DNA, 31 bp, Homo sapiens; identical to SEQ ID NO: 20088
  chr12:125301968-125301999
  hypo

SEQ ID NO: 50880 - DNA, 31 bp, Homo sapiens; identical to SEQ ID NO: 20089
  chr12:125302008-125302039
  hypo

SEQ ID NO: 50881 - DNA, 31 bp, Homo sapiens; identical to SEQ ID NO: 20090
  chr12:125447399-125447430
  hypo

SEQ ID NO: 50882 - DNA, 31 bp, Homo sapiens; identical to SEQ ID NO: 20091
  chr12:125621160-125621191
  hypo

SEQ ID NO: 50883 - DNA, 31 bp, Homo sapiens; identical to SEQ ID NO: 20093
  chr12:128570491-128570522
  hypo

SEQ ID NO: 50884 - DNA, 31 bp, Homo sapiens; identical to SEQ ID NO: 20094
  chr12:130700589-130700620
  hypo

SEQ ID NO: 50885 - DNA, 31 bp, Homo sapiens; identical to SEQ ID NO: 4864
  chr12:130709678-130709709
  hypo

SEQ ID NO: 50886 - DNA, 31 bp, Homo sapiens; identical to SEQ ID NO: 20096
  chr12:130910644-130910675
  hypo

SEQ ID NO: 50887 - DNA, 31 bp, Homo sapiens; identical to SEQ ID NO: 20097
  chr12:131173698-131173729
  hypo

SEQ ID NO: 50888 - DNA, 2 bp, Homo sapiens
  chr12:131271975-131271977
  hypo
aa

SEQ ID NO: 50889 - DNA, 31 bp, Homo sapiens; identical to SEQ ID NO: 20100
  chr12:131272749-131272780
  hypo

SEQ ID NO: 50890 - DNA, 48 bp, Homo sapiens; identical to SEQ ID NO: 20101
  chr12:131572759-131572807
  hypo

SEQ ID NO: 50891 - DNA, 31 bp, Homo sapiens; identical to SEQ ID NO: 20103
  chr12:132043901-132043932
  hypo

SEQ ID NO: 50892 - DNA, 31 bp, Homo sapiens; identical to SEQ ID NO: 20105
  chr12:132197246-132197277
  hypo

SEQ ID NO: 50893 - DNA, 50 bp, Homo sapiens; identical to SEQ ID NO: 20106
  chr12:132218743-132218793
  hypo

SEQ ID NO: 50894 - DNA, 31 bp, Homo sapiens; identical to SEQ ID NO: 20107
  chr12:132218845-132218876
  hypo

SEQ ID NO: 50895 - DNA, 31 bp, Homo sapiens; identical to SEQ ID NO: 20114
  chr12:132278453-132278484
  hypo

SEQ ID NO: 50896 - DNA, 2 bp, Homo sapiens
  chr12:132284410-132284412
  hypo
tg

SEQ ID NO: 50897 - DNA, 2 bp, Homo sapiens
  chr12:132286007-132286009
  hypo
ca

SEQ ID NO: 50898 - DNA, 31 bp, Homo sapiens; identical to SEQ ID NO: 20118
  chr12:132326327-132326358
  hypo

SEQ ID NO: 50899 - DNA, 31 bp, Homo sapiens; identical to SEQ ID NO: 20119
  chr12:132326974-132327005
  hypo

SEQ ID NO: 50900 - DNA, 14 bp, Homo sapiens
  chr12:132377941-132377955
  hypo
agccattccaacta

SEQ ID NO: 50901 - DNA, 31 bp, Homo sapiens; identical to SEQ ID NO: 20123
  chr12:132378087-132378118
  hypo

SEQ ID NO: 50902 - DNA, 43 bp, Homo sapiens; identical to SEQ ID NO: 20124
  chr12:132378163-132378206
  hypo

SEQ ID NO: 50903 - DNA, 38 bp, Homo sapiens; identical to SEQ ID NO: 4866
  chr12:132380827-132380865
  hypo

SEQ ID NO: 50904 - DNA, 41 bp, Homo sapiens
  chr12:132423549-132423590
  hypo
tactgggattacaggcgtgagccactatgcccggccctcca

SEQ ID NO: 50905 - DNA, 30 bp, Homo sapiens; identical to SEQ ID NO: 20128
  chr12:132468722-132468752
  hypo

SEQ ID NO: 50906 - DNA, 51 bp, Homo sapiens; identical to SEQ ID NO: 4867
  chr12:132480345-132480396
  hypo

SEQ ID NO: 50907 - DNA, 31 bp, Homo sapiens; identical to SEQ ID NO: 20130
  chr12:132549671-132549702
  hypo

SEQ ID NO: 50908 - DNA, 31 bp, Homo sapiens; identical to SEQ ID NO: 20131
  chr12:132556449-132556480
  hypo

SEQ ID NO: 50909 - DNA, 57 bp, Homo sapiens; identical to SEQ ID NO: 20132
  chr12:132556612-132556669
  hypo

SEQ ID NO: 50910 - DNA, 37 bp, Homo sapiens; identical to SEQ ID NO: 20133
  chr12:132567749-132567786
  hypo

SEQ ID NO: 50911 - DNA, 85 bp, Homo sapiens; identical to SEQ ID NO: 20136
  chr12:132601573-132601658
  hypo

SEQ ID NO: 50912 - DNA, 27 bp, Homo sapiens
  chr12:132617157-132617184
  hypo
gcctcccacccctgcccggcgcagccc

SEQ ID NO: 50913 - DNA, 2 bp, Homo sapiens
  chr12:132643454-132643456
  hypo
gt

SEQ ID NO: 50914 - DNA, 31 bp, Homo sapiens; identical to SEQ ID NO: 20140
  chr12:132643565-132643596
  hypo

SEQ ID NO: 50915 - DNA, 1 bp, Homo sapiens
  chr12:132643845-132643846
  hypo
c

SEQ ID NO: 50916 - DNA, 7 bp, Homo sapiens
  chr12:132644008-132644015
  hypo
gatactg

SEQ ID NO: 50917 - DNA, 59 bp, Homo sapiens; identical to SEQ ID NO: 20145
  chr12:132666119-132666178
  hypo

SEQ ID NO: 50918 - DNA, 31 bp, Homo sapiens; identical to SEQ ID NO: 4868
  chr12:132982486-132982517
  hypo

SEQ ID NO: 50919 - DNA, 31 bp, Homo sapiens; identical to SEQ ID NO: 20148
  chr12:133158012-133158043
  hypo

SEQ ID NO: 50920 - DNA, 31 bp, Homo sapiens; identical to SEQ ID NO: 20149
  chr12:133199965-133199996
  hypo

SEQ ID NO: 50921 - DNA, 2 bp, Homo sapiens
  chr12:133200000-133200002
  hypo
aa

SEQ ID NO: 50922 - DNA, 31 bp, Homo sapiens; identical to SEQ ID NO: 20151
  chr12:133209329-133209360
  hypo

SEQ ID NO: 50923 - DNA, 31 bp, Homo sapiens; identical to SEQ ID NO: 20152
  chr12:133226343-133226374
  hypo

SEQ ID NO: 50924 - DNA, 37 bp, Homo sapiens; identical to SEQ ID NO: 20153
  chr12:133226389-133226426
  hypo

SEQ ID NO: 50925 - DNA, 32 bp, Homo sapiens; identical to SEQ ID NO: 20155
  chr12:133348834-133348866
  hypo

SEQ ID NO: 50926 - DNA, 59 bp, Homo sapiens; identical to SEQ ID NO: 20156
  chr12:133381357-133381416
  hypo

SEQ ID NO: 50927 - DNA, 48 bp, Homo sapiens; identical to SEQ ID NO: 20157
  chr12:133381437-133381485
  hypo

SEQ ID NO: 50928 - DNA, 31 bp, Homo sapiens; identical to SEQ ID NO: 20158
  chr12:133412378-133412409
  hypo

SEQ ID NO: 50929 - DNA, 30 bp, Homo sapiens; identical to SEQ ID NO: 20159
  chr12:133412413-133412443
  hypo

SEQ ID NO: 50930 - DNA, 42 bp, Homo sapiens; identical to SEQ ID NO: 20160
  chr12:133421486-133421528
  hypo

SEQ ID NO: 50931 - DNA, 103 bp, Homo sapiens; identical to SEQ ID NO: 4870
  chr12:133706913-133707016
  hypo

SEQ ID NO: 50932 - DNA, 48 bp, Homo sapiens; identical to SEQ ID NO: 20162
  chr12:133716925-133716973
  hypo

SEQ ID NO: 50933 - DNA, 31 bp, Homo sapiens; identical to SEQ ID NO: 20163
  chr12:133716994-133717025
  hypo

SEQ ID NO: 50934 - DNA, 31 bp, Homo sapiens; identical to SEQ ID NO: 20164
  chr12:133717031-133717062
  hypo

SEQ ID NO: 50935 - DNA, 31 bp, Homo sapiens; identical to SEQ ID NO: 20165
  chr12:133721474-133721505
  hypo

SEQ ID NO: 50936 - DNA, 35 bp, Homo sapiens; identical to SEQ ID NO: 20166
  chr13:20265762-20265797
  hypo

SEQ ID NO: 50937 - DNA, 87 bp, Homo sapiens; identical to SEQ ID NO: 4874
  chr13:20766767-20766854
  hypo

SEQ ID NO: 50938 - DNA, 2 bp, Homo sapiens
  chr13:21057335-21057337
  hypo
ca

SEQ ID NO: 50939 - DNA, 179 bp, Homo sapiens; identical to SEQ ID NO: 4876
  chr13:21099486-21099665
  hypo

SEQ ID NO: 50940 - DNA, 57 bp, Homo sapiens; identical to SEQ ID NO: 4877
  chr13:21099698-21099755
  hypo

SEQ ID NO: 50941 - DNA, 31 bp, Homo sapiens; identical to SEQ ID NO: 4878
  chr13:21099808-21099839
  hypo

SEQ ID NO: 50942 - DNA, 36 bp, Homo sapiens; identical to SEQ ID NO: 4879
  chr13:21099858-21099894
  hypo

SEQ ID NO: 50943 - DNA, 53 bp, Homo sapiens; identical to SEQ ID NO: 4880
  chr13:21099936-21099989
  hypo

SEQ ID NO: 50944 - DNA, 31 bp, Homo sapiens; identical to SEQ ID NO: 20177
  chr13:21562938-21562969
  hypo

SEQ ID NO: 50945 - DNA, 184 bp, Homo sapiens; identical to SEQ ID NO: 4884
  chr13:21635571-21635755
  hypo

SEQ ID NO: 50946 - DNA, 143 bp, Homo sapiens; identical to SEQ ID NO: 4885
  chr13:21635777-21635920
  hypo

SEQ ID NO: 50947 - DNA, 50 bp, Homo sapiens; identical to SEQ ID NO: 20180
  chr13:21677729-21677779
  hypo

SEQ ID NO: 50948 - DNA, 30 bp, Homo sapiens; identical to SEQ ID NO: 20181
  chr13:21752068-21752098
  hypo

SEQ ID NO: 50949 - DNA, 44 bp, Homo sapiens; identical to SEQ ID NO: 20182
  chr13:21894156-21894200
  hypo

SEQ ID NO: 50950 - DNA, 2 bp, Homo sapiens
  chr13:22048999-22049001
  hypo
ct

SEQ ID NO: 50951 - DNA, 11 bp, Homo sapiens
  chr13:22049023-22049034
  hypo
cgctctgtcgc

SEQ ID NO: 50952 - DNA, 187 bp, Homo sapiens; identical to SEQ ID NO: 4888
  chr13:22245212-22245399
  hypo

SEQ ID NO: 50953 - DNA, 97 bp, Homo sapiens; identical to SEQ ID NO: 4889
  chr13:22247844-22247941
  hypo

SEQ ID NO: 50954 - DNA, 36 bp, Homo sapiens; identical to SEQ ID NO: 20189
  chr13:24527675-24527711
  hypo

SEQ ID NO: 50955 - DNA, 31 bp, Homo sapiens; identical to SEQ ID NO: 20190
  chr13:24631435-24631466
  hypo

SEQ ID NO: 50956 - DNA, 36 bp, Homo sapiens; identical to SEQ ID NO: 20191
  chr13:24718838-24718874
  hypo

SEQ ID NO: 50957 - DNA, 370 bp, Homo sapiens; identical to SEQ ID NO: 4891
  chr13:24734819-24735189
  hypo

SEQ ID NO: 50958 - DNA, 353 bp, Homo sapiens; identical to SEQ ID NO: 4892
  chr13:24735198-24735551
  hypo

SEQ ID NO: 50959 - DNA, 31 bp, Homo sapiens; identical to SEQ ID NO: 20194
  chr13:24797365-24797396
  hypo

SEQ ID NO: 50960 - DNA, 61 bp, Homo sapiens; identical to SEQ ID NO: 20195
  chr13:24797651-24797712
  hypo

SEQ ID NO: 50961 - DNA, 49 bp, Homo sapiens; identical to SEQ ID NO: 20196
  chr13:24815547-24815596
  hypo

SEQ ID NO: 50962 - DNA, 31 bp, Homo sapiens; identical to SEQ ID NO: 20197
  chr13:24860470-24860501
  hypo

SEQ ID NO: 50963 - DNA, 61 bp, Homo sapiens; identical to SEQ ID NO: 20198
  chr13:24868947-24869008
  hypo

SEQ ID NO: 50964 - DNA, 31 bp, Homo sapiens; identical to SEQ ID NO: 20199
  chr13:24869026-24869057
  hypo

SEQ ID NO: 50965 - DNA, 31 bp, Homo sapiens; identical to SEQ ID NO: 20200
  chr13:24966169-24966200
  hypo

SEQ ID NO: 50966 - DNA, 1 bp, Homo sapiens
  chr13:25668696-25668697
  hypo
c

SEQ ID NO: 50967 - DNA, 8 bp, Homo sapiens
  chr13:25668723-25668731
  hypo
cgcctgta

SEQ ID NO: 50968 - DNA, 31 bp, Homo sapiens; identical to SEQ ID NO: 20202
  chr13:27058903-27058934
  hypo

SEQ ID NO: 50969 - DNA, 31 bp, Homo sapiens; identical to SEQ ID NO: 20203
  chr13:27556410-27556441
  hypo

SEQ ID NO: 50970 - DNA, 43 bp, Homo sapiens; identical to SEQ ID NO: 20204
  chr13:27620502-27620545
  hypo

SEQ ID NO: 50971 - DNA, 31 bp, Homo sapiens; identical to SEQ ID NO: 20205
  chr13:27620587-27620618
  hypo

SEQ ID NO: 50972 - DNA, 36 bp, Homo sapiens; identical to SEQ ID NO: 20206
  chr13:27620645-27620681
  hypo

SEQ ID NO: 50973 - DNA, 38 bp, Homo sapiens; identical to SEQ ID NO: 4894
  chr13:27744843-27744881
  hypo

SEQ ID NO: 50974 - DNA, 31 bp, Homo sapiens; identical to SEQ ID NO: 4895
  chr13:27744945-27744976
  hypo

SEQ ID NO: 50975 - DNA, 31 bp, Homo sapiens; identical to SEQ ID NO: 20209
  chr13:27915231-27915262
  hypo

SEQ ID NO: 50976 - DNA, 31 bp, Homo sapiens; identical to SEQ ID NO: 20210
  chr13:27934849-27934880
  hypo

SEQ ID NO: 50977 - DNA, 2 bp, Homo sapiens
  chr13:28239908-28239910
  hypo
at

SEQ ID NO: 50978 - DNA, 59 bp, Homo sapiens; identical to SEQ ID NO: 20213
  chr13:28745529-28745588
  hypo

SEQ ID NO: 50979 - DNA, 71 bp, Homo sapiens; identical to SEQ ID NO: 20214
  chr13:28745597-28745668
  hypo

SEQ ID NO: 50980 - DNA, 31 bp, Homo sapiens; identical to SEQ ID NO: 20219
  chr13:30079839-30079870
  hypo

SEQ ID NO: 50981 - DNA, 31 bp, Homo sapiens; identical to SEQ ID NO: 20220
  chr13:30087321-30087352
  hypo

SEQ ID NO: 50982 - DNA, 29 bp, Homo sapiens
  chr13:30106971-30107000
  hypo
agaattatgatcactgcgaatatgtcggg

SEQ ID NO: 50983 - DNA, 24 bp, Homo sapiens
  chr13:30141665-30141689
  hypo
tcccacactgaatgttcggaatgc

SEQ ID NO: 50984 - DNA, 37 bp, Homo sapiens; identical to SEQ ID NO: 20224
  chr13:30314400-30314437
  hypo

SEQ ID NO: 50985 - DNA, 31 bp, Homo sapiens; identical to SEQ ID NO: 20225
  chr13:30547747-30547778
  hypo

SEQ ID NO: 50986 - DNA, 31 bp, Homo sapiens; identical to SEQ ID NO: 20226
  chr13:30573485-30573516
  hypo

SEQ ID NO: 50987 - DNA, 31 bp, Homo sapiens; identical to SEQ ID NO: 20230
  chr13:30714428-30714459
  hypo

SEQ ID NO: 50988 - DNA, 43 bp, Homo sapiens; identical to SEQ ID NO: 4900
  chr13:30982668-30982711
  hypo

SEQ ID NO: 50989 - DNA, 31 bp, Homo sapiens; identical to SEQ ID NO: 20232
  chr13:30999761-30999792
  hypo

SEQ ID NO: 50990 - DNA, 31 bp, Homo sapiens; identical to SEQ ID NO: 20233
  chr13:31185333-31185364
  hypo

SEQ ID NO: 50991 - DNA, 31 bp, Homo sapiens; identical to SEQ ID NO: 20234
  chr13:31208406-31208437
  hypo

SEQ ID NO: 50992 - DNA, 51 bp, Homo sapiens; identical to SEQ ID NO: 20235
  chr13:31208502-31208553
  hypo

SEQ ID NO: 50993 - DNA, 51 bp, Homo sapiens; identical to SEQ ID NO: 20236
  chr13:31208562-31208613
  hypo

SEQ ID NO: 50994 - DNA, 2 bp, Homo sapiens
  chr13:31742916-31742918
  hypo
gc

SEQ ID NO: 50995 - DNA, 74 bp, Homo sapiens; identical to SEQ ID NO: 20240
  chr13:32526647-32526721
  hypo

SEQ ID NO: 50996 - DNA, 64 bp, Homo sapiens; identical to SEQ ID NO: 20241
  chr13:32526756-32526820
  hypo

SEQ ID NO: 50997 - DNA, 31 bp, Homo sapiens; identical to SEQ ID NO: 20242
  chr13:32527132-32527163
  hypo

SEQ ID NO: 50998 - DNA, 80 bp, Homo sapiens; identical to SEQ ID NO: 20243
  chr13:32885595-32885675
  hypo

SEQ ID NO: 50999 - DNA, 31 bp, Homo sapiens; identical to SEQ ID NO: 4901
  chr13:33000976-33001007
  hypo

SEQ ID NO: 51000 - DNA, 43 bp, Homo sapiens; identical to SEQ ID NO: 38535
  chr13:33001026-33001069
  hypo

SEQ ID NO: 51001 - DNA, 138 bp, Homo sapiens; identical to SEQ ID NO: 4904
  chr13:33001234-33001372
  hypo

SEQ ID NO: 51002 - DNA, 31 bp, Homo sapiens; identical to SEQ ID NO: 20248
  chr13:33103875-33103906
  hypo

SEQ ID NO: 51003 - DNA, 31 bp, Homo sapiens; identical to SEQ ID NO: 4905
  chr13:33162267-33162298
  hypo

SEQ ID NO: 51004 - DNA, 34 bp, Homo sapiens; identical to SEQ ID NO: 4906
  chr13:39612008-39612042
  hypo

SEQ ID NO: 51005 - DNA, 31 bp, Homo sapiens; identical to SEQ ID NO: 20252
  chr13:40956513-40956544
  hypo

SEQ ID NO: 51006 - DNA, 67 bp, Homo sapiens; identical to SEQ ID NO: 4907
  chr13:41364042-41364109
  hypo

SEQ ID NO: 51007 - DNA, 51 bp, Homo sapiens; identical to SEQ ID NO: 4908
  chr13:41364149-41364200
  hypo

SEQ ID NO: 51008 - DNA, 84 bp, Homo sapiens; identical to SEQ ID NO: 4909
  chr13:42615144-42615228
  hypo

SEQ ID NO: 51009 - DNA, 57 bp, Homo sapiens; identical to SEQ ID NO: 4910
  chr13:42615948-42616005
  hypo

SEQ ID NO: 51010 - DNA, 31 bp, Homo sapiens; identical to SEQ ID NO: 20259
  chr13:43179216-43179247
  hypo

SEQ ID NO: 51011 - DNA, 2 bp, Homo sapiens
  chr13:43543175-43543177
  hypo
ga

SEQ ID NO: 51012 - DNA, 42 bp, Homo sapiens
  chr13:43543227-43543269
  hypo
acctagccgtctgggcaccaggtgaaccggtttagctctgtt

SEQ ID NO: 51013 - DNA, 46 bp, Homo sapiens; identical to SEQ ID NO: 20261
  chr13:43543292-43543338
  hypo

SEQ ID NO: 51014 - DNA, 42 bp, Homo sapiens; identical to SEQ ID NO: 20266
  chr13:43598747-43598789
  hypo

SEQ ID NO: 51015 - DNA, 70 bp, Homo sapiens; identical to SEQ ID NO: 20267
  chr13:43621004-43621074
  hypo

SEQ ID NO: 51016 - DNA, 31 bp, Homo sapiens; identical to SEQ ID NO: 20268
  chr13:44543380-44543411
  hypo

SEQ ID NO: 51017 - DNA, 100 bp, Homo sapiens; identical to SEQ ID NO: 20269
  chr13:44543797-44543897
  hypo

SEQ ID NO: 51018 - DNA, 62 bp, Homo sapiens; identical to SEQ ID NO: 20270
  chr13:44543913-44543975
  hypo

SEQ ID NO: 51019 - DNA, 31 bp, Homo sapiens; identical to SEQ ID NO: 4921
  chr13:44544528-44544559
  hypo

SEQ ID NO: 51020 - DNA, 36 bp, Homo sapiens; identical to SEQ ID NO: 20272
  chr13:44544878-44544914
  hypo

SEQ ID NO: 51021 - DNA, 115 bp, Homo sapiens; identical to SEQ ID NO: 20273
  chr13:44544948-44545063
  hypo

SEQ ID NO: 51022 - DNA, 38 bp, Homo sapiens; identical to SEQ ID NO: 20275
  chr13:44947060-44947098
  hypo

SEQ ID NO: 51023 - DNA, 31 bp, Homo sapiens; identical to SEQ ID NO: 20276
  chr13:44947133-44947164
  hypo

SEQ ID NO: 51024 - DNA, 31 bp, Homo sapiens; identical to SEQ ID NO: 4922
  chr13:44991618-44991649
  hypo

SEQ ID NO: 51025 - DNA, 31 bp, Homo sapiens; identical to SEQ ID NO: 4923
  chr13:44991670-44991701
  hypo

SEQ ID NO: 51026 - DNA, 31 bp, Homo sapiens; identical to SEQ ID NO: 4924
  chr13:44991733-44991764
  hypo

SEQ ID NO: 51027 - DNA, 38 bp, Homo sapiens; identical to SEQ ID NO: 4925
  chr13:44991786-44991824
  hypo

SEQ ID NO: 51028 - DNA, 31 bp, Homo sapiens; identical to SEQ ID NO: 20285
  chr13:44994997-44995028
  hypo

SEQ ID NO: 51029 - DNA, 31 bp, Homo sapiens; identical to SEQ ID NO: 20286
  chr13:45302393-45302424
  hypo

SEQ ID NO: 51030 - DNA, 31 bp, Homo sapiens; identical to SEQ ID NO: 20288
  chr13:45465264-45465295
  hypo

SEQ ID NO: 51031 - DNA, 46 bp, Homo sapiens; identical to SEQ ID NO: 20289
  chr13:45500373-45500419
  hypo

SEQ ID NO: 51032 - DNA, 31 bp, Homo sapiens; identical to SEQ ID NO: 20290
  chr13:45500453-45500484
  hypo

SEQ ID NO: 51033 - DNA, 31 bp, Homo sapiens; identical to SEQ ID NO: 20291
  chr13:45500496-45500527
  hypo

SEQ ID NO: 51034 - DNA, 31 bp, Homo sapiens; identical to SEQ ID NO: 20292
  chr13:45500535-45500566
  hypo

SEQ ID NO: 51035 - DNA, 31 bp, Homo sapiens; identical to SEQ ID NO: 20294
  chr13:45564850-45564881
  hypo

SEQ ID NO: 51036 - DNA, 46 bp, Homo sapiens; identical to SEQ ID NO: 20296
  chr13:45926360-45926406
  hypo

SEQ ID NO: 51037 - DNA, 31 bp, Homo sapiens; identical to SEQ ID NO: 20297
  chr13:45926421-45926452
  hypo

SEQ ID NO: 51038 - DNA, 31 bp, Homo sapiens; identical to SEQ ID NO: 20298
  chr13:45938927-45938958
  hypo

SEQ ID NO: 51039 - DNA, 42 bp, Homo sapiens; identical to SEQ ID NO: 20299
  chr13:45939904-45939946
  hypo

SEQ ID NO: 51040 - DNA, 31 bp, Homo sapiens; identical to SEQ ID NO: 20300
  chr13:46048626-46048657
  hypo

SEQ ID NO: 51041 - DNA, 31 bp, Homo sapiens; identical to SEQ ID NO: 20301
  chr13:48759963-48759994
  hypo

SEQ ID NO: 51042 - DNA, 2 bp, Homo sapiens
  chr13:49922187-49922189
  hypo
ca

SEQ ID NO: 51043 - DNA, 35 bp, Homo sapiens; identical to SEQ ID NO: 20304
  chr13:49922252-49922287
  hypo

SEQ ID NO: 51044 - DNA, 31 bp, Homo sapiens; identical to SEQ ID NO: 20305
  chr13:49922316-49922347
  hypo

SEQ ID NO: 51045 - DNA, 36 bp, Homo sapiens; identical to SEQ ID NO: 20307
  chr13:50411346-50411382
  hypo

SEQ ID NO: 51046 - DNA, 49 bp, Homo sapiens; identical to SEQ ID NO: 20308
  chr13:50411441-50411490
  hypo

SEQ ID NO: 51047 - DNA, 31 bp, Homo sapiens; identical to SEQ ID NO: 20309
  chr13:50411498-50411529
  hypo

SEQ ID NO: 51048 - DNA, 31 bp, Homo sapiens; identical to SEQ ID NO: 20310
  chr13:52390198-52390229
  hypo

SEQ ID NO: 51049 - DNA, 31 bp, Homo sapiens; identical to SEQ ID NO: 20311
  chr13:52390971-52391002
  hypo

SEQ ID NO: 51050 - DNA, 2 bp, Homo sapiens
  chr13:52532585-52532587
  hypo
at

SEQ ID NO: 51051 - DNA, 18 bp, Homo sapiens
  chr13:52532670-52532688
  hypo
caccgaggagctgaaaga

SEQ ID NO: 51052 - DNA, 31 bp, Homo sapiens; identical to SEQ ID NO: 20314
  chr13:52532719-52532750
  hypo

SEQ ID NO: 51053 - DNA, 31 bp, Homo sapiens; identical to SEQ ID NO: 20315
  chr13:52532773-52532804
  hypo

SEQ ID NO: 51054 - DNA, 31 bp, Homo sapiens; identical to SEQ ID NO: 4939
  chr13:52702935-52702966
  hypo

SEQ ID NO: 51055 - DNA, 33 bp, Homo sapiens; identical to SEQ ID NO: 20317
  chr13:52770511-52770544
  hypo

SEQ ID NO: 51056 - DNA, 31 bp, Homo sapiens; identical to SEQ ID NO: 20318
  chr13:53171462-53171493
  hypo

SEQ ID NO: 51057 - DNA, 2 bp, Homo sapiens
  chr13:73636815-73636817
  hypo
at

SEQ ID NO: 51058 - DNA, 30 bp, Homo sapiens
  chr13:73636846-73636876
  hypo
acgcatccactactgcgattaccctggtat

SEQ ID NO: 51059 - DNA, 31 bp, Homo sapiens; identical to SEQ ID NO: 20321
  chr13:73824307-73824338
  hypo

SEQ ID NO: 51060 - DNA, 31 bp, Homo sapiens; identical to SEQ ID NO: 20322
  chr13:73824356-73824387
  hypo

SEQ ID NO: 51061 - DNA, 31 bp, Homo sapiens; identical to SEQ ID NO: 20323
  chr13:73824429-73824460
  hypo

SEQ ID NO: 51062 - DNA, 40 bp, Homo sapiens; identical to SEQ ID NO: 20324
  chr13:73824471-73824511
  hypo

SEQ ID NO: 51063 - DNA, 185 bp, Homo sapiens; identical to SEQ ID NO: 4947
  chr13:74709333-74709518
  hypo

SEQ ID NO: 51064 - DNA, 36 bp, Homo sapiens; identical to SEQ ID NO: 4948
  chr13:75794020-75794056
  hypo

SEQ ID NO: 51065 - DNA, 31 bp, Homo sapiens; identical to SEQ ID NO: 20327
  chr13:76043220-76043251
  hypo

SEQ ID NO: 51066 - DNA, 218 bp, Homo sapiens; identical to SEQ ID NO: 4950
  chr13:76055017-76055235
  hypo

SEQ ID NO: 51067 - DNA, 86 bp, Homo sapiens; identical to SEQ ID NO: 4951
  chr13:76055318-76055404
  hypo

SEQ ID NO: 51068 - DNA, 76 bp, Homo sapiens; identical to SEQ ID NO: 4952
  chr13:76055407-76055483
  hypo

SEQ ID NO: 51069 - DNA, 154 bp, Homo sapiens; identical to SEQ ID NO: 4953
  chr13:76055484-76055638
  hypo

SEQ ID NO: 51070 - DNA, 82 bp, Homo sapiens; identical to SEQ ID NO: 4954
  chr13:76055648-76055730
  hypo

SEQ ID NO: 51071 - DNA, 326 bp, Homo sapiens; identical to SEQ ID NO: 4955
  chr13:76055734-76056060
  hypo

SEQ ID NO: 51072 - DNA, 33 bp, Homo sapiens; identical to SEQ ID NO: 20334
  chr13:76291200-76291233
  hypo

SEQ ID NO: 51073 - DNA, 25 bp, Homo sapiens
  chr13:77553617-77553642
  hypo
ttttttgtctgaagcccggctgggt

SEQ ID NO: 51074 - DNA, 243 bp, Homo sapiens; identical to SEQ ID NO: 4959
  chr13:78272373-78272616
  hypo

SEQ ID NO: 51075 - DNA, 215 bp, Homo sapiens; identical to SEQ ID NO: 4972
  chr13:80916946-80917161
  hypo

SEQ ID NO: 51076 - DNA, 85 bp, Homo sapiens; identical to SEQ ID NO: 4973
  chr13:80917191-80917276
  hypo

SEQ ID NO: 51077 - DNA, 31 bp, Homo sapiens; identical to SEQ ID NO: 20343
  chr13:86086567-86086598
  hypo

SEQ ID NO: 51078 - DNA, 31 bp, Homo sapiens; identical to SEQ ID NO: 20344
  chr13:86086624-86086655
  hypo

SEQ ID NO: 51079 - DNA, 58 bp, Homo sapiens; identical to SEQ ID NO: 20345
  chr13:86086656-86086714
  hypo

SEQ ID NO: 51080 - DNA, 31 bp, Homo sapiens; identical to SEQ ID NO: 20346
  chr13:86086738-86086769
  hypo

SEQ ID NO: 51081 - DNA, 31 bp, Homo sapiens; identical to SEQ ID NO: 4976
  chr13:90384876-90384907
  hypo

SEQ ID NO: 51082 - DNA, 109 bp, Homo sapiens; identical to SEQ ID NO: 38594
  chr13:95201518-95201627
  hypo

SEQ ID NO: 51083 - DNA, 31 bp, Homo sapiens; identical to SEQ ID NO: 20350
  chr13:96126086-96126117
  hypo

SEQ ID NO: 51084 - DNA, 31 bp, Homo sapiens; identical to SEQ ID NO: 20351
  chr13:96126118-96126149
  hypo

SEQ ID NO: 51085 - DNA, 31 bp, Homo sapiens; identical to SEQ ID NO: 20352
  chr13:96353303-96353334
  hypo

SEQ ID NO: 51086 - DNA, 56 bp, Homo sapiens; identical to SEQ ID NO: 20353
  chr13:96353367-96353423
  hypo

SEQ ID NO: 51087 - DNA, 31 bp, Homo sapiens; identical to SEQ ID NO: 20354
  chr13:96353457-96353488
  hypo

SEQ ID NO: 51088 - DNA, 2 bp, Homo sapiens
  chr13:96409577-96409579
  hypo
gt

SEQ ID NO: 51089 - DNA, 23 bp, Homo sapiens
  chr13:96409644-96409667
  hypo
ttgcttcccggtaagtttttggg

SEQ ID NO: 51090 - DNA, 31 bp, Homo sapiens; identical to SEQ ID NO: 20356
  chr13:96409700-96409731
  hypo

SEQ ID NO: 51091 - DNA, 61 bp, Homo sapiens; identical to SEQ ID NO: 4980
  chr13:96705466-96705527
  hypo

SEQ ID NO: 51092 - DNA, 240 bp, Homo sapiens; identical to SEQ ID NO: 4981
  chr13:96705577-96705817
  hypo

SEQ ID NO: 51093 - DNA, 120 bp, Homo sapiens; identical to SEQ ID NO: 4982
  chr13:96705823-96705943
  hypo

SEQ ID NO: 51094 - DNA, 31 bp, Homo sapiens; identical to SEQ ID NO: 20360
  chr13:97668667-97668698
  hypo

SEQ ID NO: 51095 - DNA, 48 bp, Homo sapiens; identical to SEQ ID NO: 20361
  chr13:98528397-98528445
  hypo

SEQ ID NO: 51096 - DNA, 31 bp, Homo sapiens; identical to SEQ ID NO: 20362
  chr13:98528478-98528509
  hypo

SEQ ID NO: 51097 - DNA, 31 bp, Homo sapiens; identical to SEQ ID NO: 20363
  chr13:98688093-98688124
  hypo

SEQ ID NO: 51098 - DNA, 40 bp, Homo sapiens; identical to SEQ ID NO: 20364
  chr13:98695034-98695074
  hypo

SEQ ID NO: 51099 - DNA, 59 bp, Homo sapiens; identical to SEQ ID NO: 20365
  chr13:98761015-98761074
  hypo

SEQ ID NO: 51100 - DNA, 31 bp, Homo sapiens; identical to SEQ ID NO: 20367
  chr13:98768944-98768975
  hypo

SEQ ID NO: 51101 - DNA, 31 bp, Homo sapiens; identical to SEQ ID NO: 20368
  chr13:98769016-98769047
  hypo

SEQ ID NO: 51102 - DNA, 148 bp, Homo sapiens; identical to SEQ ID NO: 4985
  chr13:98795358-98795506
  hypo

SEQ ID NO: 51103 - DNA, 37 bp, Homo sapiens; identical to SEQ ID NO: 4986
  chr13:98795538-98795575
  hypo

SEQ ID NO: 51104 - DNA, 52 bp, Homo sapiens; identical to SEQ ID NO: 4987
  chr13:98795635-98795687
  hypo

SEQ ID NO: 51105 - DNA, 53 bp, Homo sapiens; identical to SEQ ID NO: 20373
  chr13:98829227-98829280
  hypo

SEQ ID NO: 51106 - DNA, 67 bp, Homo sapiens; identical to SEQ ID NO: 20374
  chr13:98829314-98829381
  hypo

SEQ ID NO: 51107 - DNA, 31 bp, Homo sapiens; identical to SEQ ID NO: 20376
  chr13:98861198-98861229
  hypo

SEQ ID NO: 51108 - DNA, 31 bp, Homo sapiens; identical to SEQ ID NO: 20377
  chr13:98969018-98969049
  hypo

SEQ ID NO: 51109 - DNA, 31 bp, Homo sapiens; identical to SEQ ID NO: 20378
  chr13:98981024-98981055
  hypo

SEQ ID NO: 51110 - DNA, 62 bp, Homo sapiens; identical to SEQ ID NO: 20379
  chr13:98981084-98981146
  hypo

SEQ ID NO: 51111 - DNA, 31 bp, Homo sapiens; identical to SEQ ID NO: 20380
  chr13:98981181-98981212
  hypo

SEQ ID NO: 51112 - DNA, 31 bp, Homo sapiens; identical to SEQ ID NO: 20381
  chr13:99045547-99045578
  hypo

SEQ ID NO: 51113 - DNA, 171 bp, Homo sapiens; identical to SEQ ID NO: 20382
  chr13:99047502-99047673
  hypo

SEQ ID NO: 51114 - DNA, 49 bp, Homo sapiens; identical to SEQ ID NO: 20383
  chr13:99047821-99047870
  hypo

SEQ ID NO: 51115 - DNA, 31 bp, Homo sapiens; identical to SEQ ID NO: 20384
  chr13:99054006-99054037
  hypo

SEQ ID NO: 51116 - DNA, 31 bp, Homo sapiens; identical to SEQ ID NO: 20385
  chr13:99074470-99074501
  hypo

SEQ ID NO: 51117 - DNA, 31 bp, Homo sapiens; identical to SEQ ID NO: 4989
  chr13:99129086-99129117
  hypo

SEQ ID NO: 51118 - DNA, 115 bp, Homo sapiens; identical to SEQ ID NO: 4990
  chr13:99229763-99229878
  hypo

SEQ ID NO: 51119 - DNA, 46 bp, Homo sapiens; identical to SEQ ID NO: 4991
  chr13:99229888-99229934
  hypo

SEQ ID NO: 51120 - DNA, 42 bp, Homo sapiens; identical to SEQ ID NO: 4992
  chr13:99229937-99229979
  hypo

SEQ ID NO: 51121 - DNA, 31 bp, Homo sapiens; identical to SEQ ID NO: 20390
  chr13:99336418-99336449
  hypo

SEQ ID NO: 51122 - DNA, 53 bp, Homo sapiens; identical to SEQ ID NO: 20391
  chr13:99376080-99376133
  hypo

SEQ ID NO: 51123 - DNA, 49 bp, Homo sapiens; identical to SEQ ID NO: 20392
  chr13:99376150-99376199
  hypo

SEQ ID NO: 51124 - DNA, 31 bp, Homo sapiens; identical to SEQ ID NO: 20393
  chr13:99376256-99376287
  hypo

SEQ ID NO: 51125 - DNA, 43 bp, Homo sapiens; identical to SEQ ID NO: 20394
  chr13:99427800-99427843
  hypo

SEQ ID NO: 51126 - DNA, 31 bp, Homo sapiens; identical to SEQ ID NO: 4993
  chr13:99739097-99739128
  hypo

SEQ ID NO: 51127 - DNA, 2 bp, Homo sapiens
  chr13:99851675-99851677
  hypo
gt

SEQ ID NO: 51128 - DNA, 31 bp, Homo sapiens; identical to SEQ ID NO: 20399
  chr13:99851786-99851817
  hypo

SEQ ID NO: 51129 - DNA, 31 bp, Homo sapiens; identical to SEQ ID NO: 20400
  chr13:99863150-99863181
  hypo

SEQ ID NO: 51130 - DNA, 31 bp, Homo sapiens; identical to SEQ ID NO: 20401
  chr13:99870196-99870227
  hypo

SEQ ID NO: 51131 - DNA, 31 bp, Homo sapiens; identical to SEQ ID NO: 20402
  chr13:100042130-100042161
  hypo

SEQ ID NO: 51132 - DNA, 79 bp, Homo sapiens; identical to SEQ ID NO: 20403
  chr13:100068638-100068717
  hypo

SEQ ID NO: 51133 - DNA, 40 bp, Homo sapiens; identical to SEQ ID NO: 20404
  chr13:100068733-100068773
  hypo

SEQ ID NO: 51134 - DNA, 38 bp, Homo sapiens; identical to SEQ ID NO: 4997
  chr13:100634142-100634180
  hypo

SEQ ID NO: 51135 - DNA, 31 bp, Homo sapiens; identical to SEQ ID NO: 20407
  chr13:100678150-100678181
  hypo

SEQ ID NO: 51136 - DNA, 81 bp, Homo sapiens; identical to SEQ ID NO: 20409
  chr13:101317802-101317883
  hypo

SEQ ID NO: 51137 - DNA, 45 bp, Homo sapiens; identical to SEQ ID NO: 20410
  chr13:101317967-101318012
  hypo

SEQ ID NO: 51138 - DNA, 68 bp, Homo sapiens; identical to SEQ ID NO: 20411
  chr13:101327900-101327968
  hypo

SEQ ID NO: 51139 - DNA, 31 bp, Homo sapiens; identical to SEQ ID NO: 20412
  chr13:101327970-101328001
  hypo

SEQ ID NO: 51140 - DNA, 52 bp, Homo sapiens; identical to SEQ ID NO: 20413
  chr13:101328004-101328056
  hypo

SEQ ID NO: 51141 - DNA, 49 bp, Homo sapiens; identical to SEQ ID NO: 20414
  chr13:101328059-101328108
  hypo

SEQ ID NO: 51142 - DNA, 31 bp, Homo sapiens; identical to SEQ ID NO: 5000
  chr13:103450907-103450938
  hypo

SEQ ID NO: 51143 - DNA, 2 bp, Homo sapiens
  chr13:103451012-103451014
  hypo
cc

SEQ ID NO: 51144 - DNA, 21 bp, Homo sapiens
  chr13:103451043-103451064
  hypo
atccaccgataaatgaagaag

SEQ ID NO: 51145 - DNA, 147 bp, Homo sapiens; identical to SEQ ID NO: 5002
  chr13:103451071-103451218
  hypo

SEQ ID NO: 51146 - DNA, 34 bp, Homo sapiens; identical to SEQ ID NO: 20420
  chr13:106788530-106788564
  hypo

SEQ ID NO: 51147 - DNA, 31 bp, Homo sapiens; identical to SEQ ID NO: 20421
  chr13:106788570-106788601
  hypo

SEQ ID NO: 51148 - DNA, 31 bp, Homo sapiens; identical to SEQ ID NO: 20422
  chr13:106788657-106788688
  hypo

SEQ ID NO: 51149 - DNA, 31 bp, Homo sapiens; identical to SEQ ID NO: 20423
  chr13:106788701-106788732
  hypo

SEQ ID NO: 51150 - DNA, 31 bp, Homo sapiens; identical to SEQ ID NO: 20424
  chr13:106886316-106886347
  hypo

SEQ ID NO: 51151 - DNA, 31 bp, Homo sapiens; identical to SEQ ID NO: 20425
  chr13:108210141-108210172
  hypo

SEQ ID NO: 51152 - DNA, 15 bp, Homo sapiens
  chr13:108518657-108518672
  hypo
cgctgctgctgctgc

SEQ ID NO: 51153 - DNA, 31 bp, Homo sapiens; identical to SEQ ID NO: 20427
  chr13:109318504-109318535
  hypo

SEQ ID NO: 51154 - DNA, 9 bp, Homo sapiens
  chr13:110436509-110436518
  hypo
cctctgggt

SEQ ID NO: 51155 - DNA, 31 bp, Homo sapiens; identical to SEQ ID NO: 5014
  chr13:110439117-110439148
  hypo

SEQ ID NO: 51156 - DNA, 35 bp, Homo sapiens; identical to SEQ ID NO: 20439
  chr13:111109169-111109204
  hypo

SEQ ID NO: 51157 - DNA, 39 bp, Homo sapiens; identical to SEQ ID NO: 20440
  chr13:111122537-111122576
  hypo

SEQ ID NO: 51158 - DNA, 31 bp, Homo sapiens; identical to SEQ ID NO: 20441
  chr13:111122610-111122641
  hypo

SEQ ID NO: 51159 - DNA, 31 bp, Homo sapiens; identical to SEQ ID NO: 20442
  chr13:111135307-111135338
  hypo

SEQ ID NO: 51160 - DNA, 46 bp, Homo sapiens; identical to SEQ ID NO: 20443
  chr13:111135397-111135443
  hypo

SEQ ID NO: 51161 - DNA, 31 bp, Homo sapiens; identical to SEQ ID NO: 20444
  chr13:111135447-111135478
  hypo

SEQ ID NO: 51162 - DNA, 31 bp, Homo sapiens; identical to SEQ ID NO: 20445
  chr13:111171237-111171268
  hypo

SEQ ID NO: 51163 - DNA, 31 bp, Homo sapiens; identical to SEQ ID NO: 20446
  chr13:111171957-111171988
  hypo

SEQ ID NO: 51164 - DNA, 317 bp, Homo sapiens; identical to SEQ ID NO: 5015
  chr13:111213551-111213868
  hypo

SEQ ID NO: 51165 - DNA, 150 bp, Homo sapiens; identical to SEQ ID NO: 5016
  chr13:111213877-111214027
  hypo

SEQ ID NO: 51166 - DNA, 38 bp, Homo sapiens; identical to SEQ ID NO: 5017
  chr13:111214222-111214260
  hypo

SEQ ID NO: 51167 - DNA, 106 bp, Homo sapiens; identical to SEQ ID NO: 5018
  chr13:111214274-111214380
  hypo

SEQ ID NO: 51168 - DNA, 31 bp, Homo sapiens; identical to SEQ ID NO: 5019
  chr13:111268136-111268167
  hypo

SEQ ID NO: 51169 - DNA, 74 bp, Homo sapiens; identical to SEQ ID NO: 5020
  chr13:111268234-111268308
  hypo

SEQ ID NO: 51170 - DNA, 39 bp, Homo sapiens; identical to SEQ ID NO: 20456
  chr13:111306358-111306397
  hypo

SEQ ID NO: 51171 - DNA, 31 bp, Homo sapiens; identical to SEQ ID NO: 20457
  chr13:111306421-111306452
  hypo

SEQ ID NO: 51172 - DNA, 54 bp, Homo sapiens; identical to SEQ ID NO: 20458
  chr13:111306453-111306507
  hypo

SEQ ID NO: 51173 - DNA, 31 bp, Homo sapiens; identical to SEQ ID NO: 20459
  chr13:111307807-111307838
  hypo

SEQ ID NO: 51174 - DNA, 2 bp, Homo sapiens
  chr13:111337749-111337751
  hypo
ga

SEQ ID NO: 51175 - DNA, 38 bp, Homo sapiens; identical to SEQ ID NO: 20461
  chr13:111363565-111363603
  hypo

SEQ ID NO: 51176 - DNA, 31 bp, Homo sapiens; identical to SEQ ID NO: 20464
  chr13:111409606-111409637
  hypo

SEQ ID NO: 51177 - DNA, 31 bp, Homo sapiens; identical to SEQ ID NO: 20465
  chr13:111481866-111481897
  hypo

SEQ ID NO: 51178 - DNA, 2 bp, Homo sapiens
  chr13:112559679-112559681
  hypo
ca

SEQ ID NO: 51179 - DNA, 35 bp, Homo sapiens
  chr13:112559742-112559777
  hypo
ctgcgtccccgcccccttccgcgtccccgccccct

SEQ ID NO: 51180 - DNA, 31 bp, Homo sapiens; identical to SEQ ID NO: 20467
  chr13:112559877-112559908
  hypo

SEQ ID NO: 51181 - DNA, 31 bp, Homo sapiens; identical to SEQ ID NO: 20468
  chr13:112559942-112559973
  hypo

SEQ ID NO: 51182 - DNA, 54 bp, Homo sapiens; identical to SEQ ID NO: 20469
  chr13:112904338-112904392
  hypo

SEQ ID NO: 51183 - DNA, 70 bp, Homo sapiens; identical to SEQ ID NO: 20470
  chr13:112904421-112904491
  hypo

SEQ ID NO: 51184 - DNA, 31 bp, Homo sapiens; identical to SEQ ID NO: 20471
  chr13:113097958-113097989
  hypo

SEQ ID NO: 51185 - DNA, 31 bp, Homo sapiens; identical to SEQ ID NO: 20472
  chr13:113357650-113357681
  hypo

SEQ ID NO: 51186 - DNA, 31 bp, Homo sapiens; identical to SEQ ID NO: 20473
  chr13:113364197-113364228
  hypo

SEQ ID NO: 51187 - DNA, 54 bp, Homo sapiens; identical to SEQ ID NO: 20474
  chr13:113366792-113366846
  hypo

SEQ ID NO: 51188 - DNA, 31 bp, Homo sapiens; identical to SEQ ID NO: 20475
  chr13:113366849-113366880
  hypo

SEQ ID NO: 51189 - DNA, 46 bp, Homo sapiens; identical to SEQ ID NO: 20476
  chr13:113366888-113366934
  hypo

SEQ ID NO: 51190 - DNA, 104 bp, Homo sapiens; identical to SEQ ID NO: 20477
  chr13:113382653-113382757
  hypo

SEQ ID NO: 51191 - DNA, 31 bp, Homo sapiens; identical to SEQ ID NO: 20478
  chr13:113382872-113382903
  hypo

SEQ ID NO: 51192 - DNA, 31 bp, Homo sapiens; identical to SEQ ID NO: 20479
  chr13:113418566-113418597
  hypo

SEQ ID NO: 51193 - DNA, 31 bp, Homo sapiens; identical to SEQ ID NO: 20480
  chr13:113448116-113448147
  hypo

SEQ ID NO: 51194 - DNA, 31 bp, Homo sapiens; identical to SEQ ID NO: 20481
  chr13:113463034-113463065
  hypo

SEQ ID NO: 51195 - DNA, 112 bp, Homo sapiens; identical to SEQ ID NO: 20482
  chr13:113472457-113472569
  hypo

SEQ ID NO: 51196 - DNA, 38 bp, Homo sapiens; identical to SEQ ID NO: 20483
  chr13:113482706-113482744
  hypo

SEQ ID NO: 51197 - DNA, 36 bp, Homo sapiens; identical to SEQ ID NO: 20484
  chr13:113493551-113493587
  hypo

SEQ ID NO: 51198 - DNA, 48 bp, Homo sapiens; identical to SEQ ID NO: 20485
  chr13:113497307-113497355
  hypo

SEQ ID NO: 51199 - DNA, 55 bp, Homo sapiens; identical to SEQ ID NO: 20486
  chr13:113499308-113499363
  hypo

SEQ ID NO: 51200 - DNA, 46 bp, Homo sapiens; identical to SEQ ID NO: 20487
  chr13:113500587-113500633
  hypo

SEQ ID NO: 51201 - DNA, 31 bp, Homo sapiens; identical to SEQ ID NO: 20488
  chr13:113507107-113507138
  hypo

SEQ ID NO: 51202 - DNA, 31 bp, Homo sapiens; identical to SEQ ID NO: 20489
  chr13:113507255-113507286
  hypo

SEQ ID NO: 51203 - DNA, 77 bp, Homo sapiens; identical to SEQ ID NO: 20490
  chr13:113508798-113508875
  hypo

SEQ ID NO: 51204 - DNA, 39 bp, Homo sapiens; identical to SEQ ID NO: 20491
  chr13:113508905-113508944
  hypo

SEQ ID NO: 51205 - DNA, 76 bp, Homo sapiens; identical to SEQ ID NO: 20492
  chr13:113516325-113516401
  hypo

SEQ ID NO: 51206 - DNA, 49 bp, Homo sapiens; identical to SEQ ID NO: 20493
  chr13:113536447-113536496
  hypo

SEQ ID NO: 51207 - DNA, 39 bp, Homo sapiens; identical to SEQ ID NO: 20494
  chr13:113536518-113536557
  hypo

SEQ ID NO: 51208 - DNA, 31 bp, Homo sapiens; identical to SEQ ID NO: 20495
  chr13:113536558-113536589
  hypo

SEQ ID NO: 51209 - DNA, 181 bp, Homo sapiens; identical to SEQ ID NO: 20496
  chr13:113537190-113537371
  hypo

SEQ ID NO: 51210 - DNA, 53 bp, Homo sapiens; identical to SEQ ID NO: 20497
  chr13:113539437-113539490
  hypo

SEQ ID NO: 51211 - DNA, 51 bp, Homo sapiens; identical to SEQ ID NO: 20498
  chr13:113539505-113539556
  hypo

SEQ ID NO: 51212 - DNA, 52 bp, Homo sapiens; identical to SEQ ID NO: 20499
  chr13:113539594-113539646
  hypo

SEQ ID NO: 51213 - DNA, 31 bp, Homo sapiens; identical to SEQ ID NO: 5025
  chr13:113548669-113548700
  hypo

SEQ ID NO: 51214 - DNA, 41 bp, Homo sapiens; identical to SEQ ID NO: 5026
  chr13:113597574-113597615
  hypo

SEQ ID NO: 51215 - DNA, 44 bp, Homo sapiens; identical to SEQ ID NO: 5027
  chr13:113597655-113597699
  hypo

SEQ ID NO: 51216 - DNA, 63 bp, Homo sapiens; identical to SEQ ID NO: 5028
  chr13:113597781-113597844
  hypo

SEQ ID NO: 51217 - DNA, 31 bp, Homo sapiens; identical to SEQ ID NO: 20506
  chr13:113666494-113666525
  hypo

SEQ ID NO: 51218 - DNA, 37 bp, Homo sapiens; identical to SEQ ID NO: 20507
  chr13:113666830-113666867
  hypo

SEQ ID NO: 51219 - DNA, 31 bp, Homo sapiens; identical to SEQ ID NO: 20508
  chr13:113673343-113673374
  hypo

SEQ ID NO: 51220 - DNA, 37 bp, Homo sapiens; identical to SEQ ID NO: 20509
  chr13:113684750-113684787
  hypo

SEQ ID NO: 51221 - DNA, 31 bp, Homo sapiens; identical to SEQ ID NO: 20510
  chr13:113703692-113703723
  hypo

SEQ ID NO: 51222 - DNA, 101 bp, Homo sapiens; identical to SEQ ID NO: 20511
  chr13:113703774-113703875
  hypo

SEQ ID NO: 51223 - DNA, 31 bp, Homo sapiens; identical to SEQ ID NO: 20512
  chr13:113720175-113720206
  hypo

SEQ ID NO: 51224 - DNA, 31 bp, Homo sapiens; identical to SEQ ID NO: 20513
  chr13:113731261-113731292
  hypo

SEQ ID NO: 51225 - DNA, 31 bp, Homo sapiens; identical to SEQ ID NO: 20514
  chr13:113745595-113745626
  hypo

SEQ ID NO: 51226 - DNA, 1 bp, Homo sapiens
  chr13:113825962-113825963
  hypo
g

SEQ ID NO: 51227 - DNA, 7 bp, Homo sapiens
  chr13:113825992-113825999
  hypo
gaatgac

SEQ ID NO: 51228 - DNA, 81 bp, Homo sapiens; identical to SEQ ID NO: 20516
  chr13:113950840-113950921
  hypo

SEQ ID NO: 51229 - DNA, 59 bp, Homo sapiens; identical to SEQ ID NO: 5031
  chr13:113951224-113951283
  hypo

SEQ ID NO: 51230 - DNA, 31 bp, Homo sapiens; identical to SEQ ID NO: 20520
  chr13:113986523-113986554
  hypo

SEQ ID NO: 51231 - DNA, 31 bp, Homo sapiens; identical to SEQ ID NO: 20521
  chr13:113987422-113987453
  hypo

SEQ ID NO: 51232 - DNA, 31 bp, Homo sapiens; identical to SEQ ID NO: 20522
  chr13:113990085-113990116
  hypo

SEQ ID NO: 51233 - DNA, 55 bp, Homo sapiens; identical to SEQ ID NO: 20524
  chr13:114002307-114002362
  hypo

SEQ ID NO: 51234 - DNA, 98 bp, Homo sapiens; identical to SEQ ID NO: 20525
  chr13:114003075-114003173
  hypo

SEQ ID NO: 51235 - DNA, 92 bp, Homo sapiens; identical to SEQ ID NO: 20526
  chr13:114009703-114009795
  hypo

SEQ ID NO: 51236 - DNA, 229 bp, Homo sapiens; identical to SEQ ID NO: 28488
  chr13:114017991-114018220
  hypo

SEQ ID NO: 51237 - DNA, 31 bp, Homo sapiens; identical to SEQ ID NO: 5035
  chr13:114048391-114048422
  hypo

SEQ ID NO: 51238 - DNA, 2 bp, Homo sapiens
  chr13:114074573-114074575
  hypo
tg

SEQ ID NO: 51239 - DNA, 31 bp, Homo sapiens; identical to SEQ ID NO: 20536
  chr13:114081077-114081108
  hypo

SEQ ID NO: 51240 - DNA, 2 bp, Homo sapiens
  chr13:114108108-114108110
  hypo
ag

SEQ ID NO: 51241 - DNA, 2 bp, Homo sapiens
  chr13:114115111-114115113
  hypo
cc

SEQ ID NO: 51242 - DNA, 66 bp, Homo sapiens
  chr13:114115142-114115208
  hypo
gccacgttctgaggaggccccggagtggccccagctcagccctgcagtctccggcaaggtgacaga

SEQ ID NO: 51243 - DNA, 31 bp, Homo sapiens; identical to SEQ ID NO: 20539
  chr13:114115218-114115249
  hypo

SEQ ID NO: 51244 - DNA, 31 bp, Homo sapiens; identical to SEQ ID NO: 20543
  chr13:114185373-114185404
  hypo

SEQ ID NO: 51245 - DNA, 31 bp, Homo sapiens; identical to SEQ ID NO: 20544
  chr13:114189825-114189856
  hypo

SEQ ID NO: 51246 - DNA, 11 bp, Homo sapiens
  chr13:114190102-114190113
  hypo
ggctggggatg

SEQ ID NO: 51247 - DNA, 30 bp, Homo sapiens; identical to SEQ ID NO: 20546
  chr13:114190393-114190423
  hypo

SEQ ID NO: 51248 - DNA, 46 bp, Homo sapiens; identical to SEQ ID NO: 20547
  chr13:114193106-114193152
  hypo

SEQ ID NO: 51249 - DNA, 47 bp, Homo sapiens
  chr13:114202768-114202815
  hypo
tgagtggcttccccccgcggagcgcttctcgggcggcacgggctgca

SEQ ID NO: 51250 - DNA, 31 bp, Homo sapiens; identical to SEQ ID NO: 20550
  chr13:114206580-114206611
  hypo

SEQ ID NO: 51251 - DNA, 31 bp, Homo sapiens; identical to SEQ ID NO: 5036
  chr13:114238865-114238896
  hypo

SEQ ID NO: 51252 - DNA, 43 bp, Homo sapiens; identical to SEQ ID NO: 20552
  chr13:114244324-114244367
  hypo

SEQ ID NO: 51253 - DNA, 31 bp, Homo sapiens; identical to SEQ ID NO: 20553
  chr13:114246190-114246221
  hypo

SEQ ID NO: 51254 - DNA, 84 bp, Homo sapiens; identical to SEQ ID NO: 20554
  chr13:114246252-114246336
  hypo

SEQ ID NO: 51255 - DNA, 46 bp, Homo sapiens; identical to SEQ ID NO: 20555
  chr13:114258209-114258255
  hypo

SEQ ID NO: 51256 - DNA, 37 bp, Homo sapiens; identical to SEQ ID NO: 20556
  chr13:114258258-114258295
  hypo

SEQ ID NO: 51257 - DNA, 31 bp, Homo sapiens; identical to SEQ ID NO: 20557
  chr13:114264680-114264711
  hypo

SEQ ID NO: 51258 - DNA, 31 bp, Homo sapiens; identical to SEQ ID NO: 20559
  chr13:114287596-114287627
  hypo

SEQ ID NO: 51259 - DNA, 42 bp, Homo sapiens; identical to SEQ ID NO: 20560
  chr13:114288212-114288254
  hypo

SEQ ID NO: 51260 - DNA, 101 bp, Homo sapiens; identical to SEQ ID NO: 20561
  chr13:114290174-114290275
  hypo

SEQ ID NO: 51261 - DNA, 31 bp, Homo sapiens; identical to SEQ ID NO: 20562
  chr13:114293924-114293955
  hypo

SEQ ID NO: 51262 - DNA, 81 bp, Homo sapiens; identical to SEQ ID NO: 20563
  chr13:114300499-114300580
  hypo

SEQ ID NO: 51263 - DNA, 14 bp, Homo sapiens
  chr13:114302352-114302366
  hypo
gccgcagctgtgtt

SEQ ID NO: 51264 - DNA, 31 bp, Homo sapiens; identical to SEQ ID NO: 20568
  chr13:114440432-114440463
  hypo

SEQ ID NO: 51265 - DNA, 31 bp, Homo sapiens; identical to SEQ ID NO: 20575
  chr13:114748177-114748208
  hypo

SEQ ID NO: 51266 - DNA, 61 bp, Homo sapiens
  chr13:114751053-114751114
  hypo
ccgtccagggcaggcacgggagtggcactcactggcttccatatttcgtcttcttgaactt

SEQ ID NO: 51267 - DNA, 31 bp, Homo sapiens; identical to SEQ ID NO: 20580
  chr13:114751115-114751146
  hypo

SEQ ID NO: 51268 - DNA, 31 bp, Homo sapiens; identical to SEQ ID NO: 20581
  chr13:114764645-114764676
  hypo

SEQ ID NO: 51269 - DNA, 2 bp, Homo sapiens
  chr13:114765043-114765045
  hypo
gg

SEQ ID NO: 51270 - DNA, 2 bp, Homo sapiens
  chr13:114769985-114769987
  hypo
ct

SEQ ID NO: 51271 - DNA, 16 bp, Homo sapiens
  chr13:114770192-114770208
  hypo
acggagatttctcaag

SEQ ID NO: 51272 - DNA, 31 bp, Homo sapiens; identical to SEQ ID NO: 20591
  chr13:114773206-114773237
  hypo

SEQ ID NO: 51273 - DNA, 31 bp, Homo sapiens; identical to SEQ ID NO: 20592
  chr13:114773250-114773281
  hypo

SEQ ID NO: 51274 - DNA, 2 bp, Homo sapiens
  chr13:114774946-114774948
  hypo
tg

SEQ ID NO: 51275 - DNA, 44 bp, Homo sapiens
  chr13:114776259-114776303
  hypo
tggggaggagggggccgcgaggggagtagggggctgcgtgacga

SEQ ID NO: 51276 - DNA, 42 bp, Homo sapiens; identical to SEQ ID NO: 5041
  chr13:114776458-114776500
  hypo

SEQ ID NO: 51277 - DNA, 2 bp, Homo sapiens
  chr13:114777009-114777011
  hypo
gg

SEQ ID NO: 51278 - DNA, 31 bp, Homo sapiens; identical to SEQ ID NO: 20598
  chr13:114777571-114777602
  hypo

SEQ ID NO: 51279 - DNA, 2 bp, Homo sapiens
  chr13:114778696-114778698
  hypo
ac

SEQ ID NO: 51280 - DNA, 91 bp, Homo sapiens
  chr13:114778731-114778822
  hypo
agagagaagcagggtgaccgttttcctcgggcacaatggcctcgtggggacaccatgccccggccccctgagggtccgcagggaagtccag

SEQ ID NO: 51281 - DNA, 31 bp, Homo sapiens; identical to SEQ ID NO: 20604
  chr13:114785670-114785701
  hypo

SEQ ID NO: 51282 - DNA, 31 bp, Homo sapiens; identical to SEQ ID NO: 20610
  chr13:114847130-114847161
  hypo

SEQ ID NO: 51283 - DNA, 2 bp, Homo sapiens
  chr13:114855473-114855475
  hypo
at

SEQ ID NO: 51284 - DNA, 31 bp, Homo sapiens; identical to SEQ ID NO: 20615
  chr13:114869699-114869730
  hypo

SEQ ID NO: 51285 - DNA, 31 bp, Homo sapiens; identical to SEQ ID NO: 20616
  chr13:114869753-114869784
  hypo

SEQ ID NO: 51286 - DNA, 31 bp, Homo sapiens; identical to SEQ ID NO: 5042
  chr13:114976825-114976856
  hypo

SEQ ID NO: 51287 - DNA, 8 bp, Homo sapiens
  chr13:114989884-114989892
  hypo
ctggagcc

SEQ ID NO: 51288 - DNA, 31 bp, Homo sapiens; identical to SEQ ID NO: 20619
  chr14:20146797-20146828
  hypo

SEQ ID NO: 51289 - DNA, 31 bp, Homo sapiens; identical to SEQ ID NO: 20620
  chr14:21548996-21549027
  hypo

SEQ ID NO: 51290 - DNA, 42 bp, Homo sapiens; identical to SEQ ID NO: 20622
  chr14:21688655-21688697
  hypo

SEQ ID NO: 51291 - DNA, 31 bp, Homo sapiens; identical to SEQ ID NO: 20626
  chr14:21876123-21876154
  hypo

SEQ ID NO: 51292 - DNA, 2 bp, Homo sapiens
  chr14:21943009-21943011
  hypo
ta

SEQ ID NO: 51293 - DNA, 31 bp, Homo sapiens; identical to SEQ ID NO: 20629
  chr14:21980160-21980191
  hypo

SEQ ID NO: 51294 - DNA, 47 bp, Homo sapiens; identical to SEQ ID NO: 20632
  chr14:23183245-23183292
  hypo

SEQ ID NO: 51295 - DNA, 35 bp, Homo sapiens; identical to SEQ ID NO: 38656
  chr14:23355356-23355391
  hypo

SEQ ID NO: 51296 - DNA, 31 bp, Homo sapiens; identical to SEQ ID NO: 20635
  chr14:23400198-23400229
  hypo

SEQ ID NO: 51297 - DNA, 31 bp, Homo sapiens; identical to SEQ ID NO: 20637
  chr14:23457305-23457336
  hypo

SEQ ID NO: 51298 - DNA, 34 bp, Homo sapiens; identical to SEQ ID NO: 20638
  chr14:23518258-23518292
  hypo

SEQ ID NO: 51299 - DNA, 45 bp, Homo sapiens; identical to SEQ ID NO: 20639
  chr14:23518318-23518363
  hypo

SEQ ID NO: 51300 - DNA, 31 bp, Homo sapiens; identical to SEQ ID NO: 20640
  chr14:23536685-23536716
  hypo

SEQ ID NO: 51301 - DNA, 31 bp, Homo sapiens; identical to SEQ ID NO: 20641
  chr14:23634538-23634569
  hypo

SEQ ID NO: 51302 - DNA, 74 bp, Homo sapiens; identical to SEQ ID NO: 5063
  chr14:23776070-23776144
  hypo

SEQ ID NO: 51303 - DNA, 78 bp, Homo sapiens; identical to SEQ ID NO: 5064
  chr14:23776181-23776259
  hypo

SEQ ID NO: 51304 - DNA, 2 bp, Homo sapiens
  chr14:23776953-23776955
  hypo
cc

SEQ ID NO: 51305 - DNA, 31 bp, Homo sapiens; identical to SEQ ID NO: 20648
  chr14:23777242-23777273
  hypo

SEQ ID NO: 51306 - DNA, 47 bp, Homo sapiens; identical to SEQ ID NO: 20649
  chr14:24108493-24108540
  hypo

SEQ ID NO: 51307 - DNA, 39 bp, Homo sapiens; identical to SEQ ID NO: 20651
  chr14:24542843-24542882
  hypo

SEQ ID NO: 51308 - DNA, 31 bp, Homo sapiens; identical to SEQ ID NO: 20652
  chr14:24546649-24546680
  hypo

SEQ ID NO: 51309 - DNA, 31 bp, Homo sapiens; identical to SEQ ID NO: 20653
  chr14:24722548-24722579
  hypo

SEQ ID NO: 51310 - DNA, 51 bp, Homo sapiens; identical to SEQ ID NO: 20654
  chr14:24722592-24722643
  hypo

SEQ ID NO: 51311 - DNA, 31 bp, Homo sapiens; identical to SEQ ID NO: 20655
  chr14:24859466-24859497
  hypo

SEQ ID NO: 51312 - DNA, 31 bp, Homo sapiens; identical to SEQ ID NO: 20656
  chr14:24877468-24877499
  hypo

SEQ ID NO: 51313 - DNA, 38 bp, Homo sapiens; identical to SEQ ID NO: 20657
  chr14:30790493-30790531
  hypo

SEQ ID NO: 51314 - DNA, 35 bp, Homo sapiens; identical to SEQ ID NO: 20658
  chr14:31027392-31027427
  hypo

SEQ ID NO: 51315 - DNA, 31 bp, Homo sapiens; identical to SEQ ID NO: 20660
  chr14:31478709-31478740
  hypo

SEQ ID NO: 51316 - DNA, 34 bp, Homo sapiens; identical to SEQ ID NO: 20662
  chr14:31629127-31629161
  hypo

SEQ ID NO: 51317 - DNA, 31 bp, Homo sapiens; identical to SEQ ID NO: 20663
  chr14:31707415-31707446
  hypo

SEQ ID NO: 51318 - DNA, 31 bp, Homo sapiens; identical to SEQ ID NO: 20666
  chr14:32606878-32606909
  hypo

SEQ ID NO: 51319 - DNA, 31 bp, Homo sapiens; identical to SEQ ID NO: 20667
  chr14:34567013-34567044
  hypo

SEQ ID NO: 51320 - DNA, 33 bp, Homo sapiens; identical to SEQ ID NO: 20672
  chr14:35136956-35136989
  hypo

SEQ ID NO: 51321 - DNA, 2 bp, Homo sapiens
  chr14:35507692-35507694
  hypo
tc

SEQ ID NO: 51322 - DNA, 31 bp, Homo sapiens; identical to SEQ ID NO: 20674
  chr14:37611523-37611554
  hypo

SEQ ID NO: 51323 - DNA, 31 bp, Homo sapiens; identical to SEQ ID NO: 5072
  chr14:38678113-38678144
  hypo

SEQ ID NO: 51324 - DNA, 31 bp, Homo sapiens; identical to SEQ ID NO: 5073
  chr14:39735664-39735695
  hypo

SEQ ID NO: 51325 - DNA, 44 bp, Homo sapiens; identical to SEQ ID NO: 5074
  chr14:39735734-39735778
  hypo

SEQ ID NO: 51326 - DNA, 31 bp, Homo sapiens; identical to SEQ ID NO: 20679
  chr14:39911464-39911495
  hypo

SEQ ID NO: 51327 - DNA, 31 bp, Homo sapiens; identical to SEQ ID NO: 20680
  chr14:39914487-39914518
  hypo

SEQ ID NO: 51328 - DNA, 11 bp, Homo sapiens
  chr14:50333645-50333656
  hypo
cagttatgcac

SEQ ID NO: 51329 - DNA, 4 bp, Homo sapiens
  chr14:50333675-50333679
  hypo
gctt

SEQ ID NO: 51330 - DNA, 6 bp, Homo sapiens
  chr14:50681857-50681863
  hypo
tgtttc

SEQ ID NO: 51331 - DNA, 31 bp, Homo sapiens; identical to SEQ ID NO: 20689
  chr14:51171101-51171132
  hypo

SEQ ID NO: 51332 - DNA, 31 bp, Homo sapiens; identical to SEQ ID NO: 20694
  chr14:55517488-55517519
  hypo

SEQ ID NO: 51333 - DNA, 2 bp, Homo sapiens
  chr14:57045519-57045521
  hypo
gt

SEQ ID NO: 51334 - DNA, 31 bp, Homo sapiens; identical to SEQ ID NO: 5085
  chr14:57734480-57734511
  hypo

SEQ ID NO: 51335 - DNA, 37 bp, Homo sapiens; identical to SEQ ID NO: 20701
  chr14:59113232-59113269
  hypo

SEQ ID NO: 51336 - DNA, 31 bp, Homo sapiens; identical to SEQ ID NO: 20702
  chr14:59113294-59113325
  hypo

SEQ ID NO: 51337 - DNA, 45 bp, Homo sapiens; identical to SEQ ID NO: 20704
  chr14:59821158-59821203
  hypo

SEQ ID NO: 51338 - DNA, 31 bp, Homo sapiens; identical to SEQ ID NO: 20705
  chr14:59821211-59821242
  hypo

SEQ ID NO: 51339 - DNA, 31 bp, Homo sapiens; identical to SEQ ID NO: 20706
  chr14:59935187-59935218
  hypo

SEQ ID NO: 51340 - DNA, 44 bp, Homo sapiens; identical to SEQ ID NO: 20707
  chr14:59935230-59935274
  hypo

SEQ ID NO: 51341 - DNA, 31 bp, Homo sapiens; identical to SEQ ID NO: 20708
  chr14:59935326-59935357
  hypo

SEQ ID NO: 51342 - DNA, 31 bp, Homo sapiens; identical to SEQ ID NO: 5088
  chr14:61736456-61736487
  hypo

SEQ ID NO: 51343 - DNA, 63 bp, Homo sapiens; identical to SEQ ID NO: 20711
  chr14:62015168-62015231
  hypo

SEQ ID NO: 51344 - DNA, 61 bp, Homo sapiens; identical to SEQ ID NO: 20712
  chr14:62015256-62015317
  hypo

SEQ ID NO: 51345 - DNA, 89 bp, Homo sapiens; identical to SEQ ID NO: 5089
  chr14:62161812-62161901
  hypo

SEQ ID NO: 51346 - DNA, 93 bp, Homo sapiens; identical to SEQ ID NO: 5090
  chr14:62162323-62162416
  hypo

SEQ ID NO: 51347 - DNA, 203 bp, Homo sapiens; identical to SEQ ID NO: 5091
  chr14:62162425-62162628
  hypo

SEQ ID NO: 51348 - DNA, 38 bp, Homo sapiens; identical to SEQ ID NO: 5093
  chr14:62162926-62162964
  hypo

SEQ ID NO: 51349 - DNA, 66 bp, Homo sapiens; identical to SEQ ID NO: 20718
  chr14:64061917-64061983
  hypo

SEQ ID NO: 51350 - DNA, 31 bp, Homo sapiens; identical to SEQ ID NO: 5094
  chr14:64182959-64182990
  hypo

SEQ ID NO: 51351 - DNA, 36 bp, Homo sapiens; identical to SEQ ID NO: 20720
  chr14:64227544-64227580
  hypo

SEQ ID NO: 51352 - DNA, 37 bp, Homo sapiens; identical to SEQ ID NO: 20721
  chr14:64992808-64992845
  hypo

SEQ ID NO: 51353 - DNA, 69 bp, Homo sapiens; identical to SEQ ID NO: 20726
  chr14:65194542-65194611
  hypo

SEQ ID NO: 51354 - DNA, 39 bp, Homo sapiens; identical to SEQ ID NO: 20727
  chr14:65194627-65194666
  hypo

SEQ ID NO: 51355 - DNA, 31 bp, Homo sapiens; identical to SEQ ID NO: 20728
  chr14:65194803-65194834
  hypo

SEQ ID NO: 51356 - DNA, 31 bp, Homo sapiens; identical to SEQ ID NO: 20729
  chr14:65195784-65195815
  hypo

SEQ ID NO: 51357 - DNA, 31 bp, Homo sapiens; identical to SEQ ID NO: 20730
  chr14:65199533-65199564
  hypo

SEQ ID NO: 51358 - DNA, 31 bp, Homo sapiens; identical to SEQ ID NO: 20731
  chr14:65203193-65203224
  hypo

SEQ ID NO: 51359 - DNA, 76 bp, Homo sapiens; identical to SEQ ID NO: 20732
  chr14:65208027-65208103
  hypo

SEQ ID NO: 51360 - DNA, 76 bp, Homo sapiens; identical to SEQ ID NO: 20733
  chr14:65208114-65208190
  hypo

SEQ ID NO: 51361 - DNA, 54 bp, Homo sapiens; identical to SEQ ID NO: 20734
  chr14:65209827-65209881
  hypo

SEQ ID NO: 51362 - DNA, 79 bp, Homo sapiens; identical to SEQ ID NO: 20735
  chr14:65209888-65209967
  hypo

SEQ ID NO: 51363 - DNA, 31 bp, Homo sapiens; identical to SEQ ID NO: 20736
  chr14:65210331-65210362
  hypo

SEQ ID NO: 51364 - DNA, 75 bp, Homo sapiens; identical to SEQ ID NO: 20737
  chr14:65215873-65215948
  hypo

SEQ ID NO: 51365 - DNA, 31 bp, Homo sapiens; identical to SEQ ID NO: 20738
  chr14:65217132-65217163
  hypo

SEQ ID NO: 51366 - DNA, 31 bp, Homo sapiens; identical to SEQ ID NO: 20739
  chr14:65220229-65220260
  hypo

SEQ ID NO: 51367 - DNA, 31 bp, Homo sapiens; identical to SEQ ID NO: 20740
  chr14:65220280-65220311
  hypo

SEQ ID NO: 51368 - DNA, 49 bp, Homo sapiens; identical to SEQ ID NO: 20741
  chr14:65220323-65220372
  hypo

SEQ ID NO: 51369 - DNA, 47 bp, Homo sapiens; identical to SEQ ID NO: 20742
  chr14:65236249-65236296
  hypo

SEQ ID NO: 51370 - DNA, 85 bp, Homo sapiens; identical to SEQ ID NO: 20743
  chr14:65237646-65237731
  hypo

SEQ ID NO: 51371 - DNA, 31 bp, Homo sapiens; identical to SEQ ID NO: 20744
  chr14:65240158-65240189
  hypo

SEQ ID NO: 51372 - DNA, 55 bp, Homo sapiens; identical to SEQ ID NO: 20745
  chr14:65248986-65249041
  hypo

SEQ ID NO: 51373 - DNA, 46 bp, Homo sapiens; identical to SEQ ID NO: 20746
  chr14:65271601-65271647
  hypo

SEQ ID NO: 51374 - DNA, 31 bp, Homo sapiens; identical to SEQ ID NO: 20749
  chr14:65532530-65532561
  hypo

SEQ ID NO: 51375 - DNA, 31 bp, Homo sapiens; identical to SEQ ID NO: 20750
  chr14:67860125-67860156
  hypo

SEQ ID NO: 51376 - DNA, 110 bp, Homo sapiens; identical to SEQ ID NO: 20751
  chr14:67864420-67864530
  hypo

SEQ ID NO: 51377 - DNA, 31 bp, Homo sapiens; identical to SEQ ID NO: 20752
  chr14:67864559-67864590
  hypo

SEQ ID NO: 51378 - DNA, 31 bp, Homo sapiens; identical to SEQ ID NO: 20753
  chr14:67888348-67888379
  hypo

SEQ ID NO: 51379 - DNA, 59 bp, Homo sapiens; identical to SEQ ID NO: 20754
  chr14:67888395-67888454
  hypo

SEQ ID NO: 51380 - DNA, 39 bp, Homo sapiens; identical to SEQ ID NO: 20755
  chr14:67888489-67888528
  hypo

SEQ ID NO: 51381 - DNA, 31 bp, Homo sapiens; identical to SEQ ID NO: 20759
  chr14:68621852-68621883
  hypo

SEQ ID NO: 51382 - DNA, 44 bp, Homo sapiens; identical to SEQ ID NO: 20760
  chr14:69153994-69154038
  hypo

SEQ ID NO: 51383 - DNA, 31 bp, Homo sapiens; identical to SEQ ID NO: 20761
  chr14:69218774-69218805
  hypo

SEQ ID NO: 51384 - DNA, 31 bp, Homo sapiens; identical to SEQ ID NO: 20762
  chr14:69218837-69218868
  hypo

SEQ ID NO: 51385 - DNA, 31 bp, Homo sapiens; identical to SEQ ID NO: 20763
  chr14:69229175-69229206
  hypo

SEQ ID NO: 51386 - DNA, 31 bp, Homo sapiens; identical to SEQ ID NO: 5112
  chr14:69258877-69258908
  hypo

SEQ ID NO: 51387 - DNA, 31 bp, Homo sapiens; identical to SEQ ID NO: 5114
  chr14:69259383-69259414
  hypo

SEQ ID NO: 51388 - DNA, 31 bp, Homo sapiens; identical to SEQ ID NO: 5115
  chr14:69259419-69259450
  hypo

SEQ ID NO: 51389 - DNA, 31 bp, Homo sapiens; identical to SEQ ID NO: 5116
  chr14:69259474-69259505
  hypo

SEQ ID NO: 51390 - DNA, 37 bp, Homo sapiens; identical to SEQ ID NO: 20769
  chr14:69337468-69337505
  hypo

SEQ ID NO: 51391 - DNA, 98 bp, Homo sapiens; identical to SEQ ID NO: 20770
  chr14:69345630-69345728
  hypo

SEQ ID NO: 51392 - DNA, 46 bp, Homo sapiens; identical to SEQ ID NO: 20771
  chr14:69345745-69345791
  hypo

SEQ ID NO: 51393 - DNA, 64 bp, Homo sapiens; identical to SEQ ID NO: 20772
  chr14:69347539-69347603
  hypo

SEQ ID NO: 51394 - DNA, 51 bp, Homo sapiens; identical to SEQ ID NO: 20773
  chr14:69347608-69347659
  hypo

SEQ ID NO: 51395 - DNA, 31 bp, Homo sapiens; identical to SEQ ID NO: 20774
  chr14:69347683-69347714
  hypo

SEQ ID NO: 51396 - DNA, 54 bp, Homo sapiens; identical to SEQ ID NO: 20775
  chr14:69352138-69352192
  hypo

SEQ ID NO: 51397 - DNA, 39 bp, Homo sapiens; identical to SEQ ID NO: 20776
  chr14:69352453-69352492
  hypo

SEQ ID NO: 51398 - DNA, 31 bp, Homo sapiens; identical to SEQ ID NO: 20777
  chr14:69352511-69352542
  hypo

SEQ ID NO: 51399 - DNA, 45 bp, Homo sapiens; identical to SEQ ID NO: 20778
  chr14:69352556-69352601
  hypo

SEQ ID NO: 51400 - DNA, 31 bp, Homo sapiens; identical to SEQ ID NO: 20779
  chr14:69369341-69369372
  hypo

SEQ ID NO: 51401 - DNA, 36 bp, Homo sapiens; identical to SEQ ID NO: 20780
  chr14:69385003-69385039
  hypo

SEQ ID NO: 51402 - DNA, 31 bp, Homo sapiens; identical to SEQ ID NO: 20781
  chr14:69396464-69396495
  hypo

SEQ ID NO: 51403 - DNA, 112 bp, Homo sapiens; identical to SEQ ID NO: 5117
  chr14:69444742-69444854
  hypo

SEQ ID NO: 51404 - DNA, 112 bp, Homo sapiens; identical to SEQ ID NO: 5118
  chr14:69444880-69444992
  hypo

SEQ ID NO: 51405 - DNA, 102 bp, Homo sapiens; identical to SEQ ID NO: 5119
  chr14:69445111-69445213
  hypo

SEQ ID NO: 51406 - DNA, 37 bp, Homo sapiens; identical to SEQ ID NO: 20785
  chr14:69445327-69445364
  hypo

SEQ ID NO: 51407 - DNA, 31 bp, Homo sapiens; identical to SEQ ID NO: 5120
  chr14:69445726-69445757
  hypo

SEQ ID NO: 51408 - DNA, 31 bp, Homo sapiens; identical to SEQ ID NO: 5121
  chr14:69445764-69445795
  hypo

SEQ ID NO: 51409 - DNA, 31 bp, Homo sapiens; identical to SEQ ID NO: 5122
  chr14:69445827-69445858
  hypo

SEQ ID NO: 51410 - DNA, 156 bp, Homo sapiens; identical to SEQ ID NO: 5123
  chr14:69445870-69446026
  hypo

SEQ ID NO: 51411 - DNA, 62 bp, Homo sapiens; identical to SEQ ID NO: 20790
  chr14:69470453-69470515
  hypo

SEQ ID NO: 51412 - DNA, 31 bp, Homo sapiens; identical to SEQ ID NO: 20791
  chr14:69470535-69470566
  hypo

SEQ ID NO: 51413 - DNA, 39 bp, Homo sapiens; identical to SEQ ID NO: 20792
  chr14:69470607-69470646
  hypo

SEQ ID NO: 51414 - DNA, 31 bp, Homo sapiens; identical to SEQ ID NO: 20793
  chr14:69550072-69550103
  hypo

SEQ ID NO: 51415 - DNA, 31 bp, Homo sapiens; identical to SEQ ID NO: 20794
  chr14:69550125-69550156
  hypo

SEQ ID NO: 51416 - DNA, 31 bp, Homo sapiens; identical to SEQ ID NO: 20795
  chr14:69550158-69550189
  hypo

SEQ ID NO: 51417 - DNA, 31 bp, Homo sapiens; identical to SEQ ID NO: 20796
  chr14:69550205-69550236
  hypo

SEQ ID NO: 51418 - DNA, 31 bp, Homo sapiens; identical to SEQ ID NO: 5128
  chr14:69618276-69618307
  hypo

SEQ ID NO: 51419 - DNA, 49 bp, Homo sapiens; identical to SEQ ID NO: 5129
  chr14:69658737-69658786
  hypo

SEQ ID NO: 51420 - DNA, 31 bp, Homo sapiens; identical to SEQ ID NO: 5130
  chr14:69658802-69658833
  hypo

SEQ ID NO: 51421 - DNA, 31 bp, Homo sapiens; identical to SEQ ID NO: 20801
  chr14:70078067-70078098
  hypo

SEQ ID NO: 51422 - DNA, 2 bp, Homo sapiens
  chr14:70236263-70236265
  hypo
tg

SEQ ID NO: 51423 - DNA, 31 bp, Homo sapiens; identical to SEQ ID NO: 5132
  chr14:70826438-70826469
  hypo

SEQ ID NO: 51424 - DNA, 54 bp, Homo sapiens; identical to SEQ ID NO: 5133
  chr14:70826504-70826558
  hypo

SEQ ID NO: 51425 - DNA, 61 bp, Homo sapiens; identical to SEQ ID NO: 5134
  chr14:71108797-71108858
  hypo

SEQ ID NO: 51426 - DNA, 31 bp, Homo sapiens; identical to SEQ ID NO: 20806
  chr14:72732621-72732652
  hypo

SEQ ID NO: 51427 - DNA, 31 bp, Homo sapiens; identical to SEQ ID NO: 20807
  chr14:73033095-73033126
  hypo

SEQ ID NO: 51428 - DNA, 2 bp, Homo sapiens
  chr14:73140381-73140383
  hypo
tg

SEQ ID NO: 51429 - DNA, 31 bp, Homo sapiens; identical to SEQ ID NO: 20809
  chr14:73482874-73482905
  hypo

SEQ ID NO: 51430 - DNA, 39 bp, Homo sapiens; identical to SEQ ID NO: 20810
  chr14:73482925-73482964
  hypo

SEQ ID NO: 51431 - DNA, 31 bp, Homo sapiens; identical to SEQ ID NO: 5135
  chr14:73485669-73485700
  hypo

SEQ ID NO: 51432 - DNA, 31 bp, Homo sapiens; identical to SEQ ID NO: 20812
  chr14:73971262-73971293
  hypo

SEQ ID NO: 51433 - DNA, 63 bp, Homo sapiens; identical to SEQ ID NO: 5136
  chr14:74180609-74180672
  hypo

SEQ ID NO: 51434 - DNA, 31 bp, Homo sapiens; identical to SEQ ID NO: 20815
  chr14:74185751-74185782
  hypo

SEQ ID NO: 51435 - DNA, 31 bp, Homo sapiens; identical to SEQ ID NO: 20816
  chr14:74196563-74196594
  hypo

SEQ ID NO: 51436 - DNA, 40 bp, Homo sapiens; identical to SEQ ID NO: 20817
  chr14:74244736-74244776
  hypo

SEQ ID NO: 51437 - DNA, 2 bp, Homo sapiens
  chr14:74273408-74273410
  hypo
ct

SEQ ID NO: 51438 - DNA, 82 bp, Homo sapiens; identical to SEQ ID NO: 20819
  chr14:75062986-75063068
  hypo

SEQ ID NO: 51439 - DNA, 31 bp, Homo sapiens; identical to SEQ ID NO: 20821
  chr14:75189113-75189144
  hypo

SEQ ID NO: 51440 - DNA, 2 bp, Homo sapiens
  chr14:75332118-75332120
  hypo
tg

SEQ ID NO: 51441 - DNA, 40 bp, Homo sapiens; identical to SEQ ID NO: 20824
  chr14:75416061-75416101
  hypo

SEQ ID NO: 51442 - DNA, 2 bp, Homo sapiens
  chr14:75446327-75446329
  hypo
tg

SEQ ID NO: 51443 - DNA, 31 bp, Homo sapiens; identical to SEQ ID NO: 20826
  chr14:75636943-75636974
  hypo

SEQ ID NO: 51444 - DNA, 31 bp, Homo sapiens; identical to SEQ ID NO: 20827
  chr14:75725465-75725496
  hypo

SEQ ID NO: 51445 - DNA, 31 bp, Homo sapiens; identical to SEQ ID NO: 20828
  chr14:75732469-75732500
  hypo

SEQ ID NO: 51446 - DNA, 31 bp, Homo sapiens; identical to SEQ ID NO: 20829
  chr14:75739620-75739651
  hypo

SEQ ID NO: 51447 - DNA, 55 bp, Homo sapiens; identical to SEQ ID NO: 5140
  chr14:75743667-75743722
  hypo

SEQ ID NO: 51448 - DNA, 31 bp, Homo sapiens; identical to SEQ ID NO: 5141
  chr14:75743729-75743760
  hypo

SEQ ID NO: 51449 - DNA, 91 bp, Homo sapiens; identical to SEQ ID NO: 5142
  chr14:75743971-75744062
  hypo

SEQ ID NO: 51450 - DNA, 31 bp, Homo sapiens; identical to SEQ ID NO: 20834
  chr14:76013065-76013096
  hypo

SEQ ID NO: 51451 - DNA, 31 bp, Homo sapiens; identical to SEQ ID NO: 20835
  chr14:76128608-76128639
  hypo

SEQ ID NO: 51452 - DNA, 36 bp, Homo sapiens; identical to SEQ ID NO: 20838
  chr14:76431241-76431277
  hypo

SEQ ID NO: 51453 - DNA, 59 bp, Homo sapiens; identical to SEQ ID NO: 20839
  chr14:76431358-76431417
  hypo

SEQ ID NO: 51454 - DNA, 31 bp, Homo sapiens; identical to SEQ ID NO: 20840
  chr14:76628414-76628445
  hypo

SEQ ID NO: 51455 - DNA, 31 bp, Homo sapiens; identical to SEQ ID NO: 20841
  chr14:76628466-76628497
  hypo

SEQ ID NO: 51456 - DNA, 31 bp, Homo sapiens; identical to SEQ ID NO: 20842
  chr14:77119608-77119639
  hypo

SEQ ID NO: 51457 - DNA, 18 bp, Homo sapiens
  chr14:77242416-77242434
  hypo
agctcgtgctggacttcg

SEQ ID NO: 51458 - DNA, 48 bp, Homo sapiens; identical to SEQ ID NO: 20845
  chr14:77433609-77433657
  hypo

SEQ ID NO: 51459 - DNA, 35 bp, Homo sapiens; identical to SEQ ID NO: 20846
  chr14:77433666-77433701
  hypo

SEQ ID NO: 51460 - DNA, 232 bp, Homo sapiens; identical to SEQ ID NO: 5146
  chr14:77493527-77493759
  hypo

SEQ ID NO: 51461 - DNA, 31 bp, Homo sapiens; identical to SEQ ID NO: 20848
  chr14:77937150-77937181
  hypo

SEQ ID NO: 51462 - DNA, 31 bp, Homo sapiens; identical to SEQ ID NO: 20849
  chr14:77949054-77949085
  hypo

SEQ ID NO: 51463 - DNA, 23 bp, Homo sapiens
  chr14:78165391-78165414
  hypo
aggcctgagccactgcgcttgcc

SEQ ID NO: 51464 - DNA, 2 bp, Homo sapiens
  chr14:78247789-78247791
  hypo
ta

SEQ ID NO: 51465 - DNA, 31 bp, Homo sapiens; identical to SEQ ID NO: 20855
  chr14:78397856-78397887
  hypo

SEQ ID NO: 51466 - DNA, 31 bp, Homo sapiens; identical to SEQ ID NO: 20856
  chr14:87963379-87963410
  hypo

SEQ ID NO: 51467 - DNA, 44 bp, Homo sapiens; identical to SEQ ID NO: 20857
  chr14:87963411-87963455
  hypo

SEQ ID NO: 51468 - DNA, 18 bp, Homo sapiens
  chr14:88459631-88459649
  hypo
tgacgcagctggcggagt

SEQ ID NO: 51469 - DNA, 22 bp, Homo sapiens
  chr14:88789941-88789963
  hypo
ggaagccgcggaggggcgggga

SEQ ID NO: 51470 - DNA, 399 bp, Homo sapiens; identical to SEQ ID NO: 5156
  chr14:89020844-89021243
  hypo

SEQ ID NO: 51471 - DNA, 31 bp, Homo sapiens; identical to SEQ ID NO: 5157
  chr14:89021244-89021275
  hypo

SEQ ID NO: 51472 - DNA, 36 bp, Homo sapiens; identical to SEQ ID NO: 5158
  chr14:89021377-89021413
  hypo

SEQ ID NO: 51473 - DNA, 62 bp, Homo sapiens; identical to SEQ ID NO: 5159
  chr14:89290984-89291046
  hypo

SEQ ID NO: 51474 - DNA, 31 bp, Homo sapiens; identical to SEQ ID NO: 5160
  chr14:89291184-89291215
  hypo

SEQ ID NO: 51475 - DNA, 31 bp, Homo sapiens; identical to SEQ ID NO: 5161
  chr14:89506987-89507018
  hypo

SEQ ID NO: 51476 - DNA, 42 bp, Homo sapiens; identical to SEQ ID NO: 5162
  chr14:89507057-89507099
  hypo

SEQ ID NO: 51477 - DNA, 2 bp, Homo sapiens
  chr14:89657652-89657654
  hypo
ag

SEQ ID NO: 51478 - DNA, 31 bp, Homo sapiens; identical to SEQ ID NO: 20870
  chr14:89657805-89657836
  hypo

SEQ ID NO: 51479 - DNA, 31 bp, Homo sapiens; identical to SEQ ID NO: 20871
  chr14:89657843-89657874
  hypo

SEQ ID NO: 51480 - DNA, 38 bp, Homo sapiens; identical to SEQ ID NO: 20872
  chr14:89875688-89875726
  hypo

SEQ ID NO: 51481 - DNA, 30 bp, Homo sapiens; identical to SEQ ID NO: 5164
  chr14:90849827-90849857
  hypo

SEQ ID NO: 51482 - DNA, 38 bp, Homo sapiens; identical to SEQ ID NO: 5165
  chr14:90849897-90849935
  hypo

SEQ ID NO: 51483 - DNA, 31 bp, Homo sapiens; identical to SEQ ID NO: 20875
  chr14:91288493-91288524
  hypo

SEQ ID NO: 51484 - DNA, 42 bp, Homo sapiens; identical to SEQ ID NO: 20876
  chr14:91700729-91700771
  hypo

SEQ ID NO: 51485 - DNA, 56 bp, Homo sapiens; identical to SEQ ID NO: 20877
  chr14:91739012-91739068
  hypo

SEQ ID NO: 51486 - DNA, 49 bp, Homo sapiens; identical to SEQ ID NO: 5166
  chr14:91976435-91976484
  hypo

SEQ ID NO: 51487 - DNA, 31 bp, Homo sapiens; identical to SEQ ID NO: 20882
  chr14:92403222-92403253
  hypo

SEQ ID NO: 51488 - DNA, 31 bp, Homo sapiens; identical to SEQ ID NO: 20883
  chr14:93077330-93077361
  hypo

SEQ ID NO: 51489 - DNA, 31 bp, Homo sapiens; identical to SEQ ID NO: 20884
  chr14:93115302-93115333
  hypo

SEQ ID NO: 51490 - DNA, 31 bp, Homo sapiens; identical to SEQ ID NO: 20885
  chr14:93115497-93115528
  hypo

SEQ ID NO: 51491 - DNA, 31 bp, Homo sapiens; identical to SEQ ID NO: 20886
  chr14:93454281-93454312
  hypo

SEQ ID NO: 51492 - DNA, 31 bp, Homo sapiens; identical to SEQ ID NO: 20887
  chr14:93522012-93522043
  hypo

SEQ ID NO: 51493 - DNA, 31 bp, Homo sapiens; identical to SEQ ID NO: 20888
  chr14:93568563-93568594
  hypo

SEQ ID NO: 51494 - DNA, 46 bp, Homo sapiens; identical to SEQ ID NO: 20892
  chr14:94187581-94187627
  hypo

SEQ ID NO: 51495 - DNA, 31 bp, Homo sapiens; identical to SEQ ID NO: 20893
  chr14:94196048-94196079
  hypo

SEQ ID NO: 51496 - DNA, 99 bp, Homo sapiens; identical to SEQ ID NO: 5171
  chr14:94406083-94406182
  hypo

SEQ ID NO: 51497 - DNA, 31 bp, Homo sapiens; identical to SEQ ID NO: 20895
  chr14:94583280-94583311
  hypo

SEQ ID NO: 51498 - DNA, 36 bp, Homo sapiens; identical to SEQ ID NO: 5176
  chr14:94640375-94640411
  hypo

SEQ ID NO: 51499 - DNA, 35 bp, Homo sapiens; identical to SEQ ID NO: 5177
  chr14:94640412-94640447
  hypo

SEQ ID NO: 51500 - DNA, 31 bp, Homo sapiens; identical to SEQ ID NO: 20898
  chr14:94829567-94829598
  hypo

SEQ ID NO: 51501 - DNA, 31 bp, Homo sapiens; identical to SEQ ID NO: 20899
  chr14:94829623-94829654
  hypo

SEQ ID NO: 51502 - DNA, 31 bp, Homo sapiens; identical to SEQ ID NO: 20900
  chr14:94829669-94829700
  hypo

SEQ ID NO: 51503 - DNA, 31 bp, Homo sapiens; identical to SEQ ID NO: 20901
  chr14:94829712-94829743
  hypo

SEQ ID NO: 51504 - DNA, 31 bp, Homo sapiens; identical to SEQ ID NO: 20902
  chr14:95109946-95109977
  hypo

SEQ ID NO: 51505 - DNA, 31 bp, Homo sapiens; identical to SEQ ID NO: 20903
  chr14:95157711-95157742
  hypo

SEQ ID NO: 51506 - DNA, 31 bp, Homo sapiens; identical to SEQ ID NO: 20904
  chr14:95200598-95200629
  hypo

SEQ ID NO: 51507 - DNA, 31 bp, Homo sapiens; identical to SEQ ID NO: 5178
  chr14:95932616-95932647
  hypo

SEQ ID NO: 51508 - DNA, 31 bp, Homo sapiens; identical to SEQ ID NO: 20906
  chr14:96022242-96022273
  hypo

SEQ ID NO: 51509 - DNA, 31 bp, Homo sapiens; identical to SEQ ID NO: 5179
  chr14:96499773-96499804
  hypo

SEQ ID NO: 51510 - DNA, 39 bp, Homo sapiens; identical to SEQ ID NO: 20908
  chr14:96547951-96547990
  hypo

SEQ ID NO: 51511 - DNA, 46 bp, Homo sapiens; identical to SEQ ID NO: 20910
  chr14:96653270-96653316
  hypo

SEQ ID NO: 51512 - DNA, 39 bp, Homo sapiens; identical to SEQ ID NO: 20911
  chr14:96653333-96653372
  hypo

SEQ ID NO: 51513 - DNA, 31 bp, Homo sapiens; identical to SEQ ID NO: 20912
  chr14:96653398-96653429
  hypo

SEQ ID NO: 51514 - DNA, 31 bp, Homo sapiens; identical to SEQ ID NO: 20913
  chr14:96653442-96653473
  hypo

SEQ ID NO: 51515 - DNA, 31 bp, Homo sapiens; identical to SEQ ID NO: 20914
  chr14:96694176-96694207
  hypo

SEQ ID NO: 51516 - DNA, 2 bp, Homo sapiens
  chr14:97045353-97045355
  hypo
gt

SEQ ID NO: 51517 - DNA, 38 bp, Homo sapiens; identical to SEQ ID NO: 20918
  chr14:97338412-97338450
  hypo

SEQ ID NO: 51518 - DNA, 62 bp, Homo sapiens; identical to SEQ ID NO: 20919
  chr14:99651821-99651883
  hypo

SEQ ID NO: 51519 - DNA, 46 bp, Homo sapiens; identical to SEQ ID NO: 20920
  chr14:99651893-99651939
  hypo

SEQ ID NO: 51520 - DNA, 31 bp, Homo sapiens; identical to SEQ ID NO: 20922
  chr14:99785811-99785842
  hypo

SEQ ID NO: 51521 - DNA, 31 bp, Homo sapiens; identical to SEQ ID NO: 20923
  chr14:99889361-99889392
  hypo

SEQ ID NO: 51522 - DNA, 31 bp, Homo sapiens; identical to SEQ ID NO: 20924
  chr14:99987054-99987085
  hypo

SEQ ID NO: 51523 - DNA, 281 bp, Homo sapiens; identical to SEQ ID NO: 5191
  chr14:100070244-100070525
  hypo

SEQ ID NO: 51524 - DNA, 240 bp, Homo sapiens; identical to SEQ ID NO: 5192
  chr14:100070680-100070920
  hypo

SEQ ID NO: 51525 - DNA, 79 bp, Homo sapiens; identical to SEQ ID NO: 5194
  chr14:100071305-100071384
  hypo

SEQ ID NO: 51526 - DNA, 31 bp, Homo sapiens; identical to SEQ ID NO: 5195
  chr14:100071387-100071418
  hypo

SEQ ID NO: 51527 - DNA, 92 bp, Homo sapiens; identical to SEQ ID NO: 5196
  chr14:100071435-100071527
  hypo

SEQ ID NO: 51528 - DNA, 41 bp, Homo sapiens; identical to SEQ ID NO: 5197
  chr14:100071548-100071589
  hypo

SEQ ID NO: 51529 - DNA, 31 bp, Homo sapiens; identical to SEQ ID NO: 20931
  chr14:100104269-100104300
  hypo

SEQ ID NO: 51530 - DNA, 54 bp, Homo sapiens; identical to SEQ ID NO: 20932
  chr14:100118138-100118192
  hypo

SEQ ID NO: 51531 - DNA, 37 bp, Homo sapiens; identical to SEQ ID NO: 20933
  chr14:100118224-100118261
  hypo

SEQ ID NO: 51532 - DNA, 31 bp, Homo sapiens; identical to SEQ ID NO: 20934
  chr14:100118285-100118316
  hypo

SEQ ID NO: 51533 - DNA, 141 bp, Homo sapiens; identical to SEQ ID NO: 5198
  chr14:100150247-100150388
  hypo

SEQ ID NO: 51534 - DNA, 154 bp, Homo sapiens; identical to SEQ ID NO: 5199
  chr14:100150582-100150736
  hypo

SEQ ID NO: 51535 - DNA, 31 bp, Homo sapiens; identical to SEQ ID NO: 20937
  chr14:100268030-100268061
  hypo

SEQ ID NO: 51536 - DNA, 31 bp, Homo sapiens; identical to SEQ ID NO: 20938
  chr14:100587317-100587348
  hypo

SEQ ID NO: 51537 - DNA, 31 bp, Homo sapiens; identical to SEQ ID NO: 20939
  chr14:100587349-100587380
  hypo

SEQ ID NO: 51538 - DNA, 38 bp, Homo sapiens; identical to SEQ ID NO: 20940
  chr14:100615562-100615600
  hypo

SEQ ID NO: 51539 - DNA, 71 bp, Homo sapiens; identical to SEQ ID NO: 20941
  chr14:100615675-100615746
  hypo

SEQ ID NO: 51540 - DNA, 1 bp, Homo sapiens
  chr14:100644399-100644400
  hypo
a

SEQ ID NO: 51541 - DNA, 31 bp, Homo sapiens; identical to SEQ ID NO: 20943
  chr14:100725479-100725510
  hypo

SEQ ID NO: 51542 - DNA, 31 bp, Homo sapiens; identical to SEQ ID NO: 20944
  chr14:100731699-100731730
  hypo

SEQ ID NO: 51543 - DNA, 31 bp, Homo sapiens; identical to SEQ ID NO: 20945
  chr14:100749348-100749379
  hypo

SEQ ID NO: 51544 - DNA, 37 bp, Homo sapiens; identical to SEQ ID NO: 20946
  chr14:100749404-100749441
  hypo

SEQ ID NO: 51545 - DNA, 2 bp, Homo sapiens
  chr14:100749444-100749446
  hypo
tc

SEQ ID NO: 51546 - DNA, 21 bp, Homo sapiens
  chr14:100749475-100749496
  hypo
tggactcggaagaacttgacc

SEQ ID NO: 51547 - DNA, 41 bp, Homo sapiens; identical to SEQ ID NO: 5200
  chr14:100772012-100772053
  hypo

SEQ ID NO: 51548 - DNA, 63 bp, Homo sapiens; identical to SEQ ID NO: 5201
  chr14:100772055-100772118
  hypo

SEQ ID NO: 51549 - DNA, 31 bp, Homo sapiens; identical to SEQ ID NO: 5202
  chr14:100773414-100773445
  hypo

SEQ ID NO: 51550 - DNA, 31 bp, Homo sapiens; identical to SEQ ID NO: 5203
  chr14:100773473-100773504
  hypo

SEQ ID NO: 51551 - DNA, 31 bp, Homo sapiens; identical to SEQ ID NO: 20952
  chr14:100966491-100966522
  hypo

SEQ ID NO: 51552 - DNA, 31 bp, Homo sapiens; identical to SEQ ID NO: 20953
  chr14:101133881-101133912
  hypo

SEQ ID NO: 51553 - DNA, 31 bp, Homo sapiens; identical to SEQ ID NO: 20954
  chr14:101274010-101274041
  hypo

SEQ ID NO: 51554 - DNA, 31 bp, Homo sapiens; identical to SEQ ID NO: 20955
  chr14:101377501-101377532
  hypo

SEQ ID NO: 51555 - DNA, 51 bp, Homo sapiens; identical to SEQ ID NO: 20956
  chr14:101638847-101638898
  hypo

SEQ ID NO: 51556 - DNA, 31 bp, Homo sapiens; identical to SEQ ID NO: 20957
  chr14:101838210-101838241
  hypo

SEQ ID NO: 51557 - DNA, 31 bp, Homo sapiens; identical to SEQ ID NO: 20958
  chr14:101985982-101986013
  hypo

SEQ ID NO: 51558 - DNA, 31 bp, Homo sapiens; identical to SEQ ID NO: 20959
  chr14:102293899-102293930
  hypo

SEQ ID NO: 51559 - DNA, 31 bp, Homo sapiens; identical to SEQ ID NO: 20960
  chr14:102293960-102293991
  hypo

SEQ ID NO: 51560 - DNA, 51 bp, Homo sapiens; identical to SEQ ID NO: 20961
  chr14:102294015-102294066
  hypo

SEQ ID NO: 51561 - DNA, 31 bp, Homo sapiens; identical to SEQ ID NO: 20963
  chr14:102302074-102302105
  hypo

SEQ ID NO: 51562 - DNA, 31 bp, Homo sapiens; identical to SEQ ID NO: 20964
  chr14:102303817-102303848
  hypo

SEQ ID NO: 51563 - DNA, 59 bp, Homo sapiens; identical to SEQ ID NO: 20965
  chr14:102355906-102355965
  hypo

SEQ ID NO: 51564 - DNA, 80 bp, Homo sapiens; identical to SEQ ID NO: 20966
  chr14:102355977-102356057
  hypo

SEQ ID NO: 51565 - DNA, 31 bp, Homo sapiens; identical to SEQ ID NO: 20967
  chr14:102356115-102356146
  hypo

SEQ ID NO: 51566 - DNA, 31 bp, Homo sapiens; identical to SEQ ID NO: 20968
  chr14:102396670-102396701
  hypo

SEQ ID NO: 51567 - DNA, 8 bp, Homo sapiens
  chr14:102418519-102418527
  hypo
ctgccttg

SEQ ID NO: 51568 - DNA, 2 bp, Homo sapiens
  chr14:102521601-102521603
  hypo
gc

SEQ ID NO: 51569 - DNA, 31 bp, Homo sapiens; identical to SEQ ID NO: 20971
  chr14:102530257-102530288
  hypo

SEQ ID NO: 51570 - DNA, 31 bp, Homo sapiens; identical to SEQ ID NO: 20973
  chr14:102686190-102686221
  hypo

SEQ ID NO: 51571 - DNA, 48 bp, Homo sapiens; identical to SEQ ID NO: 20974
  chr14:102909002-102909050
  hypo

SEQ ID NO: 51572 - DNA, 47 bp, Homo sapiens; identical to SEQ ID NO: 20975
  chr14:102909081-102909128
  hypo

SEQ ID NO: 51573 - DNA, 2 bp, Homo sapiens
  chr14:102909161-102909163
  hypo
aa

SEQ ID NO: 51574 - DNA, 48 bp, Homo sapiens; identical to SEQ ID NO: 20977
  chr14:102939220-102939268
  hypo

SEQ ID NO: 51575 - DNA, 147 bp, Homo sapiens; identical to SEQ ID NO: 5207
  chr14:102975680-102975827
  hypo

SEQ ID NO: 51576 - DNA, 31 bp, Homo sapiens; identical to SEQ ID NO: 5208
  chr14:102975895-102975926
  hypo

SEQ ID NO: 51577 - DNA, 114 bp, Homo sapiens; identical to SEQ ID NO: 5209
  chr14:102975944-102976058
  hypo

SEQ ID NO: 51578 - DNA, 32 bp, Homo sapiens; identical to SEQ ID NO: 20981
  chr14:103055785-103055817
  hypo

SEQ ID NO: 51579 - DNA, 2 bp, Homo sapiens
  chr14:103216391-103216393
  hypo
cc

SEQ ID NO: 51580 - DNA, 53 bp, Homo sapiens; identical to SEQ ID NO: 5212
  chr14:103242510-103242563
  hypo

SEQ ID NO: 51581 - DNA, 31 bp, Homo sapiens; identical to SEQ ID NO: 5213
  chr14:103263057-103263088
  hypo

SEQ ID NO: 51582 - DNA, 31 bp, Homo sapiens; identical to SEQ ID NO: 20986
  chr14:103364278-103364309
  hypo

SEQ ID NO: 51583 - DNA, 31 bp, Homo sapiens; identical to SEQ ID NO: 20987
  chr14:103391459-103391490
  hypo

SEQ ID NO: 51584 - DNA, 39 bp, Homo sapiens; identical to SEQ ID NO: 20988
  chr14:103391530-103391569
  hypo

SEQ ID NO: 51585 - DNA, 31 bp, Homo sapiens; identical to SEQ ID NO: 20989
  chr14:103391573-103391604
  hypo

SEQ ID NO: 51586 - DNA, 31 bp, Homo sapiens; identical to SEQ ID NO: 20990
  chr14:103407233-103407264
  hypo

SEQ ID NO: 51587 - DNA, 31 bp, Homo sapiens; identical to SEQ ID NO: 20991
  chr14:103408675-103408706
  hypo

SEQ ID NO: 51588 - DNA, 31 bp, Homo sapiens; identical to SEQ ID NO: 20992
  chr14:103408776-103408807
  hypo

SEQ ID NO: 51589 - DNA, 31 bp, Homo sapiens; identical to SEQ ID NO: 20993
  chr14:103419854-103419885
  hypo

SEQ ID NO: 51590 - DNA, 31 bp, Homo sapiens; identical to SEQ ID NO: 20994
  chr14:103421193-103421224
  hypo

SEQ ID NO: 51591 - DNA, 31 bp, Homo sapiens; identical to SEQ ID NO: 20995
  chr14:103421245-103421276
  hypo

SEQ ID NO: 51592 - DNA, 31 bp, Homo sapiens; identical to SEQ ID NO: 20996
  chr14:103421281-103421312
  hypo

SEQ ID NO: 51593 - DNA, 57 bp, Homo sapiens; identical to SEQ ID NO: 20997
  chr14:103421336-103421393
  hypo

SEQ ID NO: 51594 - DNA, 31 bp, Homo sapiens; identical to SEQ ID NO: 20998
  chr14:103442024-103442055
  hypo

SEQ ID NO: 51595 - DNA, 31 bp, Homo sapiens; identical to SEQ ID NO: 20999
  chr14:103442295-103442326
  hypo

SEQ ID NO: 51596 - DNA, 31 bp, Homo sapiens; identical to SEQ ID NO: 21000
  chr14:103442355-103442386
  hypo

SEQ ID NO: 51597 - DNA, 31 bp, Homo sapiens; identical to SEQ ID NO: 21001
  chr14:103442415-103442446
  hypo

SEQ ID NO: 51598 - DNA, 31 bp, Homo sapiens; identical to SEQ ID NO: 21002
  chr14:103453475-103453506
  hypo

SEQ ID NO: 51599 - DNA, 31 bp, Homo sapiens; identical to SEQ ID NO: 21003
  chr14:103453553-103453584
  hypo

SEQ ID NO: 51600 - DNA, 75 bp, Homo sapiens; identical to SEQ ID NO: 21004
  chr14:103453594-103453669
  hypo

SEQ ID NO: 51601 - DNA, 31 bp, Homo sapiens; identical to SEQ ID NO: 21005
  chr14:103474513-103474544
  hypo

SEQ ID NO: 51602 - DNA, 48 bp, Homo sapiens; identical to SEQ ID NO: 5214
  chr14:103523057-103523105
  hypo

SEQ ID NO: 51603 - DNA, 229 bp, Homo sapiens; identical to SEQ ID NO: 5215
  chr14:103523110-103523339
  hypo

SEQ ID NO: 51604 - DNA, 136 bp, Homo sapiens; identical to SEQ ID NO: 5216
  chr14:103523340-103523476
  hypo

SEQ ID NO: 51605 - DNA, 252 bp, Homo sapiens; identical to SEQ ID NO: 5217
  chr14:103523477-103523729
  hypo

SEQ ID NO: 51606 - DNA, 31 bp, Homo sapiens; identical to SEQ ID NO: 5218
  chr14:103523757-103523788
  hypo

SEQ ID NO: 51607 - DNA, 222 bp, Homo sapiens; identical to SEQ ID NO: 5219
  chr14:103523852-103524074
  hypo

SEQ ID NO: 51608 - DNA, 43 bp, Homo sapiens; identical to SEQ ID NO: 5220
  chr14:103524178-103524221
  hypo

SEQ ID NO: 51609 - DNA, 309 bp, Homo sapiens; identical to SEQ ID NO: 5221
  chr14:103524235-103524544
  hypo

SEQ ID NO: 51610 - DNA, 31 bp, Homo sapiens; identical to SEQ ID NO: 21014
  chr14:103525031-103525062
  hypo

SEQ ID NO: 51611 - DNA, 37 bp, Homo sapiens; identical to SEQ ID NO: 5222
  chr14:103541956-103541993
  hypo

SEQ ID NO: 51612 - DNA, 36 bp, Homo sapiens; identical to SEQ ID NO: 5223
  chr14:103541998-103542034
  hypo

SEQ ID NO: 51613 - DNA, 31 bp, Homo sapiens; identical to SEQ ID NO: 5224
  chr14:103542258-103542289
  hypo

SEQ ID NO: 51614 - DNA, 38 bp, Homo sapiens; identical to SEQ ID NO: 5225
  chr14:103593883-103593921
  hypo

SEQ ID NO: 51615 - DNA, 2 bp, Homo sapiens
  chr14:103593973-103593975
  hypo
ga

SEQ ID NO: 51616 - DNA, 5 bp, Homo sapiens
  chr14:103594004-103594009
  hypo
ggtgt

SEQ ID NO: 51617 - DNA, 96 bp, Homo sapiens; identical to SEQ ID NO: 5227
  chr14:103594011-103594107
  hypo

SEQ ID NO: 51618 - DNA, 31 bp, Homo sapiens; identical to SEQ ID NO: 21021
  chr14:103693881-103693912
  hypo

SEQ ID NO: 51619 - DNA, 73 bp, Homo sapiens; identical to SEQ ID NO: 21022
  chr14:103697778-103697851
  hypo

SEQ ID NO: 51620 - DNA, 31 bp, Homo sapiens; identical to SEQ ID NO: 21023
  chr14:103845496-103845527
  hypo

SEQ ID NO: 51621 - DNA, 31 bp, Homo sapiens; identical to SEQ ID NO: 21024
  chr14:104047705-104047736
  hypo

SEQ ID NO: 51622 - DNA, 31 bp, Homo sapiens; identical to SEQ ID NO: 21025
  chr14:104048663-104048694
  hypo

SEQ ID NO: 51623 - DNA, 31 bp, Homo sapiens; identical to SEQ ID NO: 21026
  chr14:104048704-104048735
  hypo

SEQ ID NO: 51624 - DNA, 2 bp, Homo sapiens
  chr14:104048911-104048913
  hypo
tg

SEQ ID NO: 51625 - DNA, 31 bp, Homo sapiens; identical to SEQ ID NO: 21028
  chr14:104048982-104049013
  hypo

SEQ ID NO: 51626 - DNA, 31 bp, Homo sapiens; identical to SEQ ID NO: 21029
  chr14:104049028-104049059
  hypo

SEQ ID NO: 51627 - DNA, 31 bp, Homo sapiens; identical to SEQ ID NO: 21030
  chr14:104049092-104049123
  hypo

SEQ ID NO: 51628 - DNA, 31 bp, Homo sapiens; identical to SEQ ID NO: 21031
  chr14:104061734-104061765
  hypo

SEQ ID NO: 51629 - DNA, 45 bp, Homo sapiens; identical to SEQ ID NO: 21032
  chr14:104061799-104061844
  hypo

SEQ ID NO: 51630 - DNA, 2 bp, Homo sapiens
  chr14:104061853-104061855
  hypo
cc

SEQ ID NO: 51631 - DNA, 2 bp, Homo sapiens
  chr14:104062201-104062203
  hypo
tt

SEQ ID NO: 51632 - DNA, 3 bp, Homo sapiens
  chr14:104062229-104062232
  hypo
tgt

SEQ ID NO: 51633 - DNA, 2 bp, Homo sapiens
  chr14:104121127-104121129
  hypo
tg

SEQ ID NO: 51634 - DNA, 41 bp, Homo sapiens
  chr14:104121158-104121199
  hypo
acaggtacgagtgagaatgactcagacgttatcaggaactt

SEQ ID NO: 51635 - DNA, 2 bp, Homo sapiens
  chr14:104159316-104159318
  hypo
ga

SEQ ID NO: 51636 - DNA, 42 bp, Homo sapiens
  chr14:104159980-104160022
  hypo
cttgggagtgtgagaccgccccgccctgccacgcccctcacc

SEQ ID NO: 51637 - DNA, 2 bp, Homo sapiens
  chr14:104160059-104160061
  hypo
ct

SEQ ID NO: 51638 - DNA, 22 bp, Homo sapiens
  chr14:104160134-104160156
  hypo
tgttactcggcctgcagcccca

SEQ ID NO: 51639 - DNA, 26 bp, Homo sapiens
  chr14:104194427-104194453
  hypo
ttcagaggcggaatgtcgtctaaaat

SEQ ID NO: 51640 - DNA, 2 bp, Homo sapiens
  chr14:104202704-104202706
  hypo
cg

SEQ ID NO: 51641 - DNA, 31 bp, Homo sapiens; identical to SEQ ID NO: 21047
  chr14:104231503-104231534
  hypo

SEQ ID NO: 51642 - DNA, 83 bp, Homo sapiens; identical to SEQ ID NO: 21048
  chr14:104349423-104349506
  hypo

SEQ ID NO: 51643 - DNA, 67 bp, Homo sapiens; identical to SEQ ID NO: 21049
  chr14:104353833-104353900
  hypo

SEQ ID NO: 51644 - DNA, 31 bp, Homo sapiens; identical to SEQ ID NO: 21050
  chr14:104353932-104353963
  hypo

SEQ ID NO: 51645 - DNA, 31 bp, Homo sapiens; identical to SEQ ID NO: 21052
  chr14:104548507-104548538
  hypo

SEQ ID NO: 51646 - DNA, 31 bp, Homo sapiens; identical to SEQ ID NO: 21053
  chr14:104577438-104577469
  hypo

SEQ ID NO: 51647 - DNA, 31 bp, Homo sapiens; identical to SEQ ID NO: 21054
  chr14:104650284-104650315
  hypo

SEQ ID NO: 51648 - DNA, 31 bp, Homo sapiens; identical to SEQ ID NO: 21055
  chr14:104696053-104696084
  hypo

SEQ ID NO: 51649 - DNA, 44 bp, Homo sapiens; identical to SEQ ID NO: 21056
  chr14:104761169-104761213
  hypo

SEQ ID NO: 51650 - DNA, 31 bp, Homo sapiens; identical to SEQ ID NO: 21057
  chr14:104761239-104761270
  hypo

SEQ ID NO: 51651 - DNA, 68 bp, Homo sapiens; identical to SEQ ID NO: 21058
  chr14:105119950-105120018
  hypo

SEQ ID NO: 51652 - DNA, 31 bp, Homo sapiens; identical to SEQ ID NO: 21059
  chr14:105173532-105173563
  hypo

SEQ ID NO: 51653 - DNA, 22 bp, Homo sapiens
  chr14:105195883-105195905
  hypo
gtggcgtcggcgtggtggggag

SEQ ID NO: 51654 - DNA, 39 bp, Homo sapiens; identical to SEQ ID NO: 21061
  chr14:105201186-105201225
  hypo

SEQ ID NO: 51655 - DNA, 59 bp, Homo sapiens; identical to SEQ ID NO: 21062
  chr14:105201259-105201318
  hypo

SEQ ID NO: 51656 - DNA, 61 bp, Homo sapiens; identical to SEQ ID NO: 21063
  chr14:105201324-105201385
  hypo

SEQ ID NO: 51657 - DNA, 44 bp, Homo sapiens; identical to SEQ ID NO: 21064
  chr14:105204797-105204841
  hypo

SEQ ID NO: 51658 - DNA, 31 bp, Homo sapiens; identical to SEQ ID NO: 21065
  chr14:105204847-105204878
  hypo

SEQ ID NO: 51659 - DNA, 55 bp, Homo sapiens; identical to SEQ ID NO: 21066
  chr14:105204900-105204955
  hypo

SEQ ID NO: 51660 - DNA, 31 bp, Homo sapiens; identical to SEQ ID NO: 21067
  chr14:105206348-105206379
  hypo

SEQ ID NO: 51661 - DNA, 31 bp, Homo sapiens; identical to SEQ ID NO: 21068
  chr14:105208946-105208977
  hypo

SEQ ID NO: 51662 - DNA, 31 bp, Homo sapiens; identical to SEQ ID NO: 21069
  chr14:105210188-105210219
  hypo

SEQ ID NO: 51663 - DNA, 31 bp, Homo sapiens; identical to SEQ ID NO: 21070
  chr14:105211493-105211524
  hypo

SEQ ID NO: 51664 - DNA, 2 bp, Homo sapiens
  chr14:105240936-105240938
  hypo
tc

SEQ ID NO: 51665 - DNA, 40 bp, Homo sapiens
  chr14:105241177-105241217
  hypo
tcacgtgcccaagaagacaggacatcgtcccctagagaca

SEQ ID NO: 51666 - DNA, 31 bp, Homo sapiens; identical to SEQ ID NO: 21076
  chr14:105269021-105269052
  hypo

SEQ ID NO: 51667 - DNA, 31 bp, Homo sapiens; identical to SEQ ID NO: 5233
  chr14:105269070-105269101
  hypo

SEQ ID NO: 51668 - DNA, 31 bp, Homo sapiens; identical to SEQ ID NO: 21078
  chr14:105269308-105269339
  hypo

SEQ ID NO: 51669 - DNA, 31 bp, Homo sapiens; identical to SEQ ID NO: 21079
  chr14:105277932-105277963
  hypo

SEQ ID NO: 51670 - DNA, 328 bp, Homo sapiens; identical to SEQ ID NO: 5236
  chr14:105330980-105331308
  hypo

SEQ ID NO: 51671 - DNA, 85 bp, Homo sapiens; identical to SEQ ID NO: 5237
  chr14:105331418-105331503
  hypo

SEQ ID NO: 51672 - DNA, 31 bp, Homo sapiens; identical to SEQ ID NO: 5238
  chr14:105331549-105331580
  hypo

SEQ ID NO: 51673 - DNA, 101 bp, Homo sapiens; identical to SEQ ID NO: 5239
  chr14:105331605-105331706
  hypo

SEQ ID NO: 51674 - DNA, 154 bp, Homo sapiens; identical to SEQ ID NO: 5240
  chr14:105331744-105331898
  hypo

SEQ ID NO: 51675 - DNA, 61 bp, Homo sapiens; identical to SEQ ID NO: 21085
  chr14:105335726-105335787
  hypo

SEQ ID NO: 51676 - DNA, 59 bp, Homo sapiens; identical to SEQ ID NO: 21086
  chr14:105335856-105335915
  hypo

SEQ ID NO: 51677 - DNA, 31 bp, Homo sapiens; identical to SEQ ID NO: 21087
  chr14:105337646-105337677
  hypo

SEQ ID NO: 51678 - DNA, 31 bp, Homo sapiens; identical to SEQ ID NO: 21088
  chr14:105346091-105346122
  hypo

SEQ ID NO: 51679 - DNA, 31 bp, Homo sapiens; identical to SEQ ID NO: 21089
  chr14:105349523-105349554
  hypo

SEQ ID NO: 51680 - DNA, 31 bp, Homo sapiens; identical to SEQ ID NO: 21090
  chr14:105349745-105349776
  hypo

SEQ ID NO: 51681 - DNA, 42 bp, Homo sapiens; identical to SEQ ID NO: 21091
  chr14:105350161-105350203
  hypo

SEQ ID NO: 51682 - DNA, 65 bp, Homo sapiens; identical to SEQ ID NO: 21092
  chr14:105350205-105350270
  hypo

SEQ ID NO: 51683 - DNA, 31 bp, Homo sapiens; identical to SEQ ID NO: 21093
  chr14:105351132-105351163
  hypo

SEQ ID NO: 51684 - DNA, 31 bp, Homo sapiens; identical to SEQ ID NO: 21094
  chr14:105351164-105351195
  hypo

SEQ ID NO: 51685 - DNA, 34 bp, Homo sapiens; identical to SEQ ID NO: 21095
  chr14:105355230-105355264
  hypo

SEQ ID NO: 51686 - DNA, 36 bp, Homo sapiens; identical to SEQ ID NO: 21096
  chr14:105355266-105355302
  hypo

SEQ ID NO: 51687 - DNA, 39 bp, Homo sapiens; identical to SEQ ID NO: 21101
  chr14:105516267-105516306
  hypo

SEQ ID NO: 51688 - DNA, 91 bp, Homo sapiens; identical to SEQ ID NO: 21102
  chr14:105517982-105518073
  hypo

SEQ ID NO: 51689 - DNA, 51 bp, Homo sapiens; identical to SEQ ID NO: 21103
  chr14:105533294-105533345
  hypo

SEQ ID NO: 51690 - DNA, 31 bp, Homo sapiens; identical to SEQ ID NO: 21104
  chr14:105562583-105562614
  hypo

SEQ ID NO: 51691 - DNA, 46 bp, Homo sapiens; identical to SEQ ID NO: 21105
  chr14:105610436-105610482
  hypo

SEQ ID NO: 51692 - DNA, 85 bp, Homo sapiens; identical to SEQ ID NO: 21106
  chr14:105612251-105612336
  hypo

SEQ ID NO: 51693 - DNA, 31 bp, Homo sapiens; identical to SEQ ID NO: 21107
  chr14:105625471-105625502
  hypo

SEQ ID NO: 51694 - DNA, 58 bp, Homo sapiens; identical to SEQ ID NO: 21108
  chr14:105639400-105639458
  hypo

SEQ ID NO: 51695 - DNA, 48 bp, Homo sapiens; identical to SEQ ID NO: 5250
  chr14:105647608-105647656
  hypo

SEQ ID NO: 51696 - DNA, 70 bp, Homo sapiens; identical to SEQ ID NO: 5251
  chr14:105647694-105647764
  hypo

SEQ ID NO: 51697 - DNA, 92 bp, Homo sapiens; identical to SEQ ID NO: 21111
  chr14:105688165-105688257
  hypo

SEQ ID NO: 51698 - DNA, 31 bp, Homo sapiens; identical to SEQ ID NO: 21114
  chr14:105715843-105715874
  hypo

SEQ ID NO: 51699 - DNA, 31 bp, Homo sapiens; identical to SEQ ID NO: 21115
  chr14:105717869-105717900
  hypo

SEQ ID NO: 51700 - DNA, 73 bp, Homo sapiens; identical to SEQ ID NO: 21116
  chr14:105717915-105717988
  hypo

SEQ ID NO: 51701 - DNA, 31 bp, Homo sapiens; identical to SEQ ID NO: 21117
  chr14:105718019-105718050
  hypo

SEQ ID NO: 51702 - DNA, 94 bp, Homo sapiens; identical to SEQ ID NO: 5253
  chr14:105781804-105781898
  hypo

SEQ ID NO: 51703 - DNA, 34 bp, Homo sapiens; identical to SEQ ID NO: 5254
  chr14:105781903-105781937
  hypo

SEQ ID NO: 51704 - DNA, 31 bp, Homo sapiens; identical to SEQ ID NO: 5256
  chr15:20478122-20478153
  hypo

SEQ ID NO: 51705 - DNA, 31 bp, Homo sapiens; identical to SEQ ID NO: 5257
  chr15:20478176-20478207
  hypo

SEQ ID NO: 51706 - DNA, 60 bp, Homo sapiens; identical to SEQ ID NO: 5258
  chr15:20478212-20478272
  hypo

SEQ ID NO: 51707 - DNA, 31 bp, Homo sapiens; identical to SEQ ID NO: 5259
  chr15:20478294-20478325
  hypo

SEQ ID NO: 51708 - DNA, 59 bp, Homo sapiens; identical to SEQ ID NO: 21126
  chr15:22877137-22877196
  hypo

SEQ ID NO: 51709 - DNA, 46 bp, Homo sapiens; identical to SEQ ID NO: 5261
  chr15:22892152-22892198
  hypo

SEQ ID NO: 51710 - DNA, 45 bp, Homo sapiens; identical to SEQ ID NO: 5262
  chr15:22892280-22892325
  hypo

SEQ ID NO: 51711 - DNA, 101 bp, Homo sapiens; identical to SEQ ID NO: 5263
  chr15:22892341-22892442
  hypo

SEQ ID NO: 51712 - DNA, 31 bp, Homo sapiens; identical to SEQ ID NO: 21130
  chr15:22966141-22966172
  hypo

SEQ ID NO: 51713 - DNA, 48 bp, Homo sapiens; identical to SEQ ID NO: 21131
  chr15:22966202-22966250
  hypo

SEQ ID NO: 51714 - DNA, 31 bp, Homo sapiens; identical to SEQ ID NO: 21132
  chr15:23666806-23666837
  hypo

SEQ ID NO: 51715 - DNA, 2 bp, Homo sapiens
  chr15:23692315-23692317
  hypo
gt

SEQ ID NO: 51716 - DNA, 31 bp, Homo sapiens; identical to SEQ ID NO: 21134
  chr15:25896683-25896714
  hypo

SEQ ID NO: 51717 - DNA, 36 bp, Homo sapiens; identical to SEQ ID NO: 21135
  chr15:25940036-25940072
  hypo

SEQ ID NO: 51718 - DNA, 31 bp, Homo sapiens; identical to SEQ ID NO: 21136
  chr15:28427419-28427450
  hypo

SEQ ID NO: 51719 - DNA, 31 bp, Homo sapiens; identical to SEQ ID NO: 21137
  chr15:29404344-29404375
  hypo

SEQ ID NO: 51720 - DNA, 48 bp, Homo sapiens; identical to SEQ ID NO: 21138
  chr15:29411053-29411101
  hypo

SEQ ID NO: 51721 - DNA, 31 bp, Homo sapiens; identical to SEQ ID NO: 21139
  chr15:29411240-29411271
  hypo

SEQ ID NO: 51722 - DNA, 31 bp, Homo sapiens; identical to SEQ ID NO: 21140
  chr15:29415789-29415820
  hypo

SEQ ID NO: 51723 - DNA, 31 bp, Homo sapiens; identical to SEQ ID NO: 21141
  chr15:29418631-29418662
  hypo

SEQ ID NO: 51724 - DNA, 31 bp, Homo sapiens; identical to SEQ ID NO: 21142
  chr15:29650110-29650141
  hypo

SEQ ID NO: 51725 - DNA, 31 bp, Homo sapiens; identical to SEQ ID NO: 21144
  chr15:29998410-29998441
  hypo

SEQ ID NO: 51726 - DNA, 73 bp, Homo sapiens; identical to SEQ ID NO: 21145
  chr15:30022824-30022897
  hypo

SEQ ID NO: 51727 - DNA, 38 bp, Homo sapiens; identical to SEQ ID NO: 21146
  chr15:30024946-30024984
  hypo

SEQ ID NO: 51728 - DNA, 58 bp, Homo sapiens; identical to SEQ ID NO: 38856
  chr15:30113809-30113867
  hypo

SEQ ID NO: 51729 - DNA, 57 bp, Homo sapiens; identical to SEQ ID NO: 38857
  chr15:30113984-30114041
  hypo

SEQ ID NO: 51730 - DNA, 31 bp, Homo sapiens; identical to SEQ ID NO: 5274
  chr15:30114043-30114074
  hypo

SEQ ID NO: 51731 - DNA, 35 bp, Homo sapiens; identical to SEQ ID NO: 5275
  chr15:30114349-30114384
  hypo

SEQ ID NO: 51732 - DNA, 98 bp, Homo sapiens; identical to SEQ ID NO: 5276
  chr15:30114665-30114763
  hypo

SEQ ID NO: 51733 - DNA, 31 bp, Homo sapiens; identical to SEQ ID NO: 21151
  chr15:30400068-30400099
  hypo

SEQ ID NO: 51734 - DNA, 31 bp, Homo sapiens; identical to SEQ ID NO: 21153
  chr15:31115691-31115722
  hypo

SEQ ID NO: 51735 - DNA, 31 bp, Homo sapiens; identical to SEQ ID NO: 21154
  chr15:31564299-31564330
  hypo

SEQ ID NO: 51736 - DNA, 44 bp, Homo sapiens; identical to SEQ ID NO: 21155
  chr15:31564347-31564391
  hypo

SEQ ID NO: 51737 - DNA, 31 bp, Homo sapiens; identical to SEQ ID NO: 21156
  chr15:31564403-31564434
  hypo

SEQ ID NO: 51738 - DNA, 31 bp, Homo sapiens; identical to SEQ ID NO: 21157
  chr15:31564436-31564467
  hypo

SEQ ID NO: 51739 - DNA, 31 bp, Homo sapiens; identical to SEQ ID NO: 21158
  chr15:31564470-31564501
  hypo

SEQ ID NO: 51740 - DNA, 31 bp, Homo sapiens; identical to SEQ ID NO: 21159
  chr15:31668807-31668838
  hypo

SEQ ID NO: 51741 - DNA, 31 bp, Homo sapiens; identical to SEQ ID NO: 21160
  chr15:31668860-31668891
  hypo

SEQ ID NO: 51742 - DNA, 141 bp, Homo sapiens; identical to SEQ ID NO: 5278
  chr15:32162834-32162975
  hypo

SEQ ID NO: 51743 - DNA, 178 bp, Homo sapiens; identical to SEQ ID NO: 5279
  chr15:32162989-32163167
  hypo

SEQ ID NO: 51744 - DNA, 39 bp, Homo sapiens; identical to SEQ ID NO: 21164
  chr15:32942575-32942614
  hypo

SEQ ID NO: 51745 - DNA, 37 bp, Homo sapiens; identical to SEQ ID NO: 21167
  chr15:34636129-34636166
  hypo

SEQ ID NO: 51746 - DNA, 31 bp, Homo sapiens; identical to SEQ ID NO: 21168
  chr15:34812800-34812831
  hypo

SEQ ID NO: 51747 - DNA, 31 bp, Homo sapiens; identical to SEQ ID NO: 21170
  chr15:35213343-35213374
  hypo

SEQ ID NO: 51748 - DNA, 130 bp, Homo sapiens; identical to SEQ ID NO: 21171
  chr15:35385318-35385448
  hypo

SEQ ID NO: 51749 - DNA, 31 bp, Homo sapiens; identical to SEQ ID NO: 21172
  chr15:35389042-35389073
  hypo

SEQ ID NO: 51750 - DNA, 51 bp, Homo sapiens; identical to SEQ ID NO: 21173
  chr15:35414091-35414142
  hypo

SEQ ID NO: 51751 - DNA, 58 bp, Homo sapiens; identical to SEQ ID NO: 21174
  chr15:35414144-35414202
  hypo

SEQ ID NO: 51752 - DNA, 31 bp, Homo sapiens; identical to SEQ ID NO: 21175
  chr15:35591336-35591367
  hypo

SEQ ID NO: 51753 - DNA, 31 bp, Homo sapiens; identical to SEQ ID NO: 21176
  chr15:36905527-36905558
  hypo

SEQ ID NO: 51754 - DNA, 31 bp, Homo sapiens; identical to SEQ ID NO: 5280
  chr15:37393697-37393728
  hypo

SEQ ID NO: 51755 - DNA, 35 bp, Homo sapiens; identical to SEQ ID NO: 5281
  chr15:38365201-38365236
  hypo

SEQ ID NO: 51756 - DNA, 31 bp, Homo sapiens; identical to SEQ ID NO: 5286
  chr15:38545321-38545352
  hypo

SEQ ID NO: 51757 - DNA, 31 bp, Homo sapiens; identical to SEQ ID NO: 5287
  chr15:39140581-39140612
  hypo

SEQ ID NO: 51758 - DNA, 31 bp, Homo sapiens; identical to SEQ ID NO: 21183
  chr15:39415394-39415425
  hypo

SEQ ID NO: 51759 - DNA, 37 bp, Homo sapiens; identical to SEQ ID NO: 21184
  chr15:39415442-39415479
  hypo

SEQ ID NO: 51760 - DNA, 31 bp, Homo sapiens; identical to SEQ ID NO: 21185
  chr15:39628282-39628313
  hypo

SEQ ID NO: 51761 - DNA, 83 bp, Homo sapiens; identical to SEQ ID NO: 21186
  chr15:39703027-39703110
  hypo

SEQ ID NO: 51762 - DNA, 31 bp, Homo sapiens; identical to SEQ ID NO: 21187
  chr15:39703165-39703196
  hypo

SEQ ID NO: 51763 - DNA, 31 bp, Homo sapiens; identical to SEQ ID NO: 21188
  chr15:39703214-39703245
  hypo

SEQ ID NO: 51764 - DNA, 55 bp, Homo sapiens; identical to SEQ ID NO: 21189
  chr15:39742867-39742922
  hypo

SEQ ID NO: 51765 - DNA, 36 bp, Homo sapiens; identical to SEQ ID NO: 21190
  chr15:39742957-39742993
  hypo

SEQ ID NO: 51766 - DNA, 31 bp, Homo sapiens; identical to SEQ ID NO: 21191
  chr15:39743011-39743042
  hypo

SEQ ID NO: 51767 - DNA, 31 bp, Homo sapiens; identical to SEQ ID NO: 21192
  chr15:39743055-39743086
  hypo

SEQ ID NO: 51768 - DNA, 31 bp, Homo sapiens; identical to SEQ ID NO: 21193
  chr15:39853006-39853037
  hypo

SEQ ID NO: 51769 - DNA, 31 bp, Homo sapiens; identical to SEQ ID NO: 21194
  chr15:39986668-39986699
  hypo

SEQ ID NO: 51770 - DNA, 2 bp, Homo sapiens
  chr15:40532790-40532792
  hypo
tg

SEQ ID NO: 51771 - DNA, 31 bp, Homo sapiens; identical to SEQ ID NO: 21196
  chr15:40548271-40548302
  hypo

SEQ ID NO: 51772 - DNA, 31 bp, Homo sapiens; identical to SEQ ID NO: 21197
  chr15:40557125-40557156
  hypo

SEQ ID NO: 51773 - DNA, 31 bp, Homo sapiens; identical to SEQ ID NO: 21198
  chr15:40558265-40558296
  hypo

SEQ ID NO: 51774 - DNA, 54 bp, Homo sapiens; identical to SEQ ID NO: 21199
  chr15:40558297-40558351
  hypo

SEQ ID NO: 51775 - DNA, 31 bp, Homo sapiens; identical to SEQ ID NO: 21200
  chr15:40676636-40676667
  hypo

SEQ ID NO: 51776 - DNA, 31 bp, Homo sapiens; identical to SEQ ID NO: 21201
  chr15:40676669-40676700
  hypo

SEQ ID NO: 51777 - DNA, 31 bp, Homo sapiens; identical to SEQ ID NO: 21202
  chr15:40701401-40701432
  hypo

SEQ ID NO: 51778 - DNA, 39 bp, Homo sapiens; identical to SEQ ID NO: 21203
  chr15:40701466-40701505
  hypo

SEQ ID NO: 51779 - DNA, 31 bp, Homo sapiens; identical to SEQ ID NO: 21204
  chr15:40701577-40701608
  hypo

SEQ ID NO: 51780 - DNA, 48 bp, Homo sapiens; identical to SEQ ID NO: 21205
  chr15:40716011-40716059
  hypo

SEQ ID NO: 51781 - DNA, 68 bp, Homo sapiens; identical to SEQ ID NO: 21206
  chr15:40716133-40716201
  hypo

SEQ ID NO: 51782 - DNA, 34 bp, Homo sapiens; identical to SEQ ID NO: 21207
  chr15:40766006-40766040
  hypo

SEQ ID NO: 51783 - DNA, 57 bp, Homo sapiens; identical to SEQ ID NO: 5289
  chr15:41046992-41047049
  hypo

SEQ ID NO: 51784 - DNA, 46 bp, Homo sapiens; identical to SEQ ID NO: 21211
  chr15:41059487-41059533
  hypo

SEQ ID NO: 51785 - DNA, 29 bp, Homo sapiens
  chr15:41091111-41091140
  hypo
gtgtgtaagaatttggcgcttgctggctg

SEQ ID NO: 51786 - DNA, 42 bp, Homo sapiens; identical to SEQ ID NO: 21214
  chr15:41840740-41840782
  hypo

SEQ ID NO: 51787 - DNA, 31 bp, Homo sapiens; identical to SEQ ID NO: 21215
  chr15:41862231-41862262
  hypo

SEQ ID NO: 51788 - DNA, 31 bp, Homo sapiens; identical to SEQ ID NO: 21216
  chr15:41872409-41872440
  hypo

SEQ ID NO: 51789 - DNA, 77 bp, Homo sapiens; identical to SEQ ID NO: 5293
  chr15:42112222-42112299
  hypo

SEQ ID NO: 51790 - DNA, 31 bp, Homo sapiens; identical to SEQ ID NO: 5294
  chr15:42112324-42112355
  hypo

SEQ ID NO: 51791 - DNA, 31 bp, Homo sapiens; identical to SEQ ID NO: 5295
  chr15:42112392-42112423
  hypo

SEQ ID NO: 51792 - DNA, 31 bp, Homo sapiens; identical to SEQ ID NO: 21220
  chr15:42148468-42148499
  hypo

SEQ ID NO: 51793 - DNA, 31 bp, Homo sapiens; identical to SEQ ID NO: 21221
  chr15:42153324-42153355
  hypo

SEQ ID NO: 51794 - DNA, 31 bp, Homo sapiens; identical to SEQ ID NO: 21222
  chr15:42153396-42153427
  hypo

SEQ ID NO: 51795 - DNA, 31 bp, Homo sapiens; identical to SEQ ID NO: 21223
  chr15:42153440-42153471
  hypo

SEQ ID NO: 51796 - DNA, 56 bp, Homo sapiens; identical to SEQ ID NO: 21224
  chr15:42160235-42160291
  hypo

SEQ ID NO: 51797 - DNA, 31 bp, Homo sapiens; identical to SEQ ID NO: 21225
  chr15:42160910-42160941
  hypo

SEQ ID NO: 51798 - DNA, 31 bp, Homo sapiens; identical to SEQ ID NO: 21226
  chr15:42166942-42166973
  hypo

SEQ ID NO: 51799 - DNA, 31 bp, Homo sapiens; identical to SEQ ID NO: 21227
  chr15:42167405-42167436
  hypo

SEQ ID NO: 51800 - DNA, 31 bp, Homo sapiens; identical to SEQ ID NO: 21228
  chr15:42167446-42167477
  hypo

SEQ ID NO: 51801 - DNA, 47 bp, Homo sapiens; identical to SEQ ID NO: 21229
  chr15:42171429-42171476
  hypo

SEQ ID NO: 51802 - DNA, 31 bp, Homo sapiens; identical to SEQ ID NO: 21230
  chr15:42171514-42171545
  hypo

SEQ ID NO: 51803 - DNA, 36 bp, Homo sapiens; identical to SEQ ID NO: 21231
  chr15:42171568-42171604
  hypo

SEQ ID NO: 51804 - DNA, 38 bp, Homo sapiens; identical to SEQ ID NO: 21232
  chr15:42280069-42280107
  hypo

SEQ ID NO: 51805 - DNA, 44 bp, Homo sapiens; identical to SEQ ID NO: 21233
  chr15:42284448-42284492
  hypo

SEQ ID NO: 51806 - DNA, 31 bp, Homo sapiens; identical to SEQ ID NO: 21234
  chr15:42284541-42284572
  hypo

SEQ ID NO: 51807 - DNA, 41 bp, Homo sapiens; identical to SEQ ID NO: 21235
  chr15:42284582-42284623
  hypo

SEQ ID NO: 51808 - DNA, 46 bp, Homo sapiens; identical to SEQ ID NO: 21236
  chr15:42362297-42362343
  hypo

SEQ ID NO: 51809 - DNA, 51 bp, Homo sapiens; identical to SEQ ID NO: 21237
  chr15:42362996-42363047
  hypo

SEQ ID NO: 51810 - DNA, 31 bp, Homo sapiens; identical to SEQ ID NO: 21238
  chr15:42363076-42363107
  hypo

SEQ ID NO: 51811 - DNA, 31 bp, Homo sapiens; identical to SEQ ID NO: 21239
  chr15:42379547-42379578
  hypo

SEQ ID NO: 51812 - DNA, 45 bp, Homo sapiens; identical to SEQ ID NO: 21240
  chr15:42388223-42388268
  hypo

SEQ ID NO: 51813 - DNA, 31 bp, Homo sapiens; identical to SEQ ID NO: 21241
  chr15:42434609-42434640
  hypo

SEQ ID NO: 51814 - DNA, 31 bp, Homo sapiens; identical to SEQ ID NO: 21242
  chr15:42434651-42434682
  hypo

SEQ ID NO: 51815 - DNA, 40 bp, Homo sapiens; identical to SEQ ID NO: 21243
  chr15:42434726-42434766
  hypo

SEQ ID NO: 51816 - DNA, 31 bp, Homo sapiens; identical to SEQ ID NO: 21244
  chr15:42434771-42434802
  hypo

SEQ ID NO: 51817 - DNA, 2 bp, Homo sapiens
  chr15:42684672-42684674
  hypo
ag

SEQ ID NO: 51818 - DNA, 31 bp, Homo sapiens; identical to SEQ ID NO: 21247
  chr15:42696331-42696362
  hypo

SEQ ID NO: 51819 - DNA, 31 bp, Homo sapiens; identical to SEQ ID NO: 21248
  chr15:42696369-42696400
  hypo

SEQ ID NO: 51820 - DNA, 2 bp, Homo sapiens
  chr15:43020218-43020220
  hypo
ca

SEQ ID NO: 51821 - DNA, 61 bp, Homo sapiens; identical to SEQ ID NO: 21250
  chr15:43527645-43527706
  hypo

SEQ ID NO: 51822 - DNA, 31 bp, Homo sapiens; identical to SEQ ID NO: 21251
  chr15:43527713-43527744
  hypo

SEQ ID NO: 51823 - DNA, 7 bp, Homo sapiens
  chr15:43527816-43527823
  hypo
cctggcc

SEQ ID NO: 51824 - DNA, 31 bp, Homo sapiens; identical to SEQ ID NO: 21253
  chr15:43820126-43820157
  hypo

SEQ ID NO: 51825 - DNA, 35 bp, Homo sapiens; identical to SEQ ID NO: 21254
  chr15:43820213-43820248
  hypo

SEQ ID NO: 51826 - DNA, 31 bp, Homo sapiens; identical to SEQ ID NO: 21255
  chr15:43820252-43820283
  hypo

SEQ ID NO: 51827 - DNA, 31 bp, Homo sapiens; identical to SEQ ID NO: 21256
  chr15:43820291-43820322
  hypo

SEQ ID NO: 51828 - DNA, 33 bp, Homo sapiens; identical to SEQ ID NO: 21259
  chr15:44037900-44037933
  hypo

SEQ ID NO: 51829 - DNA, 158 bp, Homo sapiens; identical to SEQ ID NO: 5297
  chr15:44038551-44038709
  hypo

SEQ ID NO: 51830 - DNA, 31 bp, Homo sapiens; identical to SEQ ID NO: 21261
  chr15:44191954-44191985
  hypo

SEQ ID NO: 51831 - DNA, 44 bp, Homo sapiens; identical to SEQ ID NO: 5299
  chr15:44487114-44487158
  hypo

SEQ ID NO: 51832 - DNA, 31 bp, Homo sapiens; identical to SEQ ID NO: 5300
  chr15:44487214-44487245
  hypo

SEQ ID NO: 51833 - DNA, 31 bp, Homo sapiens; identical to SEQ ID NO: 21265
  chr15:45387030-45387061
  hypo

SEQ ID NO: 51834 - DNA, 38 bp, Homo sapiens; identical to SEQ ID NO: 21266
  chr15:45391479-45391517
  hypo

SEQ ID NO: 51835 - DNA, 49 bp, Homo sapiens; identical to SEQ ID NO: 21267
  chr15:45439951-45440000
  hypo

SEQ ID NO: 51836 - DNA, 31 bp, Homo sapiens; identical to SEQ ID NO: 21268
  chr15:45440050-45440081
  hypo

SEQ ID NO: 51837 - DNA, 43 bp, Homo sapiens; identical to SEQ ID NO: 21269
  chr15:45440105-45440148
  hypo

SEQ ID NO: 51838 - DNA, 41 bp, Homo sapiens; identical to SEQ ID NO: 21270
  chr15:45465161-45465202
  hypo

SEQ ID NO: 51839 - DNA, 2 bp, Homo sapiens
  chr15:45471644-45471646
  hypo
gg

SEQ ID NO: 51840 - DNA, 31 bp, Homo sapiens; identical to SEQ ID NO: 21272
  chr15:47410608-47410639
  hypo

SEQ ID NO: 51841 - DNA, 2 bp, Homo sapiens
  chr15:48003205-48003207
  hypo
tg

SEQ ID NO: 51842 - DNA, 31 bp, Homo sapiens; identical to SEQ ID NO: 21274
  chr15:50516711-50516742
  hypo

SEQ ID NO: 51843 - DNA, 31 bp, Homo sapiens; identical to SEQ ID NO: 21276
  chr15:50709664-50709695
  hypo

SEQ ID NO: 51844 - DNA, 31 bp, Homo sapiens; identical to SEQ ID NO: 21278
  chr15:51059307-51059338
  hypo

SEQ ID NO: 51845 - DNA, 31 bp, Homo sapiens; identical to SEQ ID NO: 21279
  chr15:51350224-51350255
  hypo

SEQ ID NO: 51846 - DNA, 31 bp, Homo sapiens; identical to SEQ ID NO: 5305
  chr15:51812127-51812158
  hypo

SEQ ID NO: 51847 - DNA, 60 bp, Homo sapiens; identical to SEQ ID NO: 21284
  chr15:52276837-52276897
  hypo

SEQ ID NO: 51848 - DNA, 38 bp, Homo sapiens; identical to SEQ ID NO: 5310
  chr15:52587620-52587658
  hypo

SEQ ID NO: 51849 - DNA, 101 bp, Homo sapiens; identical to SEQ ID NO: 5311
  chr15:52587760-52587861
  hypo

SEQ ID NO: 51850 - DNA, 55 bp, Homo sapiens; identical to SEQ ID NO: 5312
  chr15:52588029-52588084
  hypo

SEQ ID NO: 51851 - DNA, 35 bp, Homo sapiens; identical to SEQ ID NO: 5314
  chr15:52820647-52820682
  hypo

SEQ ID NO: 51852 - DNA, 152 bp, Homo sapiens; identical to SEQ ID NO: 5315
  chr15:52820687-52820839
  hypo

SEQ ID NO: 51853 - DNA, 49 bp, Homo sapiens; identical to SEQ ID NO: 5317
  chr15:55699899-55699948
  hypo

SEQ ID NO: 51854 - DNA, 31 bp, Homo sapiens; identical to SEQ ID NO: 5318
  chr15:55699958-55699989
  hypo

SEQ ID NO: 51855 - DNA, 31 bp, Homo sapiens; identical to SEQ ID NO: 21294
  chr15:55723598-55723629
  hypo

SEQ ID NO: 51856 - DNA, 31 bp, Homo sapiens; identical to SEQ ID NO: 21296
  chr15:56105154-56105185
  hypo

SEQ ID NO: 51857 - DNA, 31 bp, Homo sapiens; identical to SEQ ID NO: 21298
  chr15:56137949-56137980
  hypo

SEQ ID NO: 51858 - DNA, 50 bp, Homo sapiens; identical to SEQ ID NO: 21299
  chr15:56140360-56140410
  hypo

SEQ ID NO: 51859 - DNA, 31 bp, Homo sapiens; identical to SEQ ID NO: 21300
  chr15:56140441-56140472
  hypo

SEQ ID NO: 51860 - DNA, 31 bp, Homo sapiens; identical to SEQ ID NO: 21301
  chr15:56140482-56140513
  hypo

SEQ ID NO: 51861 - DNA, 31 bp, Homo sapiens; identical to SEQ ID NO: 21302
  chr15:56140514-56140545
  hypo

SEQ ID NO: 51862 - DNA, 31 bp, Homo sapiens; identical to SEQ ID NO: 21303
  chr15:56220529-56220560
  hypo

SEQ ID NO: 51863 - DNA, 103 bp, Homo sapiens; identical to SEQ ID NO: 5320
  chr15:56285863-56285966
  hypo

SEQ ID NO: 51864 - DNA, 51 bp, Homo sapiens; identical to SEQ ID NO: 5321
  chr15:56286050-56286101
  hypo

SEQ ID NO: 51865 - DNA, 41 bp, Homo sapiens; identical to SEQ ID NO: 5322
  chr15:56286123-56286164
  hypo

SEQ ID NO: 51866 - DNA, 95 bp, Homo sapiens; identical to SEQ ID NO: 5323
  chr15:56286174-56286269
  hypo

SEQ ID NO: 51867 - DNA, 31 bp, Homo sapiens; identical to SEQ ID NO: 21308
  chr15:56510268-56510299
  hypo

SEQ ID NO: 51868 - DNA, 31 bp, Homo sapiens; identical to SEQ ID NO: 21309
  chr15:57625821-57625852
  hypo

SEQ ID NO: 51869 - DNA, 44 bp, Homo sapiens; identical to SEQ ID NO: 21310
  chr15:57731149-57731193
  hypo

SEQ ID NO: 51870 - DNA, 31 bp, Homo sapiens; identical to SEQ ID NO: 21311
  chr15:57731207-57731238
  hypo

SEQ ID NO: 51871 - DNA, 31 bp, Homo sapiens; identical to SEQ ID NO: 21312
  chr15:57731303-57731334
  hypo

SEQ ID NO: 51872 - DNA, 31 bp, Homo sapiens; identical to SEQ ID NO: 21313
  chr15:57763916-57763947
  hypo

SEQ ID NO: 51873 - DNA, 31 bp, Homo sapiens; identical to SEQ ID NO: 21314
  chr15:57905026-57905057
  hypo

SEQ ID NO: 51874 - DNA, 58 bp, Homo sapiens; identical to SEQ ID NO: 21315
  chr15:57923146-57923204
  hypo

SEQ ID NO: 51875 - DNA, 31 bp, Homo sapiens; identical to SEQ ID NO: 21316
  chr15:57923272-57923303
  hypo

SEQ ID NO: 51876 - DNA, 31 bp, Homo sapiens; identical to SEQ ID NO: 21318
  chr15:58652177-58652208
  hypo

SEQ ID NO: 51877 - DNA, 31 bp, Homo sapiens; identical to SEQ ID NO: 21321
  chr15:59291813-59291844
  hypo

SEQ ID NO: 51878 - DNA, 31 bp, Homo sapiens; identical to SEQ ID NO: 21322
  chr15:59454913-59454944
  hypo

SEQ ID NO: 51879 - DNA, 31 bp, Homo sapiens; identical to SEQ ID NO: 21323
  chr15:59474905-59474936
  hypo

SEQ ID NO: 51880 - DNA, 42 bp, Homo sapiens; identical to SEQ ID NO: 21324
  chr15:59474945-59474987
  hypo

SEQ ID NO: 51881 - DNA, 31 bp, Homo sapiens; identical to SEQ ID NO: 21325
  chr15:59474991-59475022
  hypo

SEQ ID NO: 51882 - DNA, 31 bp, Homo sapiens; identical to SEQ ID NO: 21326
  chr15:59490728-59490759
  hypo

SEQ ID NO: 51883 - DNA, 31 bp, Homo sapiens; identical to SEQ ID NO: 21327
  chr15:59524090-59524121
  hypo

SEQ ID NO: 51884 - DNA, 35 bp, Homo sapiens; identical to SEQ ID NO: 21328
  chr15:59525451-59525486
  hypo

SEQ ID NO: 51885 - DNA, 31 bp, Homo sapiens; identical to SEQ ID NO: 21329
  chr15:59561664-59561695
  hypo

SEQ ID NO: 51886 - DNA, 31 bp, Homo sapiens; identical to SEQ ID NO: 21331
  chr15:59580023-59580054
  hypo

SEQ ID NO: 51887 - DNA, 31 bp, Homo sapiens; identical to SEQ ID NO: 21332
  chr15:59580079-59580110
  hypo

SEQ ID NO: 51888 - DNA, 49 bp, Homo sapiens; identical to SEQ ID NO: 5327
  chr15:59664056-59664105
  hypo

SEQ ID NO: 51889 - DNA, 110 bp, Homo sapiens; identical to SEQ ID NO: 5328
  chr15:59664434-59664544
  hypo

SEQ ID NO: 51890 - DNA, 80 bp, Homo sapiens; identical to SEQ ID NO: 5329
  chr15:59664618-59664698
  hypo

SEQ ID NO: 51891 - DNA, 31 bp, Homo sapiens; identical to SEQ ID NO: 21336
  chr15:59679645-59679676
  hypo

SEQ ID NO: 51892 - DNA, 55 bp, Homo sapiens; identical to SEQ ID NO: 21338
  chr15:59685919-59685974
  hypo

SEQ ID NO: 51893 - DNA, 31 bp, Homo sapiens; identical to SEQ ID NO: 21339
  chr15:59686040-59686071
  hypo

SEQ ID NO: 51894 - DNA, 31 bp, Homo sapiens; identical to SEQ ID NO: 21341
  chr15:61711645-61711676
  hypo

SEQ ID NO: 51895 - DNA, 31 bp, Homo sapiens; identical to SEQ ID NO: 21342
  chr15:61726879-61726910
  hypo

SEQ ID NO: 51896 - DNA, 31 bp, Homo sapiens; identical to SEQ ID NO: 21343
  chr15:62702852-62702883
  hypo

SEQ ID NO: 51897 - DNA, 31 bp, Homo sapiens; identical to SEQ ID NO: 21344
  chr15:62752764-62752795
  hypo

SEQ ID NO: 51898 - DNA, 42 bp, Homo sapiens; identical to SEQ ID NO: 21345
  chr15:62753886-62753928
  hypo

SEQ ID NO: 51899 - DNA, 44 bp, Homo sapiens; identical to SEQ ID NO: 21346
  chr15:62753938-62753982
  hypo

SEQ ID NO: 51900 - DNA, 31 bp, Homo sapiens; identical to SEQ ID NO: 21347
  chr15:62754017-62754048
  hypo

SEQ ID NO: 51901 - DNA, 31 bp, Homo sapiens; identical to SEQ ID NO: 21348
  chr15:62791805-62791836
  hypo

SEQ ID NO: 51902 - DNA, 57 bp, Homo sapiens; identical to SEQ ID NO: 21350
  chr15:62799428-62799485
  hypo

SEQ ID NO: 51903 - DNA, 64 bp, Homo sapiens; identical to SEQ ID NO: 21351
  chr15:62799545-62799609
  hypo

SEQ ID NO: 51904 - DNA, 74 bp, Homo sapiens; identical to SEQ ID NO: 21352
  chr15:62828094-62828168
  hypo

SEQ ID NO: 51905 - DNA, 31 bp, Homo sapiens; identical to SEQ ID NO: 21353
  chr15:62880085-62880116
  hypo

SEQ ID NO: 51906 - DNA, 31 bp, Homo sapiens; identical to SEQ ID NO: 21354
  chr15:62896942-62896973
  hypo

SEQ ID NO: 51907 - DNA, 53 bp, Homo sapiens; identical to SEQ ID NO: 21355
  chr15:62898022-62898075
  hypo

SEQ ID NO: 51908 - DNA, 31 bp, Homo sapiens; identical to SEQ ID NO: 21356
  chr15:62930017-62930048
  hypo

SEQ ID NO: 51909 - DNA, 31 bp, Homo sapiens; identical to SEQ ID NO: 21357
  chr15:62959084-62959115
  hypo

SEQ ID NO: 51910 - DNA, 31 bp, Homo sapiens; identical to SEQ ID NO: 21358
  chr15:62967378-62967409
  hypo

SEQ ID NO: 51911 - DNA, 31 bp, Homo sapiens; identical to SEQ ID NO: 21359
  chr15:62967413-62967444
  hypo

SEQ ID NO: 51912 - DNA, 31 bp, Homo sapiens; identical to SEQ ID NO: 21360
  chr15:62968123-62968154
  hypo

SEQ ID NO: 51913 - DNA, 41 bp, Homo sapiens; identical to SEQ ID NO: 21361
  chr15:62968193-62968234
  hypo

SEQ ID NO: 51914 - DNA, 38 bp, Homo sapiens; identical to SEQ ID NO: 21362
  chr15:62968270-62968308
  hypo

SEQ ID NO: 51915 - DNA, 31 bp, Homo sapiens; identical to SEQ ID NO: 21363
  chr15:62970008-62970039
  hypo

SEQ ID NO: 51916 - DNA, 40 bp, Homo sapiens; identical to SEQ ID NO: 21364
  chr15:62978881-62978921
  hypo

SEQ ID NO: 51917 - DNA, 38 bp, Homo sapiens; identical to SEQ ID NO: 21365
  chr15:62978939-62978977
  hypo

SEQ ID NO: 51918 - DNA, 31 bp, Homo sapiens; identical to SEQ ID NO: 21366
  chr15:62979012-62979043
  hypo

SEQ ID NO: 51919 - DNA, 31 bp, Homo sapiens; identical to SEQ ID NO: 21367
  chr15:62993096-62993127
  hypo

SEQ ID NO: 51920 - DNA, 31 bp, Homo sapiens; identical to SEQ ID NO: 21368
  chr15:62993167-62993198
  hypo

SEQ ID NO: 51921 - DNA, 45 bp, Homo sapiens; identical to SEQ ID NO: 21369
  chr15:63000891-63000936
  hypo

SEQ ID NO: 51922 - DNA, 58 bp, Homo sapiens; identical to SEQ ID NO: 21370
  chr15:63000947-63001005
  hypo

SEQ ID NO: 51923 - DNA, 73 bp, Homo sapiens; identical to SEQ ID NO: 21371
  chr15:63012432-63012505
  hypo

SEQ ID NO: 51924 - DNA, 31 bp, Homo sapiens; identical to SEQ ID NO: 21372
  chr15:63012552-63012583
  hypo

SEQ ID NO: 51925 - DNA, 31 bp, Homo sapiens; identical to SEQ ID NO: 21373
  chr15:63012586-63012617
  hypo

SEQ ID NO: 51926 - DNA, 31 bp, Homo sapiens; identical to SEQ ID NO: 21374
  chr15:63017544-63017575
  hypo

SEQ ID NO: 51927 - DNA, 41 bp, Homo sapiens; identical to SEQ ID NO: 21375
  chr15:63017645-63017686
  hypo

SEQ ID NO: 51928 - DNA, 31 bp, Homo sapiens; identical to SEQ ID NO: 21377
  chr15:63024967-63024998
  hypo

SEQ ID NO: 51929 - DNA, 31 bp, Homo sapiens; identical to SEQ ID NO: 21378
  chr15:63028631-63028662
  hypo

SEQ ID NO: 51930 - DNA, 45 bp, Homo sapiens; identical to SEQ ID NO: 21379
  chr15:63029314-63029359
  hypo

SEQ ID NO: 51931 - DNA, 73 bp, Homo sapiens; identical to SEQ ID NO: 21380
  chr15:63060545-63060618
  hypo

SEQ ID NO: 51932 - DNA, 36 bp, Homo sapiens; identical to SEQ ID NO: 21381
  chr15:63060637-63060673
  hypo

SEQ ID NO: 51933 - DNA, 31 bp, Homo sapiens; identical to SEQ ID NO: 21382
  chr15:63068832-63068863
  hypo

SEQ ID NO: 51934 - DNA, 31 bp, Homo sapiens; identical to SEQ ID NO: 21383
  chr15:63068902-63068933
  hypo

SEQ ID NO: 51935 - DNA, 94 bp, Homo sapiens; identical to SEQ ID NO: 21384
  chr15:63068963-63069057
  hypo

SEQ ID NO: 51936 - DNA, 31 bp, Homo sapiens; identical to SEQ ID NO: 21385
  chr15:63069068-63069099
  hypo

SEQ ID NO: 51937 - DNA, 31 bp, Homo sapiens; identical to SEQ ID NO: 21386
  chr15:63069148-63069179
  hypo

SEQ ID NO: 51938 - DNA, 37 bp, Homo sapiens; identical to SEQ ID NO: 21388
  chr15:63075602-63075639
  hypo

SEQ ID NO: 51939 - DNA, 31 bp, Homo sapiens; identical to SEQ ID NO: 21389
  chr15:63077574-63077605
  hypo

SEQ ID NO: 51940 - DNA, 51 bp, Homo sapiens; identical to SEQ ID NO: 21390
  chr15:63084844-63084895
  hypo

SEQ ID NO: 51941 - DNA, 40 bp, Homo sapiens; identical to SEQ ID NO: 21391
  chr15:63089566-63089606
  hypo

SEQ ID NO: 51942 - DNA, 31 bp, Homo sapiens; identical to SEQ ID NO: 21392
  chr15:63089608-63089639
  hypo

SEQ ID NO: 51943 - DNA, 31 bp, Homo sapiens; identical to SEQ ID NO: 21393
  chr15:63089744-63089775
  hypo

SEQ ID NO: 51944 - DNA, 31 bp, Homo sapiens; identical to SEQ ID NO: 21394
  chr15:63089792-63089823
  hypo

SEQ ID NO: 51945 - DNA, 48 bp, Homo sapiens; identical to SEQ ID NO: 21395
  chr15:63089836-63089884
  hypo

SEQ ID NO: 51946 - DNA, 31 bp, Homo sapiens; identical to SEQ ID NO: 21396
  chr15:63089886-63089917
  hypo

SEQ ID NO: 51947 - DNA, 31 bp, Homo sapiens; identical to SEQ ID NO: 21397
  chr15:63089973-63090004
  hypo

SEQ ID NO: 51948 - DNA, 31 bp, Homo sapiens; identical to SEQ ID NO: 21398
  chr15:63090160-63090191
  hypo

SEQ ID NO: 51949 - DNA, 31 bp, Homo sapiens; identical to SEQ ID NO: 21399
  chr15:63090194-63090225
  hypo

SEQ ID NO: 51950 - DNA, 51 bp, Homo sapiens; identical to SEQ ID NO: 21400
  chr15:63090286-63090337
  hypo

SEQ ID NO: 51951 - DNA, 65 bp, Homo sapiens; identical to SEQ ID NO: 21401
  chr15:63111786-63111851
  hypo

SEQ ID NO: 51952 - DNA, 31 bp, Homo sapiens; identical to SEQ ID NO: 21403
  chr15:63129978-63130009
  hypo

SEQ ID NO: 51953 - DNA, 67 bp, Homo sapiens; identical to SEQ ID NO: 21404
  chr15:63130084-63130151
  hypo

SEQ ID NO: 51954 - DNA, 31 bp, Homo sapiens; identical to SEQ ID NO: 5335
  chr15:63130478-63130509
  hypo

SEQ ID NO: 51955 - DNA, 54 bp, Homo sapiens; identical to SEQ ID NO: 5336
  chr15:63130537-63130591
  hypo

SEQ ID NO: 51956 - DNA, 46 bp, Homo sapiens; identical to SEQ ID NO: 21407
  chr15:63130621-63130667
  hypo

SEQ ID NO: 51957 - DNA, 31 bp, Homo sapiens; identical to SEQ ID NO: 21408
  chr15:63132462-63132493
  hypo

SEQ ID NO: 51958 - DNA, 31 bp, Homo sapiens; identical to SEQ ID NO: 21409
  chr15:63133221-63133252
  hypo

SEQ ID NO: 51959 - DNA, 31 bp, Homo sapiens; identical to SEQ ID NO: 21410
  chr15:63148262-63148293
  hypo

SEQ ID NO: 51960 - DNA, 34 bp, Homo sapiens; identical to SEQ ID NO: 21411
  chr15:63245890-63245924
  hypo

SEQ ID NO: 51961 - DNA, 31 bp, Homo sapiens; identical to SEQ ID NO: 21412
  chr15:63245949-63245980
  hypo

SEQ ID NO: 51962 - DNA, 61 bp, Homo sapiens; identical to SEQ ID NO: 21414
  chr15:63282627-63282688
  hypo

SEQ ID NO: 51963 - DNA, 48 bp, Homo sapiens; identical to SEQ ID NO: 21415
  chr15:63321675-63321723
  hypo

SEQ ID NO: 51964 - DNA, 31 bp, Homo sapiens; identical to SEQ ID NO: 21417
  chr15:63712164-63712195
  hypo

SEQ ID NO: 51965 - DNA, 2 bp, Homo sapiens
  chr15:63753341-63753343
  hypo
ta

SEQ ID NO: 51966 - DNA, 44 bp, Homo sapiens; identical to SEQ ID NO: 5339
  chr15:63795900-63795944
  hypo

SEQ ID NO: 51967 - DNA, 31 bp, Homo sapiens; identical to SEQ ID NO: 5340
  chr15:63795981-63796012
  hypo

SEQ ID NO: 51968 - DNA, 31 bp, Homo sapiens; identical to SEQ ID NO: 5341
  chr15:63796025-63796056
  hypo

SEQ ID NO: 51969 - DNA, 35 bp, Homo sapiens; identical to SEQ ID NO: 21422
  chr15:64234811-64234846
  hypo

SEQ ID NO: 51970 - DNA, 28 bp, Homo sapiens
  chr15:64443286-64443314
  hypo
ccaggcagtctgacgtccaaatcggagt

SEQ ID NO: 51971 - DNA, 31 bp, Homo sapiens; identical to SEQ ID NO: 5342
  chr15:64454727-64454758
  hypo

SEQ ID NO: 51972 - DNA, 41 bp, Homo sapiens; identical to SEQ ID NO: 21426
  chr15:64674696-64674737
  hypo

SEQ ID NO: 51973 - DNA, 31 bp, Homo sapiens; identical to SEQ ID NO: 21428
  chr15:64715708-64715739
  hypo

SEQ ID NO: 51974 - DNA, 31 bp, Homo sapiens; identical to SEQ ID NO: 21429
  chr15:65035875-65035906
  hypo

SEQ ID NO: 51975 - DNA, 40 bp, Homo sapiens; identical to SEQ ID NO: 21430
  chr15:65041215-65041255
  hypo

SEQ ID NO: 51976 - DNA, 15 bp, Homo sapiens
  chr15:65127718-65127733
  hypo
taggattacgggcgt

SEQ ID NO: 51977 - DNA, 31 bp, Homo sapiens; identical to SEQ ID NO: 21432
  chr15:65385856-65385887
  hypo

SEQ ID NO: 51978 - DNA, 31 bp, Homo sapiens; identical to SEQ ID NO: 21433
  chr15:65499416-65499447
  hypo

SEQ ID NO: 51979 - DNA, 2 bp, Homo sapiens
  chr15:66596943-66596945
  hypo
ta

SEQ ID NO: 51980 - DNA, 82 bp, Homo sapiens; identical to SEQ ID NO: 21436
  chr15:66929156-66929238
  hypo

SEQ ID NO: 51981 - DNA, 31 bp, Homo sapiens; identical to SEQ ID NO: 21437
  chr15:66946040-66946071
  hypo

SEQ ID NO: 51982 - DNA, 31 bp, Homo sapiens; identical to SEQ ID NO: 21439
  chr15:66962085-66962116
  hypo

SEQ ID NO: 51983 - DNA, 31 bp, Homo sapiens; identical to SEQ ID NO: 21440
  chr15:66963540-66963571
  hypo

SEQ ID NO: 51984 - DNA, 53 bp, Homo sapiens; identical to SEQ ID NO: 21441
  chr15:66963577-66963630
  hypo

SEQ ID NO: 51985 - DNA, 2 bp, Homo sapiens
  chr15:66963671-66963673
  hypo
tc

SEQ ID NO: 51986 - DNA, 31 bp, Homo sapiens; identical to SEQ ID NO: 5344
  chr15:66994355-66994386
  hypo

SEQ ID NO: 51987 - DNA, 71 bp, Homo sapiens; identical to SEQ ID NO: 5349
  chr15:66995599-66995670
  hypo

SEQ ID NO: 51988 - DNA, 74 bp, Homo sapiens; identical to SEQ ID NO: 5350
  chr15:66995817-66995891
  hypo

SEQ ID NO: 51989 - DNA, 31 bp, Homo sapiens; identical to SEQ ID NO: 21446
  chr15:67011790-67011821
  hypo

SEQ ID NO: 51990 - DNA, 31 bp, Homo sapiens; identical to SEQ ID NO: 21447
  chr15:67011850-67011881
  hypo

SEQ ID NO: 51991 - DNA, 59 bp, Homo sapiens; identical to SEQ ID NO: 21448
  chr15:67049570-67049629
  hypo

SEQ ID NO: 51992 - DNA, 31 bp, Homo sapiens; identical to SEQ ID NO: 21449
  chr15:67049658-67049689
  hypo

SEQ ID NO: 51993 - DNA, 31 bp, Homo sapiens; identical to SEQ ID NO: 21450
  chr15:67049753-67049784
  hypo

SEQ ID NO: 51994 - DNA, 31 bp, Homo sapiens; identical to SEQ ID NO: 21451
  chr15:67071084-67071115
  hypo

SEQ ID NO: 51995 - DNA, 31 bp, Homo sapiens; identical to SEQ ID NO: 21452
  chr15:67073253-67073284
  hypo

SEQ ID NO: 51996 - DNA, 35 bp, Homo sapiens; identical to SEQ ID NO: 21453
  chr15:67073291-67073326
  hypo

SEQ ID NO: 51997 - DNA, 201 bp, Homo sapiens; identical to SEQ ID NO: 21454
  chr15:67073491-67073692
  hypo

SEQ ID NO: 51998 - DNA, 31 bp, Homo sapiens; identical to SEQ ID NO: 21455
  chr15:67073797-67073828
  hypo

SEQ ID NO: 51999 - DNA, 31 bp, Homo sapiens; identical to SEQ ID NO: 21456
  chr15:67100496-67100527
  hypo

SEQ ID NO: 52000 - DNA, 31 bp, Homo sapiens; identical to SEQ ID NO: 21457
  chr15:67100820-67100851
  hypo

SEQ ID NO: 52001 - DNA, 53 bp, Homo sapiens; identical to SEQ ID NO: 21458
  chr15:67100935-67100988
  hypo

SEQ ID NO: 52002 - DNA, 31 bp, Homo sapiens; identical to SEQ ID NO: 21459
  chr15:67130300-67130331
  hypo

SEQ ID NO: 52003 - DNA, 31 bp, Homo sapiens; identical to SEQ ID NO: 21460
  chr15:67137811-67137842
  hypo

SEQ ID NO: 52004 - DNA, 31 bp, Homo sapiens; identical to SEQ ID NO: 21461
  chr15:67137844-67137875
  hypo

SEQ ID NO: 52005 - DNA, 45 bp, Homo sapiens; identical to SEQ ID NO: 21462
  chr15:67149349-67149394
  hypo

SEQ ID NO: 52006 - DNA, 2 bp, Homo sapiens
  chr15:67545404-67545406
  hypo
ta

SEQ ID NO: 52007 - DNA, 72 bp, Homo sapiens; identical to SEQ ID NO: 5354
  chr15:68177207-68177279
  hypo

SEQ ID NO: 52008 - DNA, 31 bp, Homo sapiens; identical to SEQ ID NO: 21465
  chr15:68394336-68394367
  hypo

SEQ ID NO: 52009 - DNA, 31 bp, Homo sapiens; identical to SEQ ID NO: 21466
  chr15:68394407-68394438
  hypo

SEQ ID NO: 52010 - DNA, 31 bp, Homo sapiens; identical to SEQ ID NO: 21467
  chr15:68502908-68502939
  hypo

SEQ ID NO: 52011 - DNA, 44 bp, Homo sapiens; identical to SEQ ID NO: 21468
  chr15:68506852-68506896
  hypo

SEQ ID NO: 52012 - DNA, 34 bp, Homo sapiens; identical to SEQ ID NO: 21469
  chr15:68614577-68614611
  hypo

SEQ ID NO: 52013 - DNA, 31 bp, Homo sapiens; identical to SEQ ID NO: 21470
  chr15:68614671-68614702
  hypo

SEQ ID NO: 52014 - DNA, 54 bp, Homo sapiens; identical to SEQ ID NO: 21471
  chr15:68614709-68614763
  hypo

SEQ ID NO: 52015 - DNA, 44 bp, Homo sapiens; identical to SEQ ID NO: 21472
  chr15:68854100-68854144
  hypo

SEQ ID NO: 52016 - DNA, 31 bp, Homo sapiens; identical to SEQ ID NO: 21473
  chr15:68854173-68854204
  hypo

SEQ ID NO: 52017 - DNA, 62 bp, Homo sapiens; identical to SEQ ID NO: 21474
  chr15:68854228-68854290
  hypo

SEQ ID NO: 52018 - DNA, 31 bp, Homo sapiens; identical to SEQ ID NO: 21475
  chr15:68899867-68899898
  hypo

SEQ ID NO: 52019 - DNA, 42 bp, Homo sapiens; identical to SEQ ID NO: 21477
  chr15:68937518-68937560
  hypo

SEQ ID NO: 52020 - DNA, 31 bp, Homo sapiens; identical to SEQ ID NO: 21478
  chr15:69004017-69004048
  hypo

SEQ ID NO: 52021 - DNA, 53 bp, Homo sapiens; identical to SEQ ID NO: 21479
  chr15:69011589-69011642
  hypo

SEQ ID NO: 52022 - DNA, 68 bp, Homo sapiens; identical to SEQ ID NO: 21480
  chr15:69011702-69011770
  hypo

SEQ ID NO: 52023 - DNA, 31 bp, Homo sapiens; identical to SEQ ID NO: 21481
  chr15:69076662-69076693
  hypo

SEQ ID NO: 52024 - DNA, 31 bp, Homo sapiens; identical to SEQ ID NO: 21482
  chr15:69240580-69240611
  hypo

SEQ ID NO: 52025 - DNA, 31 bp, Homo sapiens; identical to SEQ ID NO: 21483
  chr15:69277654-69277685
  hypo

SEQ ID NO: 52026 - DNA, 31 bp, Homo sapiens; identical to SEQ ID NO: 21484
  chr15:69285805-69285836
  hypo

SEQ ID NO: 52027 - DNA, 36 bp, Homo sapiens; identical to SEQ ID NO: 21485
  chr15:69322603-69322639
  hypo

SEQ ID NO: 52028 - DNA, 31 bp, Homo sapiens; identical to SEQ ID NO: 21486
  chr15:69322642-69322673
  hypo

SEQ ID NO: 52029 - DNA, 31 bp, Homo sapiens; identical to SEQ ID NO: 21487
  chr15:69322714-69322745
  hypo

SEQ ID NO: 52030 - DNA, 31 bp, Homo sapiens; identical to SEQ ID NO: 21488
  chr15:69322966-69322997
  hypo

SEQ ID NO: 52031 - DNA, 48 bp, Homo sapiens; identical to SEQ ID NO: 21489
  chr15:69323012-69323060
  hypo

SEQ ID NO: 52032 - DNA, 52 bp, Homo sapiens; identical to SEQ ID NO: 21490
  chr15:69323095-69323147
  hypo

SEQ ID NO: 52033 - DNA, 31 bp, Homo sapiens; identical to SEQ ID NO: 5357
  chr15:69351241-69351272
  hypo

SEQ ID NO: 52034 - DNA, 33 bp, Homo sapiens; identical to SEQ ID NO: 21492
  chr15:69369616-69369649
  hypo

SEQ ID NO: 52035 - DNA, 55 bp, Homo sapiens; identical to SEQ ID NO: 21493
  chr15:69387166-69387221
  hypo

SEQ ID NO: 52036 - DNA, 31 bp, Homo sapiens; identical to SEQ ID NO: 21494
  chr15:69387234-69387265
  hypo

SEQ ID NO: 52037 - DNA, 41 bp, Homo sapiens; identical to SEQ ID NO: 21495
  chr15:69387310-69387351
  hypo

SEQ ID NO: 52038 - DNA, 31 bp, Homo sapiens; identical to SEQ ID NO: 21496
  chr15:69461189-69461220
  hypo

SEQ ID NO: 52039 - DNA, 38 bp, Homo sapiens; identical to SEQ ID NO: 21497
  chr15:69566085-69566123
  hypo

SEQ ID NO: 52040 - DNA, 56 bp, Homo sapiens; identical to SEQ ID NO: 21498
  chr15:69577240-69577296
  hypo

SEQ ID NO: 52041 - DNA, 31 bp, Homo sapiens; identical to SEQ ID NO: 21499
  chr15:69577305-69577336
  hypo

SEQ ID NO: 52042 - DNA, 31 bp, Homo sapiens; identical to SEQ ID NO: 21500
  chr15:69577356-69577387
  hypo

SEQ ID NO: 52043 - DNA, 31 bp, Homo sapiens; identical to SEQ ID NO: 21503
  chr15:69672049-69672080
  hypo

SEQ ID NO: 52044 - DNA, 31 bp, Homo sapiens; identical to SEQ ID NO: 21505
  chr15:69793873-69793904
  hypo

SEQ ID NO: 52045 - DNA, 53 bp, Homo sapiens; identical to SEQ ID NO: 21506
  chr15:69793952-69794005
  hypo

SEQ ID NO: 52046 - DNA, 31 bp, Homo sapiens; identical to SEQ ID NO: 21507
  chr15:69879204-69879235
  hypo

SEQ ID NO: 52047 - DNA, 31 bp, Homo sapiens; identical to SEQ ID NO: 21508
  chr15:69879263-69879294
  hypo

SEQ ID NO: 52048 - DNA, 31 bp, Homo sapiens; identical to SEQ ID NO: 21509
  chr15:69879329-69879360
  hypo

SEQ ID NO: 52049 - DNA, 31 bp, Homo sapiens; identical to SEQ ID NO: 21510
  chr15:69879374-69879405
  hypo

SEQ ID NO: 52050 - DNA, 73 bp, Homo sapiens; identical to SEQ ID NO: 21511
  chr15:70339878-70339951
  hypo

SEQ ID NO: 52051 - DNA, 44 bp, Homo sapiens; identical to SEQ ID NO: 21512
  chr15:70340034-70340078
  hypo

SEQ ID NO: 52052 - DNA, 31 bp, Homo sapiens; identical to SEQ ID NO: 21513
  chr15:70539034-70539065
  hypo

SEQ ID NO: 52053 - DNA, 37 bp, Homo sapiens; identical to SEQ ID NO: 21514
  chr15:70707943-70707980
  hypo

SEQ ID NO: 52054 - DNA, 31 bp, Homo sapiens; identical to SEQ ID NO: 21515
  chr15:70921645-70921676
  hypo

SEQ ID NO: 52055 - DNA, 31 bp, Homo sapiens; identical to SEQ ID NO: 21516
  chr15:70926694-70926725
  hypo

SEQ ID NO: 52056 - DNA, 31 bp, Homo sapiens; identical to SEQ ID NO: 21518
  chr15:71048053-71048084
  hypo

SEQ ID NO: 52057 - DNA, 31 bp, Homo sapiens; identical to SEQ ID NO: 21519
  chr15:71113899-71113930
  hypo

SEQ ID NO: 52058 - DNA, 36 bp, Homo sapiens; identical to SEQ ID NO: 21520
  chr15:71124500-71124536
  hypo

SEQ ID NO: 52059 - DNA, 31 bp, Homo sapiens; identical to SEQ ID NO: 21521
  chr15:71152148-71152179
  hypo

SEQ ID NO: 52060 - DNA, 44 bp, Homo sapiens; identical to SEQ ID NO: 5368
  chr15:71184310-71184354
  hypo

SEQ ID NO: 52061 - DNA, 43 bp, Homo sapiens; identical to SEQ ID NO: 5369
  chr15:71184362-71184405
  hypo

SEQ ID NO: 52062 - DNA, 31 bp, Homo sapiens; identical to SEQ ID NO: 21524
  chr15:71509041-71509072
  hypo

SEQ ID NO: 52063 - DNA, 39 bp, Homo sapiens; identical to SEQ ID NO: 21525
  chr15:71880350-71880389
  hypo

SEQ ID NO: 52064 - DNA, 31 bp, Homo sapiens; identical to SEQ ID NO: 21527
  chr15:71966332-71966363
  hypo

SEQ ID NO: 52065 - DNA, 56 bp, Homo sapiens; identical to SEQ ID NO: 21528
  chr15:72042475-72042531
  hypo

SEQ ID NO: 52066 - DNA, 31 bp, Homo sapiens; identical to SEQ ID NO: 21529
  chr15:72042567-72042598
  hypo

SEQ ID NO: 52067 - DNA, 31 bp, Homo sapiens; identical to SEQ ID NO: 21530
  chr15:72042601-72042632
  hypo

SEQ ID NO: 52068 - DNA, 31 bp, Homo sapiens; identical to SEQ ID NO: 21531
  chr15:72042644-72042675
  hypo

SEQ ID NO: 52069 - DNA, 31 bp, Homo sapiens; identical to SEQ ID NO: 21532
  chr15:72462557-72462588
  hypo

SEQ ID NO: 52070 - DNA, 11 bp, Homo sapiens
  chr15:72462629-72462640
  hypo
ggaggaccctg

SEQ ID NO: 52071 - DNA, 36 bp, Homo sapiens; identical to SEQ ID NO: 21534
  chr15:72471188-72471224
  hypo

SEQ ID NO: 52072 - DNA, 23 bp, Homo sapiens
  chr15:72564619-72564642
  hypo
gcctccccaggaaagacgctctg

SEQ ID NO: 52073 - DNA, 31 bp, Homo sapiens; identical to SEQ ID NO: 5380
  chr15:72827182-72827213
  hypo

SEQ ID NO: 52074 - DNA, 31 bp, Homo sapiens; identical to SEQ ID NO: 21539
  chr15:72967696-72967727
  hypo

SEQ ID NO: 52075 - DNA, 89 bp, Homo sapiens; identical to SEQ ID NO: 5381
  chr15:73344007-73344096
  hypo

SEQ ID NO: 52076 - DNA, 31 bp, Homo sapiens; identical to SEQ ID NO: 21541
  chr15:73996272-73996303
  hypo

SEQ ID NO: 52077 - DNA, 31 bp, Homo sapiens; identical to SEQ ID NO: 21542
  chr15:74043427-74043458
  hypo

SEQ ID NO: 52078 - DNA, 31 bp, Homo sapiens; identical to SEQ ID NO: 21543
  chr15:74067232-74067263
  hypo

SEQ ID NO: 52079 - DNA, 31 bp, Homo sapiens; identical to SEQ ID NO: 21544
  chr15:74185285-74185316
  hypo

SEQ ID NO: 52080 - DNA, 31 bp, Homo sapiens; identical to SEQ ID NO: 21545
  chr15:74188045-74188076
  hypo

SEQ ID NO: 52081 - DNA, 71 bp, Homo sapiens; identical to SEQ ID NO: 21546
  chr15:74188134-74188205
  hypo

SEQ ID NO: 52082 - DNA, 31 bp, Homo sapiens; identical to SEQ ID NO: 21547
  chr15:74188216-74188247
  hypo

SEQ ID NO: 52083 - DNA, 31 bp, Homo sapiens; identical to SEQ ID NO: 21548
  chr15:74230145-74230176
  hypo

SEQ ID NO: 52084 - DNA, 31 bp, Homo sapiens; identical to SEQ ID NO: 21549
  chr15:74246982-74247013
  hypo

SEQ ID NO: 52085 - DNA, 31 bp, Homo sapiens; identical to SEQ ID NO: 21550
  chr15:74634325-74634356
  hypo

SEQ ID NO: 52086 - DNA, 31 bp, Homo sapiens; identical to SEQ ID NO: 21551
  chr15:74636045-74636076
  hypo

SEQ ID NO: 52087 - DNA, 44 bp, Homo sapiens; identical to SEQ ID NO: 5398
  chr15:74725611-74725655
  hypo

SEQ ID NO: 52088 - DNA, 2 bp, Homo sapiens
  chr15:74911444-74911446
  hypo
cc

SEQ ID NO: 52089 - DNA, 47 bp, Homo sapiens; identical to SEQ ID NO: 21554
  chr15:75091222-75091269
  hypo

SEQ ID NO: 52090 - DNA, 37 bp, Homo sapiens; identical to SEQ ID NO: 21555
  chr15:75091393-75091430
  hypo

SEQ ID NO: 52091 - DNA, 31 bp, Homo sapiens; identical to SEQ ID NO: 21556
  chr15:75094849-75094880
  hypo

SEQ ID NO: 52092 - DNA, 33 bp, Homo sapiens; identical to SEQ ID NO: 21559
  chr15:75413014-75413047
  hypo

SEQ ID NO: 52093 - DNA, 31 bp, Homo sapiens; identical to SEQ ID NO: 21560
  chr15:75498357-75498388
  hypo

SEQ ID NO: 52094 - DNA, 31 bp, Homo sapiens; identical to SEQ ID NO: 21561
  chr15:75498430-75498461
  hypo

SEQ ID NO: 52095 - DNA, 31 bp, Homo sapiens; identical to SEQ ID NO: 21562
  chr15:75594677-75594708
  hypo

SEQ ID NO: 52096 - DNA, 42 bp, Homo sapiens; identical to SEQ ID NO: 21563
  chr15:75594785-75594827
  hypo

SEQ ID NO: 52097 - DNA, 99 bp, Homo sapiens; identical to SEQ ID NO: 5400
  chr15:75640557-75640656
  hypo

SEQ ID NO: 52098 - DNA, 37 bp, Homo sapiens; identical to SEQ ID NO: 5401
  chr15:75640774-75640811
  hypo

SEQ ID NO: 52099 - DNA, 31 bp, Homo sapiens; identical to SEQ ID NO: 5402
  chr15:75745114-75745145
  hypo

SEQ ID NO: 52100 - DNA, 59 bp, Homo sapiens; identical to SEQ ID NO: 21567
  chr15:75761008-75761067
  hypo

SEQ ID NO: 52101 - DNA, 31 bp, Homo sapiens; identical to SEQ ID NO: 21568
  chr15:75790554-75790585
  hypo

SEQ ID NO: 52102 - DNA, 31 bp, Homo sapiens; identical to SEQ ID NO: 21569
  chr15:75949259-75949290
  hypo

SEQ ID NO: 52103 - DNA, 42 bp, Homo sapiens; identical to SEQ ID NO: 21570
  chr15:75949423-75949465
  hypo

SEQ ID NO: 52104 - DNA, 31 bp, Homo sapiens; identical to SEQ ID NO: 21571
  chr15:75968616-75968647
  hypo

SEQ ID NO: 52105 - DNA, 31 bp, Homo sapiens; identical to SEQ ID NO: 5407
  chr15:75976253-75976284
  hypo

SEQ ID NO: 52106 - DNA, 60 bp, Homo sapiens; identical to SEQ ID NO: 5408
  chr15:75976296-75976356
  hypo

SEQ ID NO: 52107 - DNA, 44 bp, Homo sapiens; identical to SEQ ID NO: 21574
  chr15:75981459-75981503
  hypo

SEQ ID NO: 52108 - DNA, 31 bp, Homo sapiens; identical to SEQ ID NO: 21575
  chr15:75990979-75991010
  hypo

SEQ ID NO: 52109 - DNA, 31 bp, Homo sapiens; identical to SEQ ID NO: 21576
  chr15:75997149-75997180
  hypo

SEQ ID NO: 52110 - DNA, 31 bp, Homo sapiens; identical to SEQ ID NO: 21577
  chr15:75997226-75997257
  hypo

SEQ ID NO: 52111 - DNA, 31 bp, Homo sapiens; identical to SEQ ID NO: 21578
  chr15:75997272-75997303
  hypo

SEQ ID NO: 52112 - DNA, 44 bp, Homo sapiens; identical to SEQ ID NO: 21580
  chr15:76083846-76083890
  hypo

SEQ ID NO: 52113 - DNA, 31 bp, Homo sapiens; identical to SEQ ID NO: 21581
  chr15:76083897-76083928
  hypo

SEQ ID NO: 52114 - DNA, 104 bp, Homo sapiens; identical to SEQ ID NO: 21582
  chr15:76083929-76084033
  hypo

SEQ ID NO: 52115 - DNA, 1 bp, Homo sapiens
  chr15:76197435-76197436
  hypo
t

SEQ ID NO: 52116 - DNA, 31 bp, Homo sapiens; identical to SEQ ID NO: 21585
  chr15:76197552-76197583
  hypo

SEQ ID NO: 52117 - DNA, 31 bp, Homo sapiens; identical to SEQ ID NO: 21586
  chr15:76845087-76845118
  hypo

SEQ ID NO: 52118 - DNA, 31 bp, Homo sapiens; identical to SEQ ID NO: 21587
  chr15:77321762-77321793
  hypo

SEQ ID NO: 52119 - DNA, 31 bp, Homo sapiens; identical to SEQ ID NO: 21588
  chr15:77322039-77322070
  hypo

SEQ ID NO: 52120 - DNA, 31 bp, Homo sapiens; identical to SEQ ID NO: 21589
  chr15:77322084-77322115
  hypo

SEQ ID NO: 52121 - DNA, 31 bp, Homo sapiens; identical to SEQ ID NO: 21590
  chr15:77331121-77331152
  hypo

SEQ ID NO: 52122 - DNA, 31 bp, Homo sapiens; identical to SEQ ID NO: 21591
  chr15:77333017-77333048
  hypo

SEQ ID NO: 52123 - DNA, 31 bp, Homo sapiens; identical to SEQ ID NO: 21593
  chr15:77841399-77841430
  hypo

SEQ ID NO: 52124 - DNA, 56 bp, Homo sapiens; identical to SEQ ID NO: 21594
  chr15:77880952-77881008
  hypo

SEQ ID NO: 52125 - DNA, 42 bp, Homo sapiens; identical to SEQ ID NO: 21595
  chr15:77881026-77881068
  hypo

SEQ ID NO: 52126 - DNA, 31 bp, Homo sapiens; identical to SEQ ID NO: 21596
  chr15:77881131-77881162
  hypo

SEQ ID NO: 52127 - DNA, 31 bp, Homo sapiens; identical to SEQ ID NO: 21597
  chr15:77937833-77937864
  hypo

SEQ ID NO: 52128 - DNA, 31 bp, Homo sapiens; identical to SEQ ID NO: 21598
  chr15:78165452-78165483
  hypo

SEQ ID NO: 52129 - DNA, 81 bp, Homo sapiens; identical to SEQ ID NO: 21599
  chr15:78165484-78165565
  hypo

SEQ ID NO: 52130 - DNA, 38 bp, Homo sapiens; identical to SEQ ID NO: 21600
  chr15:78165566-78165604
  hypo

SEQ ID NO: 52131 - DNA, 59 bp, Homo sapiens; identical to SEQ ID NO: 21601
  chr15:78193840-78193899
  hypo

SEQ ID NO: 52132 - DNA, 107 bp, Homo sapiens; identical to SEQ ID NO: 21602
  chr15:78267622-78267729
  hypo

SEQ ID NO: 52133 - DNA, 37 bp, Homo sapiens; identical to SEQ ID NO: 21603
  chr15:78267758-78267795
  hypo

SEQ ID NO: 52134 - DNA, 31 bp, Homo sapiens; identical to SEQ ID NO: 21604
  chr15:78268479-78268510
  hypo

SEQ ID NO: 52135 - DNA, 38 bp, Homo sapiens; identical to SEQ ID NO: 21605
  chr15:78285343-78285381
  hypo

SEQ ID NO: 52136 - DNA, 38 bp, Homo sapiens; identical to SEQ ID NO: 21606
  chr15:78487123-78487161
  hypo

SEQ ID NO: 52137 - DNA, 39 bp, Homo sapiens; identical to SEQ ID NO: 21607
  chr15:78498324-78498363
  hypo

SEQ ID NO: 52138 - DNA, 31 bp, Homo sapiens; identical to SEQ ID NO: 21608
  chr15:78498403-78498434
  hypo

SEQ ID NO: 52139 - DNA, 31 bp, Homo sapiens; identical to SEQ ID NO: 21609
  chr15:78498469-78498500
  hypo

SEQ ID NO: 52140 - DNA, 31 bp, Homo sapiens; identical to SEQ ID NO: 21610
  chr15:78510230-78510261
  hypo

SEQ ID NO: 52141 - DNA, 53 bp, Homo sapiens; identical to SEQ ID NO: 21611
  chr15:78526012-78526065
  hypo

SEQ ID NO: 52142 - DNA, 31 bp, Homo sapiens; identical to SEQ ID NO: 21612
  chr15:78554756-78554787
  hypo

SEQ ID NO: 52143 - DNA, 150 bp, Homo sapiens; identical to SEQ ID NO: 21613
  chr15:78566543-78566693
  hypo

SEQ ID NO: 52144 - DNA, 2 bp, Homo sapiens
  chr15:78570999-78571001
  hypo
tc

SEQ ID NO: 52145 - DNA, 9 bp, Homo sapiens
  chr15:78571023-78571032
  hypo
cgctctgtc

SEQ ID NO: 52146 - DNA, 31 bp, Homo sapiens; identical to SEQ ID NO: 21615
  chr15:78577625-78577656
  hypo

SEQ ID NO: 52147 - DNA, 83 bp, Homo sapiens; identical to SEQ ID NO: 21616
  chr15:78577661-78577744
  hypo

SEQ ID NO: 52148 - DNA, 31 bp, Homo sapiens; identical to SEQ ID NO: 21620
  chr15:78605856-78605887
  hypo

SEQ ID NO: 52149 - DNA, 31 bp, Homo sapiens; identical to SEQ ID NO: 21621
  chr15:78612008-78612039
  hypo

SEQ ID NO: 52150 - DNA, 31 bp, Homo sapiens; identical to SEQ ID NO: 21622
  chr15:78615520-78615551
  hypo

SEQ ID NO: 52151 - DNA, 34 bp, Homo sapiens; identical to SEQ ID NO: 21623
  chr15:78698063-78698097
  hypo

SEQ ID NO: 52152 - DNA, 31 bp, Homo sapiens; identical to SEQ ID NO: 21624
  chr15:78698098-78698129
  hypo

SEQ ID NO: 52153 - DNA, 62 bp, Homo sapiens; identical to SEQ ID NO: 21625
  chr15:78698142-78698204
  hypo

SEQ ID NO: 52154 - DNA, 31 bp, Homo sapiens; identical to SEQ ID NO: 21626
  chr15:78698221-78698252
  hypo

SEQ ID NO: 52155 - DNA, 50 bp, Homo sapiens; identical to SEQ ID NO: 21627
  chr15:78699263-78699313
  hypo

SEQ ID NO: 52156 - DNA, 31 bp, Homo sapiens; identical to SEQ ID NO: 21628
  chr15:78699374-78699405
  hypo

SEQ ID NO: 52157 - DNA, 37 bp, Homo sapiens; identical to SEQ ID NO: 21629
  chr15:78699415-78699452
  hypo

SEQ ID NO: 52158 - DNA, 31 bp, Homo sapiens; identical to SEQ ID NO: 21630
  chr15:78832918-78832949
  hypo

SEQ ID NO: 52159 - DNA, 48 bp, Homo sapiens; identical to SEQ ID NO: 21631
  chr15:79050494-79050542
  hypo

SEQ ID NO: 52160 - DNA, 31 bp, Homo sapiens; identical to SEQ ID NO: 21632
  chr15:79050556-79050587
  hypo

SEQ ID NO: 52161 - DNA, 31 bp, Homo sapiens; identical to SEQ ID NO: 21633
  chr15:79050597-79050628
  hypo

SEQ ID NO: 52162 - DNA, 31 bp, Homo sapiens; identical to SEQ ID NO: 21634
  chr15:79066666-79066697
  hypo

SEQ ID NO: 52163 - DNA, 31 bp, Homo sapiens; identical to SEQ ID NO: 21635
  chr15:79138735-79138766
  hypo

SEQ ID NO: 52164 - DNA, 31 bp, Homo sapiens; identical to SEQ ID NO: 21637
  chr15:79163911-79163942
  hypo

SEQ ID NO: 52165 - DNA, 31 bp, Homo sapiens; identical to SEQ ID NO: 21638
  chr15:79164005-79164036
  hypo

SEQ ID NO: 52166 - DNA, 31 bp, Homo sapiens; identical to SEQ ID NO: 21639
  chr15:79218011-79218042
  hypo

SEQ ID NO: 52167 - DNA, 72 bp, Homo sapiens; identical to SEQ ID NO: 21640
  chr15:79218146-79218218
  hypo

SEQ ID NO: 52168 - DNA, 88 bp, Homo sapiens; identical to SEQ ID NO: 5416
  chr15:79237307-79237395
  hypo

SEQ ID NO: 52169 - DNA, 31 bp, Homo sapiens; identical to SEQ ID NO: 21642
  chr15:79240714-79240745
  hypo

SEQ ID NO: 52170 - DNA, 31 bp, Homo sapiens; identical to SEQ ID NO: 21643
  chr15:79288611-79288642
  hypo

SEQ ID NO: 52171 - DNA, 31 bp, Homo sapiens; identical to SEQ ID NO: 21644
  chr15:79891742-79891773
  hypo

SEQ ID NO: 52172 - DNA, 37 bp, Homo sapiens; identical to SEQ ID NO: 21645
  chr15:80451293-80451330
  hypo

SEQ ID NO: 52173 - DNA, 31 bp, Homo sapiens; identical to SEQ ID NO: 21646
  chr15:80907326-80907357
  hypo

SEQ ID NO: 52174 - DNA, 31 bp, Homo sapiens; identical to SEQ ID NO: 5426
  chr15:81294106-81294137
  hypo

SEQ ID NO: 52175 - DNA, 50 bp, Homo sapiens; identical to SEQ ID NO: 5427
  chr15:81294176-81294226
  hypo

SEQ ID NO: 52176 - DNA, 40 bp, Homo sapiens; identical to SEQ ID NO: 21649
  chr15:81605678-81605718
  hypo

SEQ ID NO: 52177 - DNA, 31 bp, Homo sapiens; identical to SEQ ID NO: 21651
  chr15:83459216-83459247
  hypo

SEQ ID NO: 52178 - DNA, 64 bp, Homo sapiens; identical to SEQ ID NO: 21652
  chr15:83523580-83523644
  hypo

SEQ ID NO: 52179 - DNA, 31 bp, Homo sapiens; identical to SEQ ID NO: 21653
  chr15:83523645-83523676
  hypo

SEQ ID NO: 52180 - DNA, 31 bp, Homo sapiens; identical to SEQ ID NO: 21655
  chr15:83665102-83665133
  hypo

SEQ ID NO: 52181 - DNA, 30 bp, Homo sapiens; identical to SEQ ID NO: 21656
  chr15:84683975-84684005
  hypo

SEQ ID NO: 52182 - DNA, 31 bp, Homo sapiens; identical to SEQ ID NO: 21657
  chr15:84862581-84862612
  hypo

SEQ ID NO: 52183 - DNA, 83 bp, Homo sapiens; identical to SEQ ID NO: 21658
  chr15:85401075-85401158
  hypo

SEQ ID NO: 52184 - DNA, 31 bp, Homo sapiens; identical to SEQ ID NO: 21659
  chr15:85436148-85436179
  hypo

SEQ ID NO: 52185 - DNA, 65 bp, Homo sapiens; identical to SEQ ID NO: 5430
  chr15:85525135-85525200
  hypo

SEQ ID NO: 52186 - DNA, 105 bp, Homo sapiens; identical to SEQ ID NO: 5431
  chr15:85525286-85525391
  hypo

SEQ ID NO: 52187 - DNA, 31 bp, Homo sapiens; identical to SEQ ID NO: 21662
  chr15:85695658-85695689
  hypo

SEQ ID NO: 52188 - DNA, 31 bp, Homo sapiens; identical to SEQ ID NO: 21663
  chr15:85695690-85695721
  hypo

SEQ ID NO: 52189 - DNA, 41 bp, Homo sapiens; identical to SEQ ID NO: 21664
  chr15:85695767-85695808
  hypo

SEQ ID NO: 52190 - DNA, 31 bp, Homo sapiens; identical to SEQ ID NO: 21665
  chr15:85725527-85725558
  hypo

SEQ ID NO: 52191 - DNA, 31 bp, Homo sapiens; identical to SEQ ID NO: 21666
  chr15:85725564-85725595
  hypo

SEQ ID NO: 52192 - DNA, 31 bp, Homo sapiens; identical to SEQ ID NO: 21668
  chr15:85774101-85774132
  hypo

SEQ ID NO: 52193 - DNA, 33 bp, Homo sapiens; identical to SEQ ID NO: 21669
  chr15:85886326-85886359
  hypo

SEQ ID NO: 52194 - DNA, 31 bp, Homo sapiens; identical to SEQ ID NO: 21670
  chr15:86332521-86332552
  hypo

SEQ ID NO: 52195 - DNA, 31 bp, Homo sapiens; identical to SEQ ID NO: 21671
  chr15:86332565-86332596
  hypo

SEQ ID NO: 52196 - DNA, 31 bp, Homo sapiens; identical to SEQ ID NO: 21672
  chr15:89404007-89404038
  hypo

SEQ ID NO: 52197 - DNA, 31 bp, Homo sapiens; identical to SEQ ID NO: 21673
  chr15:89404047-89404078
  hypo

SEQ ID NO: 52198 - DNA, 31 bp, Homo sapiens; identical to SEQ ID NO: 21674
  chr15:89404091-89404122
  hypo

SEQ ID NO: 52199 - DNA, 55 bp, Homo sapiens; identical to SEQ ID NO: 21675
  chr15:89404139-89404194
  hypo

SEQ ID NO: 52200 - DNA, 31 bp, Homo sapiens; identical to SEQ ID NO: 21676
  chr15:89421231-89421262
  hypo

SEQ ID NO: 52201 - DNA, 31 bp, Homo sapiens; identical to SEQ ID NO: 21677
  chr15:89460438-89460469
  hypo

SEQ ID NO: 52202 - DNA, 31 bp, Homo sapiens; identical to SEQ ID NO: 21678
  chr15:89538331-89538362
  hypo

SEQ ID NO: 52203 - DNA, 34 bp, Homo sapiens; identical to SEQ ID NO: 21681
  chr15:90192227-90192261
  hypo

SEQ ID NO: 52204 - DNA, 96 bp, Homo sapiens; identical to SEQ ID NO: 21682
  chr15:90192555-90192651
  hypo

SEQ ID NO: 52205 - DNA, 54 bp, Homo sapiens; identical to SEQ ID NO: 21683
  chr15:90192707-90192761
  hypo

SEQ ID NO: 52206 - DNA, 59 bp, Homo sapiens; identical to SEQ ID NO: 21684
  chr15:90192965-90193024
  hypo

SEQ ID NO: 52207 - DNA, 31 bp, Homo sapiens; identical to SEQ ID NO: 21685
  chr15:90193326-90193357
  hypo

SEQ ID NO: 52208 - DNA, 31 bp, Homo sapiens; identical to SEQ ID NO: 21686
  chr15:90214506-90214537
  hypo

SEQ ID NO: 52209 - DNA, 31 bp, Homo sapiens; identical to SEQ ID NO: 21687
  chr15:90214565-90214596
  hypo

SEQ ID NO: 52210 - DNA, 31 bp, Homo sapiens; identical to SEQ ID NO: 21688
  chr15:90214611-90214642
  hypo

SEQ ID NO: 52211 - DNA, 58 bp, Homo sapiens; identical to SEQ ID NO: 21689
  chr15:90214648-90214706
  hypo

SEQ ID NO: 52212 - DNA, 31 bp, Homo sapiens; identical to SEQ ID NO: 21690
  chr15:90214719-90214750
  hypo

SEQ ID NO: 52213 - DNA, 31 bp, Homo sapiens; identical to SEQ ID NO: 21691
  chr15:90342640-90342671
  hypo

SEQ ID NO: 52214 - DNA, 34 bp, Homo sapiens; identical to SEQ ID NO: 21692
  chr15:90342687-90342721
  hypo

SEQ ID NO: 52215 - DNA, 31 bp, Homo sapiens; identical to SEQ ID NO: 21693
  chr15:90344911-90344942
  hypo

SEQ ID NO: 52216 - DNA, 31 bp, Homo sapiens; identical to SEQ ID NO: 21694
  chr15:90346603-90346634
  hypo

SEQ ID NO: 52217 - DNA, 31 bp, Homo sapiens; identical to SEQ ID NO: 21695
  chr15:90448918-90448949
  hypo

SEQ ID NO: 52218 - DNA, 31 bp, Homo sapiens; identical to SEQ ID NO: 21696
  chr15:90451517-90451548
  hypo

SEQ ID NO: 52219 - DNA, 84 bp, Homo sapiens; identical to SEQ ID NO: 21697
  chr15:90451570-90451654
  hypo

SEQ ID NO: 52220 - DNA, 135 bp, Homo sapiens; identical to SEQ ID NO: 5435
  chr15:90456073-90456208
  hypo

SEQ ID NO: 52221 - DNA, 31 bp, Homo sapiens; identical to SEQ ID NO: 21700
  chr15:90590717-90590748
  hypo

SEQ ID NO: 52222 - DNA, 2 bp, Homo sapiens
  chr15:90753832-90753834
  hypo
at

SEQ ID NO: 52223 - DNA, 74 bp, Homo sapiens; identical to SEQ ID NO: 5436
  chr15:90792592-90792666
  hypo

SEQ ID NO: 52224 - DNA, 75 bp, Homo sapiens; identical to SEQ ID NO: 5437
  chr15:90792735-90792810
  hypo

SEQ ID NO: 52225 - DNA, 31 bp, Homo sapiens; identical to SEQ ID NO: 21706
  chr15:90806188-90806219
  hypo

SEQ ID NO: 52226 - DNA, 31 bp, Homo sapiens; identical to SEQ ID NO: 21707
  chr15:90806244-90806275
  hypo

SEQ ID NO: 52227 - DNA, 61 bp, Homo sapiens; identical to SEQ ID NO: 21708
  chr15:90806280-90806341
  hypo

SEQ ID NO: 52228 - DNA, 31 bp, Homo sapiens; identical to SEQ ID NO: 21709
  chr15:90806358-90806389
  hypo

SEQ ID NO: 52229 - DNA, 31 bp, Homo sapiens; identical to SEQ ID NO: 21710
  chr15:90835325-90835356
  hypo

SEQ ID NO: 52230 - DNA, 31 bp, Homo sapiens; identical to SEQ ID NO: 21712
  chr15:91166197-91166228
  hypo

SEQ ID NO: 52231 - DNA, 31 bp, Homo sapiens; identical to SEQ ID NO: 21713
  chr15:91166886-91166917
  hypo

SEQ ID NO: 52232 - DNA, 31 bp, Homo sapiens; identical to SEQ ID NO: 21715
  chr15:91192933-91192964
  hypo

SEQ ID NO: 52233 - DNA, 44 bp, Homo sapiens; identical to SEQ ID NO: 21718
  chr15:91365250-91365294
  hypo

SEQ ID NO: 52234 - DNA, 31 bp, Homo sapiens; identical to SEQ ID NO: 21719
  chr15:91419630-91419661
  hypo

SEQ ID NO: 52235 - DNA, 62 bp, Homo sapiens; identical to SEQ ID NO: 21720
  chr15:91425021-91425083
  hypo

SEQ ID NO: 52236 - DNA, 70 bp, Homo sapiens; identical to SEQ ID NO: 21721
  chr15:91840255-91840325
  hypo

SEQ ID NO: 52237 - DNA, 31 bp, Homo sapiens; identical to SEQ ID NO: 21722
  chr15:92006983-92007014
  hypo

SEQ ID NO: 52238 - DNA, 31 bp, Homo sapiens; identical to SEQ ID NO: 21724
  chr15:92279572-92279603
  hypo

SEQ ID NO: 52239 - DNA, 31 bp, Homo sapiens; identical to SEQ ID NO: 21725
  chr15:92621960-92621991
  hypo

SEQ ID NO: 52240 - DNA, 31 bp, Homo sapiens; identical to SEQ ID NO: 21726
  chr15:92979028-92979059
  hypo

SEQ ID NO: 52241 - DNA, 31 bp, Homo sapiens; identical to SEQ ID NO: 21727
  chr15:93153519-93153550
  hypo

SEQ ID NO: 52242 - DNA, 108 bp, Homo sapiens; identical to SEQ ID NO: 21728
  chr15:93153598-93153706
  hypo

SEQ ID NO: 52243 - DNA, 40 bp, Homo sapiens; identical to SEQ ID NO: 21729
  chr15:93176137-93176177
  hypo

SEQ ID NO: 52244 - DNA, 31 bp, Homo sapiens; identical to SEQ ID NO: 21730
  chr15:93176181-93176212
  hypo

SEQ ID NO: 52245 - DNA, 31 bp, Homo sapiens; identical to SEQ ID NO: 21731
  chr15:93206673-93206704
  hypo

SEQ ID NO: 52246 - DNA, 31 bp, Homo sapiens; identical to SEQ ID NO: 21733
  chr15:93433861-93433892
  hypo

SEQ ID NO: 52247 - DNA, 31 bp, Homo sapiens; identical to SEQ ID NO: 21734
  chr15:94048804-94048835
  hypo

SEQ ID NO: 52248 - DNA, 31 bp, Homo sapiens; identical to SEQ ID NO: 21735
  chr15:95019574-95019605
  hypo

SEQ ID NO: 52249 - DNA, 31 bp, Homo sapiens; identical to SEQ ID NO: 5439
  chr15:96873708-96873739
  hypo

SEQ ID NO: 52250 - DNA, 71 bp, Homo sapiens; identical to SEQ ID NO: 5440
  chr15:96873742-96873813
  hypo

SEQ ID NO: 52251 - DNA, 83 bp, Homo sapiens; identical to SEQ ID NO: 5441
  chr15:96873909-96873992
  hypo

SEQ ID NO: 52252 - DNA, 31 bp, Homo sapiens; identical to SEQ ID NO: 21740
  chr15:97308493-97308524
  hypo

SEQ ID NO: 52253 - DNA, 74 bp, Homo sapiens; identical to SEQ ID NO: 21741
  chr15:98292426-98292500
  hypo

SEQ ID NO: 52254 - DNA, 31 bp, Homo sapiens; identical to SEQ ID NO: 21742
  chr15:98292553-98292584
  hypo

SEQ ID NO: 52255 - DNA, 31 bp, Homo sapiens; identical to SEQ ID NO: 21743
  chr15:98292608-98292639
  hypo

SEQ ID NO: 52256 - DNA, 31 bp, Homo sapiens; identical to SEQ ID NO: 21745
  chr15:98512522-98512553
  hypo

SEQ ID NO: 52257 - DNA, 31 bp, Homo sapiens; identical to SEQ ID NO: 21746
  chr15:99107215-99107246
  hypo

SEQ ID NO: 52258 - DNA, 36 bp, Homo sapiens; identical to SEQ ID NO: 5449
  chr15:99191461-99191497
  hypo

SEQ ID NO: 52259 - DNA, 97 bp, Homo sapiens; identical to SEQ ID NO: 5450
  chr15:99191541-99191638
  hypo

SEQ ID NO: 52260 - DNA, 49 bp, Homo sapiens; identical to SEQ ID NO: 5451
  chr15:99192944-99192993
  hypo

SEQ ID NO: 52261 - DNA, 31 bp, Homo sapiens; identical to SEQ ID NO: 21751
  chr15:99222035-99222066
  hypo

SEQ ID NO: 52262 - DNA, 31 bp, Homo sapiens; identical to SEQ ID NO: 21752
  chr15:99947375-99947406
  hypo

SEQ ID NO: 52263 - DNA, 39 bp, Homo sapiens; identical to SEQ ID NO: 5453
  chr15:99955138-99955177
  hypo

SEQ ID NO: 52264 - DNA, 61 bp, Homo sapiens; identical to SEQ ID NO: 5454
  chr15:100273843-100273904
  hypo

SEQ ID NO: 52265 - DNA, 31 bp, Homo sapiens; identical to SEQ ID NO: 5455
  chr15:100273945-100273976
  hypo

SEQ ID NO: 52266 - DNA, 31 bp, Homo sapiens; identical to SEQ ID NO: 21756
  chr15:100274138-100274169
  hypo

SEQ ID NO: 52267 - DNA, 31 bp, Homo sapiens; identical to SEQ ID NO: 21757
  chr15:100519845-100519876
  hypo

SEQ ID NO: 52268 - DNA, 41 bp, Homo sapiens; identical to SEQ ID NO: 21758
  chr15:100649030-100649071
  hypo

SEQ ID NO: 52269 - DNA, 82 bp, Homo sapiens; identical to SEQ ID NO: 21759
  chr15:100649158-100649240
  hypo

SEQ ID NO: 52270 - DNA, 31 bp, Homo sapiens; identical to SEQ ID NO: 21760
  chr15:100726605-100726636
  hypo

SEQ ID NO: 52271 - DNA, 58 bp, Homo sapiens; identical to SEQ ID NO: 21761
  chr15:100726665-100726723
  hypo

SEQ ID NO: 52272 - DNA, 35 bp, Homo sapiens; identical to SEQ ID NO: 21762
  chr15:100726775-100726810
  hypo

SEQ ID NO: 52273 - DNA, 31 bp, Homo sapiens; identical to SEQ ID NO: 21763
  chr15:100740119-100740150
  hypo

SEQ ID NO: 52274 - DNA, 31 bp, Homo sapiens; identical to SEQ ID NO: 21764
  chr15:100791526-100791557
  hypo

SEQ ID NO: 52275 - DNA, 31 bp, Homo sapiens; identical to SEQ ID NO: 21765
  chr15:100796879-100796910
  hypo

SEQ ID NO: 52276 - DNA, 35 bp, Homo sapiens; identical to SEQ ID NO: 21766
  chr15:100851743-100851778
  hypo

SEQ ID NO: 52277 - DNA, 31 bp, Homo sapiens; identical to SEQ ID NO: 21767
  chr15:100851787-100851818
  hypo

SEQ ID NO: 52278 - DNA, 31 bp, Homo sapiens; identical to SEQ ID NO: 21768
  chr15:100851858-100851889
  hypo

SEQ ID NO: 52279 - DNA, 36 bp, Homo sapiens; identical to SEQ ID NO: 21769
  chr15:101194865-101194901
  hypo

SEQ ID NO: 52280 - DNA, 31 bp, Homo sapiens; identical to SEQ ID NO: 21770
  chr15:101246102-101246133
  hypo

SEQ ID NO: 52281 - DNA, 31 bp, Homo sapiens; identical to SEQ ID NO: 21771
  chr15:101251437-101251468
  hypo

SEQ ID NO: 52282 - DNA, 41 bp, Homo sapiens; identical to SEQ ID NO: 21772
  chr15:101266999-101267040
  hypo

SEQ ID NO: 52283 - DNA, 69 bp, Homo sapiens; identical to SEQ ID NO: 21773
  chr15:101267124-101267193
  hypo

SEQ ID NO: 52284 - DNA, 2 bp, Homo sapiens
  chr15:101459069-101459071
  hypo
ta

SEQ ID NO: 52285 - DNA, 20 bp, Homo sapiens
  chr15:101459313-101459333
  hypo
gtgcccgaacctgaaggagg

SEQ ID NO: 52286 - DNA, 31 bp, Homo sapiens; identical to SEQ ID NO: 39022
  chr15:101459976-101460007
  hypo

SEQ ID NO: 52287 - DNA, 33 bp, Homo sapiens
  chr15:101785783-101785816
  hypo
ttaacagacaggggaacgtgaagctgccggtgc

SEQ ID NO: 52288 - DNA, 31 bp, Homo sapiens; identical to SEQ ID NO: 21781
  chr15:101801703-101801734
  hypo

SEQ ID NO: 52289 - DNA, 31 bp, Homo sapiens; identical to SEQ ID NO: 21782
  chr15:101818141-101818172
  hypo

SEQ ID NO: 52290 - DNA, 31 bp, Homo sapiens; identical to SEQ ID NO: 21783
  chr15:101818188-101818219
  hypo

SEQ ID NO: 52291 - DNA, 31 bp, Homo sapiens; identical to SEQ ID NO: 21784
  chr15:101818243-101818274
  hypo

SEQ ID NO: 52292 - DNA, 33 bp, Homo sapiens
  chr15:101818295-101818328
  hypo
gttcctctgcctgcaacgccgtcccgcaccctc

SEQ ID NO: 52293 - DNA, 134 bp, Homo sapiens; identical to SEQ ID NO: 5461
  chr15:101835657-101835791
  hypo

SEQ ID NO: 52294 - DNA, 55 bp, Homo sapiens; identical to SEQ ID NO: 5462
  chr15:101835797-101835852
  hypo

SEQ ID NO: 52295 - DNA, 34 bp, Homo sapiens; identical to SEQ ID NO: 21788
  chr15:101845351-101845385
  hypo

SEQ ID NO: 52296 - DNA, 31 bp, Homo sapiens; identical to SEQ ID NO: 21789
  chr15:101850401-101850432
  hypo

SEQ ID NO: 52297 - DNA, 31 bp, Homo sapiens; identical to SEQ ID NO: 21790
  chr15:101850558-101850589
  hypo

SEQ ID NO: 52298 - DNA, 31 bp, Homo sapiens; identical to SEQ ID NO: 21791
  chr15:101859003-101859034
  hypo

SEQ ID NO: 52299 - DNA, 59 bp, Homo sapiens; identical to SEQ ID NO: 21792
  chr15:101862666-101862725
  hypo

SEQ ID NO: 52300 - DNA, 31 bp, Homo sapiens; identical to SEQ ID NO: 21793
  chr15:101862751-101862782
  hypo

SEQ ID NO: 52301 - DNA, 53 bp, Homo sapiens; identical to SEQ ID NO: 21794
  chr15:101862810-101862863
  hypo

SEQ ID NO: 52302 - DNA, 31 bp, Homo sapiens; identical to SEQ ID NO: 21795
  chr15:101865528-101865559
  hypo

SEQ ID NO: 52303 - DNA, 31 bp, Homo sapiens; identical to SEQ ID NO: 21796
  chr15:101911510-101911541
  hypo

SEQ ID NO: 52304 - DNA, 31 bp, Homo sapiens; identical to SEQ ID NO: 21797
  chr15:101922353-101922384
  hypo

SEQ ID NO: 52305 - DNA, 31 bp, Homo sapiens; identical to SEQ ID NO: 21798
  chr15:101949372-101949403
  hypo

SEQ ID NO: 52306 - DNA, 33 bp, Homo sapiens; identical to SEQ ID NO: 21799
  chr15:101949765-101949798
  hypo

SEQ ID NO: 52307 - DNA, 31 bp, Homo sapiens; identical to SEQ ID NO: 21800
  chr15:102004884-102004915
  hypo

SEQ ID NO: 52308 - DNA, 75 bp, Homo sapiens; identical to SEQ ID NO: 21801
  chr15:102004982-102005057
  hypo

SEQ ID NO: 52309 - DNA, 31 bp, Homo sapiens; identical to SEQ ID NO: 21802
  chr15:102030589-102030620
  hypo

SEQ ID NO: 52310 - DNA, 35 bp, Homo sapiens; identical to SEQ ID NO: 21803
  chr15:102030630-102030665
  hypo

SEQ ID NO: 52311 - DNA, 31 bp, Homo sapiens; identical to SEQ ID NO: 21804
  chr15:102031395-102031426
  hypo

SEQ ID NO: 52312 - DNA, 31 bp, Homo sapiens; identical to SEQ ID NO: 21805
  chr15:102076806-102076837
  hypo

SEQ ID NO: 52313 - DNA, 31 bp, Homo sapiens; identical to SEQ ID NO: 21806
  chr16:84432-84463
  hypo

SEQ ID NO: 52314 - DNA, 31 bp, Homo sapiens; identical to SEQ ID NO: 21807
  chr16:94565-94596
  hypo

SEQ ID NO: 52315 - DNA, 31 bp, Homo sapiens; identical to SEQ ID NO: 21808
  chr16:109540-109571
  hypo

SEQ ID NO: 52316 - DNA, 55 bp, Homo sapiens; identical to SEQ ID NO: 21809
  chr16:112972-113027
  hypo

SEQ ID NO: 52317 - DNA, 64 bp, Homo sapiens; identical to SEQ ID NO: 21810
  chr16:189553-189617
  hypo

SEQ ID NO: 52318 - DNA, 40 bp, Homo sapiens; identical to SEQ ID NO: 21811
  chr16:189634-189674
  hypo

SEQ ID NO: 52319 - DNA, 36 bp, Homo sapiens; identical to SEQ ID NO: 21817
  chr16:310515-310551
  hypo

SEQ ID NO: 52320 - DNA, 2 bp, Homo sapiens
  chr16:323417-323419
  hypo
ag

SEQ ID NO: 52321 - DNA, 23 bp, Homo sapiens
  chr16:323599-323622
  hypo
agcccctccgcccccaccctcag

SEQ ID NO: 52322 - DNA, 136 bp, Homo sapiens; identical to SEQ ID NO: 21820
  chr16:339476-339612
  hypo

SEQ ID NO: 52323 - DNA, 2 bp, Homo sapiens
  chr16:356088-356090
  hypo
tt

SEQ ID NO: 52324 - DNA, 38 bp, Homo sapiens; identical to SEQ ID NO: 21822
  chr16:360131-360169
  hypo

SEQ ID NO: 52325 - DNA, 31 bp, Homo sapiens; identical to SEQ ID NO: 21823
  chr16:360188-360219
  hypo

SEQ ID NO: 52326 - DNA, 61 bp, Homo sapiens; identical to SEQ ID NO: 21824
  chr16:360253-360314
  hypo

SEQ ID NO: 52327 - DNA, 36 bp, Homo sapiens; identical to SEQ ID NO: 21829
  chr16:429364-429400
  hypo

SEQ ID NO: 52328 - DNA, 2 bp, Homo sapiens
  chr16:501345-501347
  hypo
ca

SEQ ID NO: 52329 - DNA, 50 bp, Homo sapiens; identical to SEQ ID NO: 21831
  chr16:512664-512714
  hypo

SEQ ID NO: 52330 - DNA, 31 bp, Homo sapiens; identical to SEQ ID NO: 21832
  chr16:514975-515006
  hypo

SEQ ID NO: 52331 - DNA, 31 bp, Homo sapiens; identical to SEQ ID NO: 21833
  chr16:515007-515038
  hypo

SEQ ID NO: 52332 - DNA, 31 bp, Homo sapiens; identical to SEQ ID NO: 21834
  chr16:515061-515092
  hypo

SEQ ID NO: 52333 - DNA, 31 bp, Homo sapiens; identical to SEQ ID NO: 21835
  chr16:515250-515281
  hypo

SEQ ID NO: 52334 - DNA, 31 bp, Homo sapiens; identical to SEQ ID NO: 21836
  chr16:517376-517407
  hypo

SEQ ID NO: 52335 - DNA, 46 bp, Homo sapiens; identical to SEQ ID NO: 21838
  chr16:567190-567236
  hypo

SEQ ID NO: 52336 - DNA, 66 bp, Homo sapiens; identical to SEQ ID NO: 21839
  chr16:573425-573491
  hypo

SEQ ID NO: 52337 - DNA, 40 bp, Homo sapiens; identical to SEQ ID NO: 5466
  chr16:577639-577679
  hypo

SEQ ID NO: 52338 - DNA, 45 bp, Homo sapiens; identical to SEQ ID NO: 21841
  chr16:584706-584751
  hypo

SEQ ID NO: 52339 - DNA, 31 bp, Homo sapiens; identical to SEQ ID NO: 21842
  chr16:611329-611360
  hypo

SEQ ID NO: 52340 - DNA, 31 bp, Homo sapiens; identical to SEQ ID NO: 21846
  chr16:615333-615364
  hypo

SEQ ID NO: 52341 - DNA, 46 bp, Homo sapiens; identical to SEQ ID NO: 21848
  chr16:660722-660768
  hypo

SEQ ID NO: 52342 - DNA, 21 bp, Homo sapiens
  chr16:666692-666713
  hypo
ctgggctgcagtaagccgaga

SEQ ID NO: 52343 - DNA, 2 bp, Homo sapiens
  chr16:667483-667485
  hypo
cc

SEQ ID NO: 52344 - DNA, 2 bp, Homo sapiens
  chr16:677436-677438
  hypo
ca

SEQ ID NO: 52345 - DNA, 20 bp, Homo sapiens
  chr16:677467-677487
  hypo
tgaacgcggtcatgatgcac

SEQ ID NO: 52346 - DNA, 42 bp, Homo sapiens; identical to SEQ ID NO: 21854
  chr16:716020-716062
  hypo

SEQ ID NO: 52347 - DNA, 51 bp, Homo sapiens; identical to SEQ ID NO: 5468
  chr16:717959-718010
  hypo

SEQ ID NO: 52348 - DNA, 2 bp, Homo sapiens
  chr16:726579-726581
  hypo
gg

SEQ ID NO: 52349 - DNA, 2 bp, Homo sapiens
  chr16:741168-741170
  hypo
cc

SEQ ID NO: 52350 - DNA, 26 bp, Homo sapiens
  chr16:741519-741545
  hypo
agacggagtttcgctcttgttgccca

SEQ ID NO: 52351 - DNA, 112 bp, Homo sapiens; identical to SEQ ID NO: 5469
  chr16:765206-765318
  hypo

SEQ ID NO: 52352 - DNA, 63 bp, Homo sapiens; identical to SEQ ID NO: 5470
  chr16:765585-765648
  hypo

SEQ ID NO: 52353 - DNA, 87 bp, Homo sapiens; identical to SEQ ID NO: 21876
  chr16:771851-771938
  hypo

SEQ ID NO: 52354 - DNA, 49 bp, Homo sapiens; identical to SEQ ID NO: 21877
  chr16:771949-771998
  hypo

SEQ ID NO: 52355 - DNA, 48 bp, Homo sapiens; identical to SEQ ID NO: 21878
  chr16:772044-772092
  hypo

SEQ ID NO: 52356 - DNA, 31 bp, Homo sapiens; identical to SEQ ID NO: 21879
  chr16:796912-796943
  hypo

SEQ ID NO: 52357 - DNA, 31 bp, Homo sapiens; identical to SEQ ID NO: 21884
  chr16:835960-835991
  hypo

SEQ ID NO: 52358 - DNA, 2 bp, Homo sapiens
  chr16:837307-837309
  hypo
ga

SEQ ID NO: 52359 - DNA, 36 bp, Homo sapiens; identical to SEQ ID NO: 21891
  chr16:969857-969893
  hypo

SEQ ID NO: 52360 - DNA, 37 bp, Homo sapiens; identical to SEQ ID NO: 21892
  chr16:1095306-1095343
  hypo

SEQ ID NO: 52361 - DNA, 31 bp, Homo sapiens; identical to SEQ ID NO: 21893
  chr16:1196743-1196774
  hypo

SEQ ID NO: 52362 - DNA, 31 bp, Homo sapiens; identical to SEQ ID NO: 21898
  chr16:1237321-1237352
  hypo

SEQ ID NO: 52363 - DNA, 102 bp, Homo sapiens
  chr16:1248922-1249024
  hypo
caccatgctgtctcccgcccccaccccccatcatggctccgcccagctggcagtcaccgccccacatggctccgcccacggtgcagtcgctgcacatatgcc

SEQ ID NO: 52364 - DNA, 31 bp, Homo sapiens; identical to SEQ ID NO: 21902
  chr16:1273478-1273509
  hypo

SEQ ID NO: 52365 - DNA, 31 bp, Homo sapiens; identical to SEQ ID NO: 21903
  chr16:1308372-1308403
  hypo

SEQ ID NO: 52366 - DNA, 39 bp, Homo sapiens; identical to SEQ ID NO: 21904
  chr16:1369254-1369293
  hypo

SEQ ID NO: 52367 - DNA, 37 bp, Homo sapiens; identical to SEQ ID NO: 21905
  chr16:1374350-1374387
  hypo

SEQ ID NO: 52368 - DNA, 31 bp, Homo sapiens; identical to SEQ ID NO: 21906
  chr16:1395998-1396029
  hypo

SEQ ID NO: 52369 - DNA, 2 bp, Homo sapiens
  chr16:1397421-1397423
  hypo
aa

SEQ ID NO: 52370 - DNA, 58 bp, Homo sapiens; identical to SEQ ID NO: 21913
  chr16:1398083-1398141
  hypo

SEQ ID NO: 52371 - DNA, 31 bp, Homo sapiens; identical to SEQ ID NO: 21914
  chr16:1407318-1407349
  hypo

SEQ ID NO: 52372 - DNA, 2 bp, Homo sapiens
  chr16:1407369-1407371
  hypo
ct

SEQ ID NO: 52373 - DNA, 25 bp, Homo sapiens
  chr16:1407518-1407543
  hypo
gtgtcgctgtgtcgcccaggctgga

SEQ ID NO: 52374 - DNA, 57 bp, Homo sapiens; identical to SEQ ID NO: 21918
  chr16:1414644-1414701
  hypo

SEQ ID NO: 52375 - DNA, 2 bp, Homo sapiens
  chr16:1417075-1417077
  hypo
cc

SEQ ID NO: 52376 - DNA, 2 bp, Homo sapiens
  chr16:1417674-1417676
  hypo
gg

SEQ ID NO: 52377 - DNA, 2 bp, Homo sapiens
  chr16:1424438-1424440
  hypo
tg

SEQ ID NO: 52378 - DNA, 59 bp, Homo sapiens; identical to SEQ ID NO: 5473
  chr16:1429111-1429170
  hypo

SEQ ID NO: 52379 - DNA, 31 bp, Homo sapiens; identical to SEQ ID NO: 21928
  chr16:1472211-1472242
  hypo

SEQ ID NO: 52380 - DNA, 42 bp, Homo sapiens; identical to SEQ ID NO: 21929
  chr16:1472246-1472288
  hypo

SEQ ID NO: 52381 - DNA, 57 bp, Homo sapiens; identical to SEQ ID NO: 21930
  chr16:1484607-1484664
  hypo

SEQ ID NO: 52382 - DNA, 31 bp, Homo sapiens; identical to SEQ ID NO: 21931
  chr16:1484668-1484699
  hypo

SEQ ID NO: 52383 - DNA, 31 bp, Homo sapiens; identical to SEQ ID NO: 21932
  chr16:1484702-1484733
  hypo

SEQ ID NO: 52384 - DNA, 1 bp, Homo sapiens
  chr16:1493574-1493575
  hypo
a

SEQ ID NO: 52385 - DNA, 31 bp, Homo sapiens; identical to SEQ ID NO: 21934
  chr16:1496408-1496439
  hypo

SEQ ID NO: 52386 - DNA, 31 bp, Homo sapiens; identical to SEQ ID NO: 21935
  chr16:1510690-1510721
  hypo

SEQ ID NO: 52387 - DNA, 43 bp, Homo sapiens; identical to SEQ ID NO: 21937
  chr16:1575250-1575293
  hypo

SEQ ID NO: 52388 - DNA, 47 bp, Homo sapiens; identical to SEQ ID NO: 21938
  chr16:1579422-1579469
  hypo

SEQ ID NO: 52389 - DNA, 13 bp, Homo sapiens
  chr16:1580699-1580712
  hypo
tggggagcgggag

SEQ ID NO: 52390 - DNA, 68 bp, Homo sapiens; identical to SEQ ID NO: 21940
  chr16:1613976-1614044
  hypo

SEQ ID NO: 52391 - DNA, 31 bp, Homo sapiens; identical to SEQ ID NO: 21941
  chr16:1615013-1615044
  hypo

SEQ ID NO: 52392 - DNA, 153 bp, Homo sapiens; identical to SEQ ID NO: 5474
  chr16:1660448-1660601
  hypo

SEQ ID NO: 52393 - DNA, 155 bp, Homo sapiens; identical to SEQ ID NO: 5475
  chr16:1660659-1660814
  hypo

SEQ ID NO: 52394 - DNA, 31 bp, Homo sapiens; identical to SEQ ID NO: 5476
  chr16:1660852-1660883
  hypo

SEQ ID NO: 52395 - DNA, 116 bp, Homo sapiens; identical to SEQ ID NO: 5478
  chr16:1664480-1664596
  hypo

SEQ ID NO: 52396 - DNA, 31 bp, Homo sapiens; identical to SEQ ID NO: 5479
  chr16:1664614-1664645
  hypo

SEQ ID NO: 52397 - DNA, 31 bp, Homo sapiens; identical to SEQ ID NO: 21948
  chr16:1701257-1701288
  hypo

SEQ ID NO: 52398 - DNA, 31 bp, Homo sapiens; identical to SEQ ID NO: 21949
  chr16:1701298-1701329
  hypo

SEQ ID NO: 52399 - DNA, 42 bp, Homo sapiens; identical to SEQ ID NO: 21950
  chr16:1701344-1701386
  hypo

SEQ ID NO: 52400 - DNA, 31 bp, Homo sapiens; identical to SEQ ID NO: 21951
  chr16:1705538-1705569
  hypo

SEQ ID NO: 52401 - DNA, 37 bp, Homo sapiens; identical to SEQ ID NO: 21952
  chr16:1730132-1730169
  hypo

SEQ ID NO: 52402 - DNA, 2 bp, Homo sapiens
  chr16:1730305-1730307
  hypo
tt

SEQ ID NO: 52403 - DNA, 31 bp, Homo sapiens; identical to SEQ ID NO: 21957
  chr16:1730849-1730880
  hypo

SEQ ID NO: 52404 - DNA, 31 bp, Homo sapiens; identical to SEQ ID NO: 21959
  chr16:1762443-1762474
  hypo

SEQ ID NO: 52405 - DNA, 29 bp, Homo sapiens
  chr16:1807852-1807881
  hypo
ctgccctcctgatgggcgatgggagcaga

SEQ ID NO: 52406 - DNA, 50 bp, Homo sapiens; identical to SEQ ID NO: 21962
  chr16:1810313-1810363
  hypo

SEQ ID NO: 52407 - DNA, 31 bp, Homo sapiens; identical to SEQ ID NO: 21963
  chr16:1810367-1810398
  hypo

SEQ ID NO: 52408 - DNA, 31 bp, Homo sapiens; identical to SEQ ID NO: 21964
  chr16:1810406-1810437
  hypo

SEQ ID NO: 52409 - DNA, 31 bp, Homo sapiens; identical to SEQ ID NO: 21965
  chr16:1813397-1813428
  hypo

SEQ ID NO: 52410 - DNA, 31 bp, Homo sapiens; identical to SEQ ID NO: 21966
  chr16:1813439-1813470
  hypo

SEQ ID NO: 52411 - DNA, 2 bp, Homo sapiens
  chr16:1813481-1813483
  hypo
gc

SEQ ID NO: 52412 - DNA, 31 bp, Homo sapiens; identical to SEQ ID NO: 21974
  chr16:1831183-1831214
  hypo

SEQ ID NO: 52413 - DNA, 31 bp, Homo sapiens; identical to SEQ ID NO: 21975
  chr16:1854038-1854069
  hypo

SEQ ID NO: 52414 - DNA, 32 bp, Homo sapiens; identical to SEQ ID NO: 21976
  chr16:1895225-1895257
  hypo

SEQ ID NO: 52415 - DNA, 37 bp, Homo sapiens; identical to SEQ ID NO: 21977
  chr16:1938627-1938664
  hypo

SEQ ID NO: 52416 - DNA, 31 bp, Homo sapiens; identical to SEQ ID NO: 21978
  chr16:1944318-1944349
  hypo

SEQ ID NO: 52417 - DNA, 31 bp, Homo sapiens; identical to SEQ ID NO: 21979
  chr16:1982770-1982801
  hypo

SEQ ID NO: 52418 - DNA, 40 bp, Homo sapiens; identical to SEQ ID NO: 21981
  chr16:1997450-1997490
  hypo

SEQ ID NO: 52419 - DNA, 37 bp, Homo sapiens; identical to SEQ ID NO: 21982
  chr16:1997524-1997561
  hypo

SEQ ID NO: 52420 - DNA, 42 bp, Homo sapiens; identical to SEQ ID NO: 21983
  chr16:2000905-2000947
  hypo

SEQ ID NO: 52421 - DNA, 15 bp, Homo sapiens
  chr16:2029207-2029222
  hypo
cggtggcctgggagg

SEQ ID NO: 52422 - DNA, 36 bp, Homo sapiens; identical to SEQ ID NO: 21989
  chr16:2035810-2035846
  hypo

SEQ ID NO: 52423 - DNA, 31 bp, Homo sapiens; identical to SEQ ID NO: 21992
  chr16:2051261-2051292
  hypo

SEQ ID NO: 52424 - DNA, 15 bp, Homo sapiens
  chr16:2106689-2106704
  hypo
ccggctgagagcctc

SEQ ID NO: 52425 - DNA, 37 bp, Homo sapiens
  chr16:2106732-2106769
  hypo
ccatcaacgtcaaggagctctgcgagccttgctggaa

SEQ ID NO: 52426 - DNA, 40 bp, Homo sapiens; identical to SEQ ID NO: 21997
  chr16:2106972-2107012
  hypo

SEQ ID NO: 52427 - DNA, 31 bp, Homo sapiens; identical to SEQ ID NO: 21998
  chr16:2107211-2107242
  hypo

SEQ ID NO: 52428 - DNA, 2 bp, Homo sapiens
  chr16:2131667-2131669
  hypo
tg

SEQ ID NO: 52429 - DNA, 12 bp, Homo sapiens
  chr16:2131766-2131778
  hypo
ccaaaccccctc

SEQ ID NO: 52430 - DNA, 2 bp, Homo sapiens
  chr16:2141908-2141910
  hypo
tg

SEQ ID NO: 52431 - DNA, 2 bp, Homo sapiens
  chr16:2146362-2146364
  hypo
ag

SEQ ID NO: 52432 - DNA, 2 bp, Homo sapiens
  chr16:2212715-2212717
  hypo
tc

SEQ ID NO: 52433 - DNA, 92 bp, Homo sapiens
  chr16:2229599-2229691
  hypo
tgccagggcctggcagcggcaccttcttggaggtgggtgtgggcgagccctggagcttgggcacaggctgcgtcaggacgggcttgggagag

SEQ ID NO: 52434 - DNA, 40 bp, Homo sapiens; identical to SEQ ID NO: 22010
  chr16:2230290-2230330
  hypo

SEQ ID NO: 52435 - DNA, 48 bp, Homo sapiens
  chr16:2230441-2230489
  hypo
aggccatcctcaggctcggcgtcaggcaccggctcatccgccaggttg

SEQ ID NO: 52436 - DNA, 31 bp, Homo sapiens; identical to SEQ ID NO: 22015
  chr16:2231184-2231215
  hypo

SEQ ID NO: 52437 - DNA, 91 bp, Homo sapiens; identical to SEQ ID NO: 22016
  chr16:2231234-2231325
  hypo

SEQ ID NO: 52438 - DNA, 31 bp, Homo sapiens; identical to SEQ ID NO: 22017
  chr16:2231348-2231379
  hypo

SEQ ID NO: 52439 - DNA, 31 bp, Homo sapiens; identical to SEQ ID NO: 22018
  chr16:2241313-2241344
  hypo

SEQ ID NO: 52440 - DNA, 36 bp, Homo sapiens
  chr16:2278348-2278384
  hypo
ctgctgacagcaggctcgttgcagatgaggacgatg

SEQ ID NO: 52441 - DNA, 2 bp, Homo sapiens
  chr16:2281202-2281204
  hypo
tg

SEQ ID NO: 52442 - DNA, 40 bp, Homo sapiens; identical to SEQ ID NO: 22026
  chr16:2281408-2281448
  hypo

SEQ ID NO: 52443 - DNA, 17 bp, Homo sapiens
  chr16:2281623-2281640
  hypo
tcgcctcaggctgtccc

SEQ ID NO: 52444 - DNA, 2 bp, Homo sapiens
  chr16:2286026-2286028
  hypo
ga

SEQ ID NO: 52445 - DNA, 51 bp, Homo sapiens; identical to SEQ ID NO: 22031
  chr16:2294341-2294392
  hypo

SEQ ID NO: 52446 - DNA, 48 bp, Homo sapiens; identical to SEQ ID NO: 22032
  chr16:2475884-2475932
  hypo

SEQ ID NO: 52447 - DNA, 31 bp, Homo sapiens; identical to SEQ ID NO: 22033
  chr16:2475947-2475978
  hypo

SEQ ID NO: 52448 - DNA, 49 bp, Homo sapiens; identical to SEQ ID NO: 22034
  chr16:2475985-2476034
  hypo

SEQ ID NO: 52449 - DNA, 19 bp, Homo sapiens
  chr16:2498053-2498072
  hypo
ttggcgctggttgacaaca

SEQ ID NO: 52450 - DNA, 31 bp, Homo sapiens; identical to SEQ ID NO: 22036
  chr16:2498073-2498104
  hypo

SEQ ID NO: 52451 - DNA, 31 bp, Homo sapiens; identical to SEQ ID NO: 22037
  chr16:2531771-2531802
  hypo

SEQ ID NO: 52452 - DNA, 2 bp, Homo sapiens
  chr16:2531803-2531805
  hypo
ca

SEQ ID NO: 52453 - DNA, 157 bp, Homo sapiens
  chr16:2546249-2546406
  hypo
aactgaagcagctggcgcgccagggctactgggcccaaagccacgccctgcggggaaaggtgtaccagcgcctgatccgggacattccctgccgcacggtcacgcctgacgccagcgtgtacagcgacatcgtgggcaagatcgtgggcaagcacag

SEQ ID NO: 52454 - DNA, 61 bp, Homo sapiens; identical to SEQ ID NO: 22040
  chr16:2546510-2546571
  hypo

SEQ ID NO: 52455 - DNA, 31 bp, Homo sapiens; identical to SEQ ID NO: 22041
  chr16:2760239-2760270
  hypo

SEQ ID NO: 52456 - DNA, 51 bp, Homo sapiens; identical to SEQ ID NO: 22043
  chr16:2770027-2770078
  hypo

SEQ ID NO: 52457 - DNA, 2 bp, Homo sapiens
  chr16:2770091-2770093
  hypo
gg

SEQ ID NO: 52458 - DNA, 20 bp, Homo sapiens
  chr16:2819797-2819817
  hypo
accaacgggccttgcccgcc

SEQ ID NO: 52459 - DNA, 31 bp, Homo sapiens; identical to SEQ ID NO: 22051
  chr16:2861515-2861546
  hypo

SEQ ID NO: 52460 - DNA, 31 bp, Homo sapiens; identical to SEQ ID NO: 22052
  chr16:2946522-2946553
  hypo

SEQ ID NO: 52461 - DNA, 34 bp, Homo sapiens; identical to SEQ ID NO: 22053
  chr16:2959165-2959199
  hypo

SEQ ID NO: 52462 - DNA, 31 bp, Homo sapiens; identical to SEQ ID NO: 5496
  chr16:2969679-2969710
  hypo

SEQ ID NO: 52463 - DNA, 23 bp, Homo sapiens
  chr16:2974650-2974673
  hypo
gtgggtcacgcaacccccccagg

SEQ ID NO: 52464 - DNA, 31 bp, Homo sapiens; identical to SEQ ID NO: 22056
  chr16:2979897-2979928
  hypo

SEQ ID NO: 52465 - DNA, 31 bp, Homo sapiens; identical to SEQ ID NO: 22057
  chr16:3051090-3051121
  hypo

SEQ ID NO: 52466 - DNA, 31 bp, Homo sapiens; identical to SEQ ID NO: 22058
  chr16:3051125-3051156
  hypo

SEQ ID NO: 52467 - DNA, 53 bp, Homo sapiens; identical to SEQ ID NO: 22059
  chr16:3052304-3052357
  hypo

SEQ ID NO: 52468 - DNA, 31 bp, Homo sapiens; identical to SEQ ID NO: 22060
  chr16:3052369-3052400
  hypo

SEQ ID NO: 52469 - DNA, 31 bp, Homo sapiens; identical to SEQ ID NO: 5498
  chr16:3071261-3071292
  hypo

SEQ ID NO: 52470 - DNA, 62 bp, Homo sapiens; identical to SEQ ID NO: 22063
  chr16:3165155-3165217
  hypo

SEQ ID NO: 52471 - DNA, 50 bp, Homo sapiens; identical to SEQ ID NO: 22064
  chr16:3167168-3167218
  hypo

SEQ ID NO: 52472 - DNA, 38 bp, Homo sapiens; identical to SEQ ID NO: 22065
  chr16:3167264-3167302
  hypo

SEQ ID NO: 52473 - DNA, 68 bp, Homo sapiens; identical to SEQ ID NO: 22066
  chr16:3169008-3169076
  hypo

SEQ ID NO: 52474 - DNA, 38 bp, Homo sapiens; identical to SEQ ID NO: 22067
  chr16:3169419-3169457
  hypo

SEQ ID NO: 52475 - DNA, 35 bp, Homo sapiens; identical to SEQ ID NO: 22068
  chr16:3170503-3170538
  hypo

SEQ ID NO: 52476 - DNA, 46 bp, Homo sapiens; identical to SEQ ID NO: 22069
  chr16:3170539-3170585
  hypo

SEQ ID NO: 52477 - DNA, 31 bp, Homo sapiens; identical to SEQ ID NO: 22070
  chr16:3170601-3170632
  hypo

SEQ ID NO: 52478 - DNA, 31 bp, Homo sapiens; identical to SEQ ID NO: 22071
  chr16:3170903-3170934
  hypo

SEQ ID NO: 52479 - DNA, 30 bp, Homo sapiens; identical to SEQ ID NO: 22073
  chr16:3196500-3196530
  hypo

SEQ ID NO: 52480 - DNA, 112 bp, Homo sapiens; identical to SEQ ID NO: 5501
  chr16:3200662-3200774
  hypo

SEQ ID NO: 52481 - DNA, 116 bp, Homo sapiens; identical to SEQ ID NO: 5502
  chr16:3200795-3200911
  hypo

SEQ ID NO: 52482 - DNA, 55 bp, Homo sapiens; identical to SEQ ID NO: 5503
  chr16:3200930-3200985
  hypo

SEQ ID NO: 52483 - DNA, 7 bp, Homo sapiens
  chr16:3209093-3209100
  hypo
ctgcagg

SEQ ID NO: 52484 - DNA, 5 bp, Homo sapiens
  chr16:3211744-3211749
  hypo
cacgc

SEQ ID NO: 52485 - DNA, 31 bp, Homo sapiens; identical to SEQ ID NO: 22081
  chr16:3613740-3613771
  hypo

SEQ ID NO: 52486 - DNA, 74 bp, Homo sapiens; identical to SEQ ID NO: 22082
  chr16:3635038-3635112
  hypo

SEQ ID NO: 52487 - DNA, 36 bp, Homo sapiens; identical to SEQ ID NO: 22083
  chr16:3635121-3635157
  hypo

SEQ ID NO: 52488 - DNA, 2 bp, Homo sapiens
  chr16:3696693-3696695
  hypo
tc

SEQ ID NO: 52489 - DNA, 75 bp, Homo sapiens; identical to SEQ ID NO: 22086
  chr16:3696803-3696878
  hypo

SEQ ID NO: 52490 - DNA, 31 bp, Homo sapiens; identical to SEQ ID NO: 22087
  chr16:3706728-3706759
  hypo

SEQ ID NO: 52491 - DNA, 39 bp, Homo sapiens; identical to SEQ ID NO: 22088
  chr16:3706767-3706806
  hypo

SEQ ID NO: 52492 - DNA, 31 bp, Homo sapiens; identical to SEQ ID NO: 22089
  chr16:3721594-3721625
  hypo

SEQ ID NO: 52493 - DNA, 31 bp, Homo sapiens; identical to SEQ ID NO: 22090
  chr16:3776073-3776104
  hypo

SEQ ID NO: 52494 - DNA, 61 bp, Homo sapiens; identical to SEQ ID NO: 22091
  chr16:3776217-3776278
  hypo

SEQ ID NO: 52495 - DNA, 56 bp, Homo sapiens; identical to SEQ ID NO: 22092
  chr16:3776372-3776428
  hypo

SEQ ID NO: 52496 - DNA, 31 bp, Homo sapiens; identical to SEQ ID NO: 22093
  chr16:3781041-3781072
  hypo

SEQ ID NO: 52497 - DNA, 76 bp, Homo sapiens; identical to SEQ ID NO: 22094
  chr16:3781097-3781173
  hypo

SEQ ID NO: 52498 - DNA, 34 bp, Homo sapiens; identical to SEQ ID NO: 5518
  chr16:3781397-3781431
  hypo

SEQ ID NO: 52499 - DNA, 46 bp, Homo sapiens; identical to SEQ ID NO: 5519
  chr16:3781433-3781479
  hypo

SEQ ID NO: 52500 - DNA, 31 bp, Homo sapiens; identical to SEQ ID NO: 5520
  chr16:3781527-3781558
  hypo

SEQ ID NO: 52501 - DNA, 54 bp, Homo sapiens; identical to SEQ ID NO: 22098
  chr16:3782088-3782142
  hypo

SEQ ID NO: 52502 - DNA, 31 bp, Homo sapiens; identical to SEQ ID NO: 22099
  chr16:3782145-3782176
  hypo

SEQ ID NO: 52503 - DNA, 43 bp, Homo sapiens; identical to SEQ ID NO: 22100
  chr16:3782241-3782284
  hypo

SEQ ID NO: 52504 - DNA, 31 bp, Homo sapiens; identical to SEQ ID NO: 22101
  chr16:3782304-3782335
  hypo

SEQ ID NO: 52505 - DNA, 51 bp, Homo sapiens; identical to SEQ ID NO: 22102
  chr16:3782393-3782444
  hypo

SEQ ID NO: 52506 - DNA, 31 bp, Homo sapiens; identical to SEQ ID NO: 22103
  chr16:3782453-3782484
  hypo

SEQ ID NO: 52507 - DNA, 31 bp, Homo sapiens; identical to SEQ ID NO: 22104
  chr16:3782512-3782543
  hypo

SEQ ID NO: 52508 - DNA, 31 bp, Homo sapiens; identical to SEQ ID NO: 22105
  chr16:3784365-3784396
  hypo

SEQ ID NO: 52509 - DNA, 62 bp, Homo sapiens; identical to SEQ ID NO: 22106
  chr16:3784502-3784564
  hypo

SEQ ID NO: 52510 - DNA, 43 bp, Homo sapiens; identical to SEQ ID NO: 22107
  chr16:3784603-3784646
  hypo

SEQ ID NO: 52511 - DNA, 56 bp, Homo sapiens; identical to SEQ ID NO: 22108
  chr16:3784658-3784714
  hypo

SEQ ID NO: 52512 - DNA, 44 bp, Homo sapiens; identical to SEQ ID NO: 22109
  chr16:3784763-3784807
  hypo

SEQ ID NO: 52513 - DNA, 37 bp, Homo sapiens; identical to SEQ ID NO: 22110
  chr16:3784999-3785036
  hypo

SEQ ID NO: 52514 - DNA, 100 bp, Homo sapiens; identical to SEQ ID NO: 22111
  chr16:3785041-3785141
  hypo

SEQ ID NO: 52515 - DNA, 31 bp, Homo sapiens; identical to SEQ ID NO: 22112
  chr16:3785795-3785826
  hypo

SEQ ID NO: 52516 - DNA, 31 bp, Homo sapiens; identical to SEQ ID NO: 22113
  chr16:3785871-3785902
  hypo

SEQ ID NO: 52517 - DNA, 31 bp, Homo sapiens; identical to SEQ ID NO: 22114
  chr16:3802016-3802047
  hypo

SEQ ID NO: 52518 - DNA, 31 bp, Homo sapiens; identical to SEQ ID NO: 22115
  chr16:3802072-3802103
  hypo

SEQ ID NO: 52519 - DNA, 45 bp, Homo sapiens; identical to SEQ ID NO: 22116
  chr16:3802112-3802157
  hypo

SEQ ID NO: 52520 - DNA, 31 bp, Homo sapiens; identical to SEQ ID NO: 22118
  chr16:3892676-3892707
  hypo

SEQ ID NO: 52521 - DNA, 56 bp, Homo sapiens; identical to SEQ ID NO: 5521
  chr16:3931081-3931137
  hypo

SEQ ID NO: 52522 - DNA, 31 bp, Homo sapiens; identical to SEQ ID NO: 5522
  chr16:3931160-3931191
  hypo

SEQ ID NO: 52523 - DNA, 2 bp, Homo sapiens
  chr16:3931902-3931904
  hypo
ac

SEQ ID NO: 52524 - DNA, 31 bp, Homo sapiens; identical to SEQ ID NO: 22123
  chr16:4007727-4007758
  hypo

SEQ ID NO: 52525 - DNA, 35 bp, Homo sapiens; identical to SEQ ID NO: 22124
  chr16:4016325-4016360
  hypo

SEQ ID NO: 52526 - DNA, 31 bp, Homo sapiens; identical to SEQ ID NO: 22125
  chr16:4016370-4016401
  hypo

SEQ ID NO: 52527 - DNA, 31 bp, Homo sapiens; identical to SEQ ID NO: 22126
  chr16:4043268-4043299
  hypo

SEQ ID NO: 52528 - DNA, 31 bp, Homo sapiens; identical to SEQ ID NO: 22127
  chr16:4043834-4043865
  hypo

SEQ ID NO: 52529 - DNA, 31 bp, Homo sapiens; identical to SEQ ID NO: 22128
  chr16:4047660-4047691
  hypo

SEQ ID NO: 52530 - DNA, 221 bp, Homo sapiens; identical to SEQ ID NO: 5523
  chr16:4166050-4166271
  hypo

SEQ ID NO: 52531 - DNA, 119 bp, Homo sapiens; identical to SEQ ID NO: 5524
  chr16:4166386-4166505
  hypo

SEQ ID NO: 52532 - DNA, 173 bp, Homo sapiens; identical to SEQ ID NO: 5525
  chr16:4166639-4166812
  hypo

SEQ ID NO: 52533 - DNA, 48 bp, Homo sapiens; identical to SEQ ID NO: 22132
  chr16:4183951-4183999
  hypo

SEQ ID NO: 52534 - DNA, 31 bp, Homo sapiens; identical to SEQ ID NO: 22133
  chr16:4184000-4184031
  hypo

SEQ ID NO: 52535 - DNA, 31 bp, Homo sapiens; identical to SEQ ID NO: 22134
  chr16:4228477-4228508
  hypo

SEQ ID NO: 52536 - DNA, 31 bp, Homo sapiens; identical to SEQ ID NO: 5528
  chr16:4233704-4233735
  hypo

SEQ ID NO: 52537 - DNA, 40 bp, Homo sapiens; identical to SEQ ID NO: 5529
  chr16:4233745-4233785
  hypo

SEQ ID NO: 52538 - DNA, 92 bp, Homo sapiens; identical to SEQ ID NO: 5530
  chr16:4234086-4234178
  hypo

SEQ ID NO: 52539 - DNA, 35 bp, Homo sapiens; identical to SEQ ID NO: 22138
  chr16:4310571-4310606
  hypo

SEQ ID NO: 52540 - DNA, 31 bp, Homo sapiens; identical to SEQ ID NO: 22139
  chr16:4310615-4310646
  hypo

SEQ ID NO: 52541 - DNA, 31 bp, Homo sapiens; identical to SEQ ID NO: 5531
  chr16:4366576-4366607
  hypo

SEQ ID NO: 52542 - DNA, 31 bp, Homo sapiens; identical to SEQ ID NO: 22141
  chr16:4411851-4411882
  hypo

SEQ ID NO: 52543 - DNA, 31 bp, Homo sapiens; identical to SEQ ID NO: 22142
  chr16:4414186-4414217
  hypo

SEQ ID NO: 52544 - DNA, 31 bp, Homo sapiens; identical to SEQ ID NO: 22143
  chr16:4414526-4414557
  hypo

SEQ ID NO: 52545 - DNA, 72 bp, Homo sapiens
  chr16:4430995-4431067
  hypo
gcccgccaggggaccacggtgccccgagacgtgccacccgacacggtggggctgtacgtctttgagaacggc

SEQ ID NO: 52546 - DNA, 2 bp, Homo sapiens
  chr16:4431125-4431127
  hypo
tg

SEQ ID NO: 52547 - DNA, 79 bp, Homo sapiens; identical to SEQ ID NO: 22146
  chr16:4431222-4431301
  hypo

SEQ ID NO: 52548 - DNA, 31 bp, Homo sapiens; identical to SEQ ID NO: 22147
  chr16:4644650-4644681
  hypo

SEQ ID NO: 52549 - DNA, 5 bp, Homo sapiens
  chr16:4723592-4723597
  hypo
gcctc

SEQ ID NO: 52550 - DNA, 31 bp, Homo sapiens; identical to SEQ ID NO: 22149
  chr16:4807248-4807279
  hypo

SEQ ID NO: 52551 - DNA, 31 bp, Homo sapiens; identical to SEQ ID NO: 22151
  chr16:4920296-4920327
  hypo

SEQ ID NO: 52552 - DNA, 31 bp, Homo sapiens; identical to SEQ ID NO: 22152
  chr16:4920695-4920726
  hypo

SEQ ID NO: 52553 - DNA, 31 bp, Homo sapiens; identical to SEQ ID NO: 22153
  chr16:4964117-4964148
  hypo

SEQ ID NO: 52554 - DNA, 31 bp, Homo sapiens; identical to SEQ ID NO: 22154
  chr16:4971776-4971807
  hypo

SEQ ID NO: 52555 - DNA, 59 bp, Homo sapiens; identical to SEQ ID NO: 22155
  chr16:4971833-4971892
  hypo

SEQ ID NO: 52556 - DNA, 40 bp, Homo sapiens; identical to SEQ ID NO: 22156
  chr16:4980310-4980350
  hypo

SEQ ID NO: 52557 - DNA, 31 bp, Homo sapiens; identical to SEQ ID NO: 22157
  chr16:4980370-4980401
  hypo

SEQ ID NO: 52558 - DNA, 59 bp, Homo sapiens; identical to SEQ ID NO: 22158
  chr16:4980419-4980478
  hypo

SEQ ID NO: 52559 - DNA, 48 bp, Homo sapiens; identical to SEQ ID NO: 5532
  chr16:5007928-5007976
  hypo

SEQ ID NO: 52560 - DNA, 81 bp, Homo sapiens; identical to SEQ ID NO: 5533
  chr16:5007999-5008080
  hypo

SEQ ID NO: 52561 - DNA, 31 bp, Homo sapiens; identical to SEQ ID NO: 5537
  chr16:5121975-5122006
  hypo

SEQ ID NO: 52562 - DNA, 31 bp, Homo sapiens; identical to SEQ ID NO: 5541
  chr16:8768189-8768220
  hypo

SEQ ID NO: 52563 - DNA, 37 bp, Homo sapiens; identical to SEQ ID NO: 5542
  chr16:8768282-8768319
  hypo

SEQ ID NO: 52564 - DNA, 31 bp, Homo sapiens; identical to SEQ ID NO: 22165
  chr16:8870108-8870139
  hypo

SEQ ID NO: 52565 - DNA, 2 bp, Homo sapiens
  chr16:9009859-9009861
  hypo
tg

SEQ ID NO: 52566 - DNA, 32 bp, Homo sapiens
  chr16:9062199-9062231
  hypo
gttggccagtgcattcgctcacgcctgtaatc

SEQ ID NO: 52567 - DNA, 72 bp, Homo sapiens; identical to SEQ ID NO: 5544
  chr16:9186866-9186938
  hypo

SEQ ID NO: 52568 - DNA, 56 bp, Homo sapiens; identical to SEQ ID NO: 5545
  chr16:9186974-9187030
  hypo

SEQ ID NO: 52569 - DNA, 31 bp, Homo sapiens; identical to SEQ ID NO: 22182
  chr16:9222466-9222497
  hypo

SEQ ID NO: 52570 - DNA, 31 bp, Homo sapiens; identical to SEQ ID NO: 22183
  chr16:9222516-9222547
  hypo

SEQ ID NO: 52571 - DNA, 31 bp, Homo sapiens; identical to SEQ ID NO: 22184
  chr16:9242311-9242342
  hypo

SEQ ID NO: 52572 - DNA, 31 bp, Homo sapiens; identical to SEQ ID NO: 22185
  chr16:10617155-10617186
  hypo

SEQ ID NO: 52573 - DNA, 31 bp, Homo sapiens; identical to SEQ ID NO: 22186
  chr16:10625824-10625855
  hypo

SEQ ID NO: 52574 - DNA, 31 bp, Homo sapiens; identical to SEQ ID NO: 22187
  chr16:10631324-10631355
  hypo

SEQ ID NO: 52575 - DNA, 54 bp, Homo sapiens; identical to SEQ ID NO: 22188
  chr16:10631387-10631441
  hypo

SEQ ID NO: 52576 - DNA, 37 bp, Homo sapiens; identical to SEQ ID NO: 22189
  chr16:10631474-10631511
  hypo

SEQ ID NO: 52577 - DNA, 31 bp, Homo sapiens; identical to SEQ ID NO: 5549
  chr16:10674032-10674063
  hypo

SEQ ID NO: 52578 - DNA, 348 bp, Homo sapiens; identical to SEQ ID NO: 5550
  chr16:10674137-10674485
  hypo

SEQ ID NO: 52579 - DNA, 191 bp, Homo sapiens; identical to SEQ ID NO: 5551
  chr16:10674486-10674677
  hypo

SEQ ID NO: 52580 - DNA, 31 bp, Homo sapiens; identical to SEQ ID NO: 22193
  chr16:10823652-10823683
  hypo

SEQ ID NO: 52581 - DNA, 55 bp, Homo sapiens; identical to SEQ ID NO: 22194
  chr16:11072430-11072485
  hypo

SEQ ID NO: 52582 - DNA, 2 bp, Homo sapiens
  chr16:11178654-11178656
  hypo
gc

SEQ ID NO: 52583 - DNA, 31 bp, Homo sapiens; identical to SEQ ID NO: 22196
  chr16:11219552-11219583
  hypo

SEQ ID NO: 52584 - DNA, 59 bp, Homo sapiens; identical to SEQ ID NO: 22197
  chr16:11219600-11219659
  hypo

SEQ ID NO: 52585 - DNA, 42 bp, Homo sapiens; identical to SEQ ID NO: 22198
  chr16:11219688-11219730
  hypo

SEQ ID NO: 52586 - DNA, 31 bp, Homo sapiens; identical to SEQ ID NO: 22199
  chr16:11219739-11219770
  hypo

SEQ ID NO: 52587 - DNA, 45 bp, Homo sapiens; identical to SEQ ID NO: 22200
  chr16:11219923-11219968
  hypo

SEQ ID NO: 52588 - DNA, 31 bp, Homo sapiens; identical to SEQ ID NO: 22201
  chr16:11220138-11220169
  hypo

SEQ ID NO: 52589 - DNA, 31 bp, Homo sapiens; identical to SEQ ID NO: 22202
  chr16:11342006-11342037
  hypo

SEQ ID NO: 52590 - DNA, 31 bp, Homo sapiens; identical to SEQ ID NO: 22204
  chr16:11541943-11541974
  hypo

SEQ ID NO: 52591 - DNA, 31 bp, Homo sapiens; identical to SEQ ID NO: 22205
  chr16:11542034-11542065
  hypo

SEQ ID NO: 52592 - DNA, 2 bp, Homo sapiens
  chr16:11703493-11703495
  hypo
tt

SEQ ID NO: 52593 - DNA, 31 bp, Homo sapiens; identical to SEQ ID NO: 22207
  chr16:11831366-11831397
  hypo

SEQ ID NO: 52594 - DNA, 31 bp, Homo sapiens; identical to SEQ ID NO: 22210
  chr16:11879890-11879921
  hypo

SEQ ID NO: 52595 - DNA, 30 bp, Homo sapiens; identical to SEQ ID NO: 22211
  chr16:12011432-12011462
  hypo

SEQ ID NO: 52596 - DNA, 31 bp, Homo sapiens; identical to SEQ ID NO: 22214
  chr16:12142576-12142607
  hypo

SEQ ID NO: 52597 - DNA, 31 bp, Homo sapiens; identical to SEQ ID NO: 22215
  chr16:12410419-12410450
  hypo

SEQ ID NO: 52598 - DNA, 31 bp, Homo sapiens; identical to SEQ ID NO: 22216
  chr16:12497523-12497554
  hypo

SEQ ID NO: 52599 - DNA, 44 bp, Homo sapiens; identical to SEQ ID NO: 22217
  chr16:12497560-12497604
  hypo

SEQ ID NO: 52600 - DNA, 76 bp, Homo sapiens; identical to SEQ ID NO: 22218
  chr16:12498044-12498120
  hypo

SEQ ID NO: 52601 - DNA, 31 bp, Homo sapiens; identical to SEQ ID NO: 22219
  chr16:12498122-12498153
  hypo

SEQ ID NO: 52602 - DNA, 31 bp, Homo sapiens; identical to SEQ ID NO: 22220
  chr16:12498179-12498210
  hypo

SEQ ID NO: 52603 - DNA, 31 bp, Homo sapiens; identical to SEQ ID NO: 22221
  chr16:12800883-12800914
  hypo

SEQ ID NO: 52604 - DNA, 38 bp, Homo sapiens; identical to SEQ ID NO: 5552
  chr16:13877529-13877567
  hypo

SEQ ID NO: 52605 - DNA, 31 bp, Homo sapiens; identical to SEQ ID NO: 5553
  chr16:13877603-13877634
  hypo

SEQ ID NO: 52606 - DNA, 43 bp, Homo sapiens; identical to SEQ ID NO: 5554
  chr16:13877664-13877707
  hypo

SEQ ID NO: 52607 - DNA, 31 bp, Homo sapiens; identical to SEQ ID NO: 22225
  chr16:13977141-13977172
  hypo

SEQ ID NO: 52608 - DNA, 31 bp, Homo sapiens; identical to SEQ ID NO: 22226
  chr16:13977197-13977228
  hypo

SEQ ID NO: 52609 - DNA, 31 bp, Homo sapiens; identical to SEQ ID NO: 22227
  chr16:13977317-13977348
  hypo

SEQ ID NO: 52610 - DNA, 31 bp, Homo sapiens; identical to SEQ ID NO: 22228
  chr16:14095398-14095429
  hypo

SEQ ID NO: 52611 - DNA, 52 bp, Homo sapiens; identical to SEQ ID NO: 5555
  chr16:14396963-14397015
  hypo

SEQ ID NO: 52612 - DNA, 31 bp, Homo sapiens; identical to SEQ ID NO: 22230
  chr16:14728322-14728353
  hypo

SEQ ID NO: 52613 - DNA, 35 bp, Homo sapiens; identical to SEQ ID NO: 22231
  chr16:14728389-14728424
  hypo

SEQ ID NO: 52614 - DNA, 2 bp, Homo sapiens
  chr16:14728493-14728495
  hypo
ag

SEQ ID NO: 52615 - DNA, 14 bp, Homo sapiens
  chr16:15191524-15191538
  hypo
acacctgtgaacat

SEQ ID NO: 52616 - DNA, 31 bp, Homo sapiens; identical to SEQ ID NO: 22234
  chr16:15541439-15541470
  hypo

SEQ ID NO: 52617 - DNA, 69 bp, Homo sapiens; identical to SEQ ID NO: 22235
  chr16:15541562-15541631
  hypo

SEQ ID NO: 52618 - DNA, 31 bp, Homo sapiens; identical to SEQ ID NO: 22236
  chr16:15609051-15609082
  hypo

SEQ ID NO: 52619 - DNA, 31 bp, Homo sapiens; identical to SEQ ID NO: 22237
  chr16:15649665-15649696
  hypo

SEQ ID NO: 52620 - DNA, 31 bp, Homo sapiens; identical to SEQ ID NO: 22239
  chr16:15680991-15681022
  hypo

SEQ ID NO: 52621 - DNA, 40 bp, Homo sapiens; identical to SEQ ID NO: 22240
  chr16:15798617-15798657
  hypo

SEQ ID NO: 52622 - DNA, 31 bp, Homo sapiens; identical to SEQ ID NO: 22241
  chr16:15798668-15798699
  hypo

SEQ ID NO: 52623 - DNA, 31 bp, Homo sapiens; identical to SEQ ID NO: 22242
  chr16:15799466-15799497
  hypo

SEQ ID NO: 52624 - DNA, 30 bp, Homo sapiens; identical to SEQ ID NO: 22244
  chr16:16095331-16095361
  hypo

SEQ ID NO: 52625 - DNA, 31 bp, Homo sapiens; identical to SEQ ID NO: 22246
  chr16:16259431-16259462
  hypo

SEQ ID NO: 52626 - DNA, 82 bp, Homo sapiens; identical to SEQ ID NO: 22247
  chr16:16259629-16259711
  hypo

SEQ ID NO: 52627 - DNA, 74 bp, Homo sapiens; identical to SEQ ID NO: 22248
  chr16:16282898-16282972
  hypo

SEQ ID NO: 52628 - DNA, 31 bp, Homo sapiens; identical to SEQ ID NO: 22249
  chr16:16282981-16283012
  hypo

SEQ ID NO: 52629 - DNA, 64 bp, Homo sapiens; identical to SEQ ID NO: 22250
  chr16:16283021-16283085
  hypo

SEQ ID NO: 52630 - DNA, 51 bp, Homo sapiens; identical to SEQ ID NO: 22251
  chr16:18076375-18076426
  hypo

SEQ ID NO: 52631 - DNA, 31 bp, Homo sapiens; identical to SEQ ID NO: 22256
  chr16:19026859-19026890
  hypo

SEQ ID NO: 52632 - DNA, 31 bp, Homo sapiens; identical to SEQ ID NO: 22258
  chr16:19051021-19051052
  hypo

SEQ ID NO: 52633 - DNA, 39 bp, Homo sapiens; identical to SEQ ID NO: 22259
  chr16:19051138-19051177
  hypo

SEQ ID NO: 52634 - DNA, 31 bp, Homo sapiens; identical to SEQ ID NO: 22261
  chr16:19252127-19252158
  hypo

SEQ ID NO: 52635 - DNA, 31 bp, Homo sapiens; identical to SEQ ID NO: 22262
  chr16:19252163-19252194
  hypo

SEQ ID NO: 52636 - DNA, 31 bp, Homo sapiens; identical to SEQ ID NO: 22264
  chr16:19252578-19252609
  hypo

SEQ ID NO: 52637 - DNA, 31 bp, Homo sapiens; identical to SEQ ID NO: 22265
  chr16:19456420-19456451
  hypo

SEQ ID NO: 52638 - DNA, 31 bp, Homo sapiens; identical to SEQ ID NO: 22266
  chr16:19498384-19498415
  hypo

SEQ ID NO: 52639 - DNA, 2 bp, Homo sapiens
  chr16:19708503-19708505
  hypo
tg

SEQ ID NO: 52640 - DNA, 55 bp, Homo sapiens; identical to SEQ ID NO: 22268
  chr16:19743741-19743796
  hypo

SEQ ID NO: 52641 - DNA, 35 bp, Homo sapiens; identical to SEQ ID NO: 22269
  chr16:19845504-19845539
  hypo

SEQ ID NO: 52642 - DNA, 31 bp, Homo sapiens; identical to SEQ ID NO: 22270
  chr16:19845561-19845592
  hypo

SEQ ID NO: 52643 - DNA, 48 bp, Homo sapiens; identical to SEQ ID NO: 22271
  chr16:19845607-19845655
  hypo

SEQ ID NO: 52644 - DNA, 31 bp, Homo sapiens; identical to SEQ ID NO: 22272
  chr16:19845659-19845690
  hypo

SEQ ID NO: 52645 - DNA, 1 bp, Homo sapiens
  chr16:19883197-19883198
  hypo
c

SEQ ID NO: 52646 - DNA, 48 bp, Homo sapiens; identical to SEQ ID NO: 5563
  chr16:20817585-20817633
  hypo

SEQ ID NO: 52647 - DNA, 31 bp, Homo sapiens; identical to SEQ ID NO: 22277
  chr16:20822043-20822074
  hypo

SEQ ID NO: 52648 - DNA, 31 bp, Homo sapiens; identical to SEQ ID NO: 22278
  chr16:20822088-20822119
  hypo

SEQ ID NO: 52649 - DNA, 9 bp, Homo sapiens
  chr16:21566610-21566619
  hypo
ttaaaaact

SEQ ID NO: 52650 - DNA, 31 bp, Homo sapiens; identical to SEQ ID NO: 22282
  chr16:21633193-21633224
  hypo

SEQ ID NO: 52651 - DNA, 31 bp, Homo sapiens; identical to SEQ ID NO: 22283
  chr16:22084168-22084199
  hypo

SEQ ID NO: 52652 - DNA, 31 bp, Homo sapiens; identical to SEQ ID NO: 22284
  chr16:23496846-23496877
  hypo

SEQ ID NO: 52653 - DNA, 31 bp, Homo sapiens; identical to SEQ ID NO: 22285
  chr16:23606210-23606241
  hypo

SEQ ID NO: 52654 - DNA, 45 bp, Homo sapiens; identical to SEQ ID NO: 5577
  chr16:24354627-24354672
  hypo

SEQ ID NO: 52655 - DNA, 31 bp, Homo sapiens; identical to SEQ ID NO: 22295
  chr16:24739329-24739360
  hypo

SEQ ID NO: 52656 - DNA, 31 bp, Homo sapiens; identical to SEQ ID NO: 22296
  chr16:24739386-24739417
  hypo

SEQ ID NO: 52657 - DNA, 56 bp, Homo sapiens; identical to SEQ ID NO: 22297
  chr16:24772208-24772264
  hypo

SEQ ID NO: 52658 - DNA, 64 bp, Homo sapiens; identical to SEQ ID NO: 22298
  chr16:24837169-24837233
  hypo

SEQ ID NO: 52659 - DNA, 31 bp, Homo sapiens; identical to SEQ ID NO: 22299
  chr16:24837275-24837306
  hypo

SEQ ID NO: 52660 - DNA, 31 bp, Homo sapiens; identical to SEQ ID NO: 22300
  chr16:24837309-24837340
  hypo

SEQ ID NO: 52661 - DNA, 31 bp, Homo sapiens; identical to SEQ ID NO: 22301
  chr16:24937029-24937060
  hypo

SEQ ID NO: 52662 - DNA, 31 bp, Homo sapiens; identical to SEQ ID NO: 22302
  chr16:25006929-25006960
  hypo

SEQ ID NO: 52663 - DNA, 76 bp, Homo sapiens; identical to SEQ ID NO: 22303
  chr16:25006995-25007071
  hypo

SEQ ID NO: 52664 - DNA, 31 bp, Homo sapiens; identical to SEQ ID NO: 22305
  chr16:25266590-25266621
  hypo

SEQ ID NO: 52665 - DNA, 31 bp, Homo sapiens; identical to SEQ ID NO: 22306
  chr16:27186525-27186556
  hypo

SEQ ID NO: 52666 - DNA, 33 bp, Homo sapiens; identical to SEQ ID NO: 22307
  chr16:27242668-27242701
  hypo

SEQ ID NO: 52667 - DNA, 31 bp, Homo sapiens; identical to SEQ ID NO: 22308
  chr16:27268603-27268634
  hypo

SEQ ID NO: 52668 - DNA, 31 bp, Homo sapiens; identical to SEQ ID NO: 22309
  chr16:27268647-27268678
  hypo

SEQ ID NO: 52669 - DNA, 59 bp, Homo sapiens; identical to SEQ ID NO: 22310
  chr16:27268710-27268769
  hypo

SEQ ID NO: 52670 - DNA, 40 bp, Homo sapiens; identical to SEQ ID NO: 5578
  chr16:27280120-27280160
  hypo

SEQ ID NO: 52671 - DNA, 31 bp, Homo sapiens; identical to SEQ ID NO: 22312
  chr16:27284486-27284517
  hypo

SEQ ID NO: 52672 - DNA, 31 bp, Homo sapiens; identical to SEQ ID NO: 22313
  chr16:27356583-27356614
  hypo

SEQ ID NO: 52673 - DNA, 31 bp, Homo sapiens; identical to SEQ ID NO: 22314
  chr16:27356637-27356668
  hypo

SEQ ID NO: 52674 - DNA, 79 bp, Homo sapiens; identical to SEQ ID NO: 22315
  chr16:27356684-27356763
  hypo

SEQ ID NO: 52675 - DNA, 31 bp, Homo sapiens; identical to SEQ ID NO: 22316
  chr16:27475835-27475866
  hypo

SEQ ID NO: 52676 - DNA, 84 bp, Homo sapiens; identical to SEQ ID NO: 22317
  chr16:27475870-27475954
  hypo

SEQ ID NO: 52677 - DNA, 34 bp, Homo sapiens; identical to SEQ ID NO: 22318
  chr16:27476020-27476054
  hypo

SEQ ID NO: 52678 - DNA, 31 bp, Homo sapiens; identical to SEQ ID NO: 22319
  chr16:27560715-27560746
  hypo

SEQ ID NO: 52679 - DNA, 73 bp, Homo sapiens; identical to SEQ ID NO: 22320
  chr16:27560748-27560821
  hypo

SEQ ID NO: 52680 - DNA, 61 bp, Homo sapiens; identical to SEQ ID NO: 22321
  chr16:27560838-27560899
  hypo

SEQ ID NO: 52681 - DNA, 31 bp, Homo sapiens; identical to SEQ ID NO: 22322
  chr16:27735316-27735347
  hypo

SEQ ID NO: 52682 - DNA, 31 bp, Homo sapiens; identical to SEQ ID NO: 22323
  chr16:27786949-27786980
  hypo

SEQ ID NO: 52683 - DNA, 31 bp, Homo sapiens; identical to SEQ ID NO: 22324
  chr16:28229877-28229908
  hypo

SEQ ID NO: 52684 - DNA, 30 bp, Homo sapiens; identical to SEQ ID NO: 22325
  chr16:28237436-28237466
  hypo

SEQ ID NO: 52685 - DNA, 31 bp, Homo sapiens; identical to SEQ ID NO: 22326
  chr16:28585538-28585569
  hypo

SEQ ID NO: 52686 - DNA, 43 bp, Homo sapiens; identical to SEQ ID NO: 22327
  chr16:28585607-28585650
  hypo

SEQ ID NO: 52687 - DNA, 31 bp, Homo sapiens; identical to SEQ ID NO: 22330
  chr16:28880885-28880916
  hypo

SEQ ID NO: 52688 - DNA, 15 bp, Homo sapiens
  chr16:28887802-28887817
  hypo
cgggtgtgagcctga

SEQ ID NO: 52689 - DNA, 56 bp, Homo sapiens; identical to SEQ ID NO: 22332
  chr16:28914704-28914760
  hypo

SEQ ID NO: 52690 - DNA, 31 bp, Homo sapiens; identical to SEQ ID NO: 22333
  chr16:28914905-28914936
  hypo

SEQ ID NO: 52691 - DNA, 35 bp, Homo sapiens; identical to SEQ ID NO: 22335
  chr16:29001661-29001696
  hypo

SEQ ID NO: 52692 - DNA, 31 bp, Homo sapiens; identical to SEQ ID NO: 22336
  chr16:29001744-29001775
  hypo

SEQ ID NO: 52693 - DNA, 41 bp, Homo sapiens; identical to SEQ ID NO: 22337
  chr16:29118828-29118869
  hypo

SEQ ID NO: 52694 - DNA, 64 bp, Homo sapiens; identical to SEQ ID NO: 22338
  chr16:29231512-29231576
  hypo

SEQ ID NO: 52695 - DNA, 31 bp, Homo sapiens; identical to SEQ ID NO: 22339
  chr16:29231587-29231618
  hypo

SEQ ID NO: 52696 - DNA, 31 bp, Homo sapiens; identical to SEQ ID NO: 22340
  chr16:29262665-29262696
  hypo

SEQ ID NO: 52697 - DNA, 31 bp, Homo sapiens; identical to SEQ ID NO: 22341
  chr16:29262712-29262743
  hypo

SEQ ID NO: 52698 - DNA, 22 bp, Homo sapiens
  chr16:29324846-29324868
  hypo
atctcagcgtgtgggggctgct

SEQ ID NO: 52699 - DNA, 80 bp, Homo sapiens; identical to SEQ ID NO: 5579
  chr16:29606231-29606311
  hypo

SEQ ID NO: 52700 - DNA, 36 bp, Homo sapiens; identical to SEQ ID NO: 5582
  chr16:29691805-29691841
  hypo

SEQ ID NO: 52701 - DNA, 82 bp, Homo sapiens; identical to SEQ ID NO: 22345
  chr16:29755718-29755800
  hypo

SEQ ID NO: 52702 - DNA, 50 bp, Homo sapiens; identical to SEQ ID NO: 22346
  chr16:29755813-29755863
  hypo

SEQ ID NO: 52703 - DNA, 31 bp, Homo sapiens; identical to SEQ ID NO: 22347
  chr16:29797108-29797139
  hypo

SEQ ID NO: 52704 - DNA, 31 bp, Homo sapiens; identical to SEQ ID NO: 22348
  chr16:29797162-29797193
  hypo

SEQ ID NO: 52705 - DNA, 31 bp, Homo sapiens; identical to SEQ ID NO: 5583
  chr16:29822267-29822298
  hypo

SEQ ID NO: 52706 - DNA, 50 bp, Homo sapiens; identical to SEQ ID NO: 5584
  chr16:29822622-29822672
  hypo

SEQ ID NO: 52707 - DNA, 2 bp, Homo sapiens
  chr16:29830870-29830872
  hypo
tc

SEQ ID NO: 52708 - DNA, 31 bp, Homo sapiens; identical to SEQ ID NO: 5586
  chr16:29836136-29836167
  hypo

SEQ ID NO: 52709 - DNA, 49 bp, Homo sapiens; identical to SEQ ID NO: 5587
  chr16:29910604-29910653
  hypo

SEQ ID NO: 52710 - DNA, 31 bp, Homo sapiens; identical to SEQ ID NO: 5588
  chr16:29910742-29910773
  hypo

SEQ ID NO: 52711 - DNA, 31 bp, Homo sapiens; identical to SEQ ID NO: 22356
  chr16:29911101-29911132
  hypo

SEQ ID NO: 52712 - DNA, 66 bp, Homo sapiens; identical to SEQ ID NO: 22358
  chr16:30000934-30001000
  hypo

SEQ ID NO: 52713 - DNA, 31 bp, Homo sapiens; identical to SEQ ID NO: 22362
  chr16:30018178-30018209
  hypo

SEQ ID NO: 52714 - DNA, 31 bp, Homo sapiens; identical to SEQ ID NO: 22367
  chr16:30124863-30124894
  hypo

SEQ ID NO: 52715 - DNA, 31 bp, Homo sapiens; identical to SEQ ID NO: 22368
  chr16:30169971-30170002
  hypo

SEQ ID NO: 52716 - DNA, 31 bp, Homo sapiens; identical to SEQ ID NO: 22369
  chr16:30362422-30362453
  hypo

SEQ ID NO: 52717 - DNA, 68 bp, Homo sapiens; identical to SEQ ID NO: 22371
  chr16:30537608-30537676
  hypo

SEQ ID NO: 52718 - DNA, 31 bp, Homo sapiens; identical to SEQ ID NO: 22372
  chr16:30562563-30562594
  hypo

SEQ ID NO: 52719 - DNA, 2 bp, Homo sapiens
  chr16:30567445-30567447
  hypo
gg

SEQ ID NO: 52720 - DNA, 29 bp, Homo sapiens
  chr16:30567509-30567538
  hypo
gcctgctggatccccggctgctcctggga

SEQ ID NO: 52721 - DNA, 77 bp, Homo sapiens; identical to SEQ ID NO: 22375
  chr16:30567546-30567623
  hypo

SEQ ID NO: 52722 - DNA, 31 bp, Homo sapiens; identical to SEQ ID NO: 22376
  chr16:30628279-30628310
  hypo

SEQ ID NO: 52723 - DNA, 31 bp, Homo sapiens; identical to SEQ ID NO: 22377
  chr16:30700819-30700850
  hypo

SEQ ID NO: 52724 - DNA, 57 bp, Homo sapiens; identical to SEQ ID NO: 22378
  chr16:30784031-30784088
  hypo

SEQ ID NO: 52725 - DNA, 31 bp, Homo sapiens; identical to SEQ ID NO: 22379
  chr16:30794734-30794765
  hypo

SEQ ID NO: 52726 - DNA, 30 bp, Homo sapiens
  chr16:30826509-30826539
  hypo
aaaacatctgctctccgaggtgtgggtgaa

SEQ ID NO: 52727 - DNA, 31 bp, Homo sapiens; identical to SEQ ID NO: 22383
  chr16:30826546-30826577
  hypo

SEQ ID NO: 52728 - DNA, 31 bp, Homo sapiens; identical to SEQ ID NO: 22384
  chr16:30831409-30831440
  hypo

SEQ ID NO: 52729 - DNA, 57 bp, Homo sapiens; identical to SEQ ID NO: 22385
  chr16:30845546-30845603
  hypo

SEQ ID NO: 52730 - DNA, 185 bp, Homo sapiens; identical to SEQ ID NO: 22386
  chr16:30845812-30845997
  hypo

SEQ ID NO: 52731 - DNA, 129 bp, Homo sapiens; identical to SEQ ID NO: 22387
  chr16:30846008-30846137
  hypo

SEQ ID NO: 52732 - DNA, 37 bp, Homo sapiens; identical to SEQ ID NO: 22388
  chr16:30846170-30846207
  hypo

SEQ ID NO: 52733 - DNA, 2 bp, Homo sapiens
  chr16:30906985-30906987
  hypo
tt

SEQ ID NO: 52734 - DNA, 38 bp, Homo sapiens
  chr16:30907062-30907100
  hypo
acgcgcacacctgcacactcacacgcacacaaatccac

SEQ ID NO: 52735 - DNA, 31 bp, Homo sapiens; identical to SEQ ID NO: 5602
  chr16:30959909-30959940
  hypo

SEQ ID NO: 52736 - DNA, 31 bp, Homo sapiens; identical to SEQ ID NO: 5603
  chr16:30964524-30964555
  hypo

SEQ ID NO: 52737 - DNA, 82 bp, Homo sapiens; identical to SEQ ID NO: 22394
  chr16:30999437-30999519
  hypo

SEQ ID NO: 52738 - DNA, 50 bp, Homo sapiens; identical to SEQ ID NO: 22395
  chr16:30999538-30999588
  hypo

SEQ ID NO: 52739 - DNA, 31 bp, Homo sapiens; identical to SEQ ID NO: 22396
  chr16:31002040-31002071
  hypo

SEQ ID NO: 52740 - DNA, 47 bp, Homo sapiens; identical to SEQ ID NO: 22397
  chr16:31012747-31012794
  hypo

SEQ ID NO: 52741 - DNA, 38 bp, Homo sapiens; identical to SEQ ID NO: 22398
  chr16:31012864-31012902
  hypo

SEQ ID NO: 52742 - DNA, 31 bp, Homo sapiens; identical to SEQ ID NO: 22399
  chr16:31012905-31012936
  hypo

SEQ ID NO: 52743 - DNA, 45 bp, Homo sapiens; identical to SEQ ID NO: 22400
  chr16:31073616-31073661
  hypo

SEQ ID NO: 52744 - DNA, 31 bp, Homo sapiens; identical to SEQ ID NO: 5604
  chr16:31075213-31075244
  hypo

SEQ ID NO: 52745 - DNA, 31 bp, Homo sapiens; identical to SEQ ID NO: 22402
  chr16:31138537-31138568
  hypo

SEQ ID NO: 52746 - DNA, 31 bp, Homo sapiens; identical to SEQ ID NO: 22403
  chr16:31138570-31138601
  hypo

SEQ ID NO: 52747 - DNA, 2 bp, Homo sapiens
  chr16:31138606-31138608
  hypo
cc

SEQ ID NO: 52748 - DNA, 62 bp, Homo sapiens; identical to SEQ ID NO: 22406
  chr16:31142699-31142761
  hypo

SEQ ID NO: 52749 - DNA, 45 bp, Homo sapiens; identical to SEQ ID NO: 22407
  chr16:31142792-31142837
  hypo

SEQ ID NO: 52750 - DNA, 31 bp, Homo sapiens; identical to SEQ ID NO: 22408
  chr16:31143796-31143827
  hypo

SEQ ID NO: 52751 - DNA, 137 bp, Homo sapiens; identical to SEQ ID NO: 5605
  chr16:31153836-31153973
  hypo

SEQ ID NO: 52752 - DNA, 134 bp, Homo sapiens; identical to SEQ ID NO: 5606
  chr16:31153974-31154108
  hypo

SEQ ID NO: 52753 - DNA, 31 bp, Homo sapiens; identical to SEQ ID NO: 22411
  chr16:31381550-31381581
  hypo

SEQ ID NO: 52754 - DNA, 31 bp, Homo sapiens; identical to SEQ ID NO: 22412
  chr16:31408992-31409023
  hypo

SEQ ID NO: 52755 - DNA, 7 bp, Homo sapiens
  chr16:31447348-31447355
  hypo
gctcgca

SEQ ID NO: 52756 - DNA, 67 bp, Homo sapiens; identical to SEQ ID NO: 22417
  chr16:31447356-31447423
  hypo

SEQ ID NO: 52757 - DNA, 41 bp, Homo sapiens; identical to SEQ ID NO: 22418
  chr16:31464578-31464619
  hypo

SEQ ID NO: 52758 - DNA, 31 bp, Homo sapiens; identical to SEQ ID NO: 22419
  chr16:31464627-31464658
  hypo

SEQ ID NO: 52759 - DNA, 31 bp, Homo sapiens; identical to SEQ ID NO: 22420
  chr16:31496889-31496920
  hypo

SEQ ID NO: 52760 - DNA, 2 bp, Homo sapiens
  chr16:31500521-31500523
  hypo
ag

SEQ ID NO: 52761 - DNA, 31 bp, Homo sapiens; identical to SEQ ID NO: 22423
  chr16:31500734-31500765
  hypo

SEQ ID NO: 52762 - DNA, 31 bp, Homo sapiens; identical to SEQ ID NO: 22424
  chr16:31548220-31548251
  hypo

SEQ ID NO: 52763 - DNA, 31 bp, Homo sapiens; identical to SEQ ID NO: 22426
  chr16:46781777-46781808
  hypo

SEQ ID NO: 52764 - DNA, 31 bp, Homo sapiens; identical to SEQ ID NO: 22427
  chr16:46920967-46920998
  hypo

SEQ ID NO: 52765 - DNA, 31 bp, Homo sapiens; identical to SEQ ID NO: 22428
  chr16:47567943-47567974
  hypo

SEQ ID NO: 52766 - DNA, 74 bp, Homo sapiens; identical to SEQ ID NO: 22429
  chr16:48209331-48209405
  hypo

SEQ ID NO: 52767 - DNA, 31 bp, Homo sapiens; identical to SEQ ID NO: 22430
  chr16:48209408-48209439
  hypo

SEQ ID NO: 52768 - DNA, 31 bp, Homo sapiens; identical to SEQ ID NO: 22431
  chr16:48243649-48243680
  hypo

SEQ ID NO: 52769 - DNA, 87 bp, Homo sapiens; identical to SEQ ID NO: 22432
  chr16:48530909-48530996
  hypo

SEQ ID NO: 52770 - DNA, 31 bp, Homo sapiens; identical to SEQ ID NO: 22433
  chr16:48577582-48577613
  hypo

SEQ ID NO: 52771 - DNA, 31 bp, Homo sapiens; identical to SEQ ID NO: 22434
  chr16:48577641-48577672
  hypo

SEQ ID NO: 52772 - DNA, 66 bp, Homo sapiens; identical to SEQ ID NO: 22435
  chr16:48577673-48577739
  hypo

SEQ ID NO: 52773 - DNA, 14 bp, Homo sapiens
  chr16:48641650-48641664
  hypo
agctggggagaatg

SEQ ID NO: 52774 - DNA, 31 bp, Homo sapiens; identical to SEQ ID NO: 22439
  chr16:49950450-49950481
  hypo

SEQ ID NO: 52775 - DNA, 31 bp, Homo sapiens; identical to SEQ ID NO: 22440
  chr16:50218669-50218700
  hypo

SEQ ID NO: 52776 - DNA, 2 bp, Homo sapiens
  chr16:50335766-50335768
  hypo
ct

SEQ ID NO: 52777 - DNA, 91 bp, Homo sapiens; identical to SEQ ID NO: 22442
  chr16:50336502-50336593
  hypo

SEQ ID NO: 52778 - DNA, 73 bp, Homo sapiens; identical to SEQ ID NO: 22444
  chr16:50666331-50666404
  hypo

SEQ ID NO: 52779 - DNA, 27 bp, Homo sapiens
  chr16:50667601-50667628
  hypo
tgagagccaggccgggcagccggtcca

SEQ ID NO: 52780 - DNA, 31 bp, Homo sapiens; identical to SEQ ID NO: 22446
  chr16:52498847-52498878
  hypo

SEQ ID NO: 52781 - DNA, 31 bp, Homo sapiens; identical to SEQ ID NO: 22448
  chr16:52860764-52860795
  hypo

SEQ ID NO: 52782 - DNA, 16 bp, Homo sapiens
  chr16:53467395-53467411
  hypo
acggcagacaggagtt

SEQ ID NO: 52783 - DNA, 31 bp, Homo sapiens; identical to SEQ ID NO: 22450
  chr16:53467425-53467456
  hypo

SEQ ID NO: 52784 - DNA, 31 bp, Homo sapiens; identical to SEQ ID NO: 22452
  chr16:54201073-54201104
  hypo

SEQ ID NO: 52785 - DNA, 31 bp, Homo sapiens; identical to SEQ ID NO: 22453
  chr16:55052637-55052668
  hypo

SEQ ID NO: 52786 - DNA, 31 bp, Homo sapiens; identical to SEQ ID NO: 22454
  chr16:55052819-55052850
  hypo

SEQ ID NO: 52787 - DNA, 47 bp, Homo sapiens; identical to SEQ ID NO: 22455
  chr16:55053596-55053643
  hypo

SEQ ID NO: 52788 - DNA, 31 bp, Homo sapiens; identical to SEQ ID NO: 22456
  chr16:55189531-55189562
  hypo

SEQ ID NO: 52789 - DNA, 31 bp, Homo sapiens; identical to SEQ ID NO: 22457
  chr16:55705894-55705925
  hypo

SEQ ID NO: 52790 - DNA, 58 bp, Homo sapiens; identical to SEQ ID NO: 22458
  chr16:56368402-56368460
  hypo

SEQ ID NO: 52791 - DNA, 31 bp, Homo sapiens; identical to SEQ ID NO: 22459
  chr16:56370905-56370936
  hypo

SEQ ID NO: 52792 - DNA, 105 bp, Homo sapiens; identical to SEQ ID NO: 5619
  chr16:56642230-56642335
  hypo

SEQ ID NO: 52793 - DNA, 77 bp, Homo sapiens; identical to SEQ ID NO: 5620
  chr16:56642344-56642421
  hypo

SEQ ID NO: 52794 - DNA, 41 bp, Homo sapiens; identical to SEQ ID NO: 22465
  chr16:56869745-56869786
  hypo

SEQ ID NO: 52795 - DNA, 31 bp, Homo sapiens; identical to SEQ ID NO: 22466
  chr16:57100435-57100466
  hypo

SEQ ID NO: 52796 - DNA, 39 bp, Homo sapiens; identical to SEQ ID NO: 5621
  chr16:57126698-57126737
  hypo

SEQ ID NO: 52797 - DNA, 38 bp, Homo sapiens; identical to SEQ ID NO: 5622
  chr16:57126878-57126916
  hypo

SEQ ID NO: 52798 - DNA, 31 bp, Homo sapiens; identical to SEQ ID NO: 22470
  chr16:57148714-57148745
  hypo

SEQ ID NO: 52799 - DNA, 31 bp, Homo sapiens; identical to SEQ ID NO: 22472
  chr16:57298908-57298939
  hypo

SEQ ID NO: 52800 - DNA, 49 bp, Homo sapiens; identical to SEQ ID NO: 22473
  chr16:57299004-57299053
  hypo

SEQ ID NO: 52801 - DNA, 31 bp, Homo sapiens; identical to SEQ ID NO: 22474
  chr16:57299065-57299096
  hypo

SEQ ID NO: 52802 - DNA, 36 bp, Homo sapiens; identical to SEQ ID NO: 22475
  chr16:57304015-57304051
  hypo

SEQ ID NO: 52803 - DNA, 50 bp, Homo sapiens; identical to SEQ ID NO: 22476
  chr16:57304060-57304110
  hypo

SEQ ID NO: 52804 - DNA, 31 bp, Homo sapiens; identical to SEQ ID NO: 22477
  chr16:57304958-57304989
  hypo

SEQ ID NO: 52805 - DNA, 43 bp, Homo sapiens; identical to SEQ ID NO: 22478
  chr16:57305000-57305043
  hypo

SEQ ID NO: 52806 - DNA, 87 bp, Homo sapiens; identical to SEQ ID NO: 5626
  chr16:57318530-57318617
  hypo

SEQ ID NO: 52807 - DNA, 31 bp, Homo sapiens; identical to SEQ ID NO: 22480
  chr16:57442423-57442454
  hypo

SEQ ID NO: 52808 - DNA, 31 bp, Homo sapiens; identical to SEQ ID NO: 22481
  chr16:57653689-57653720
  hypo

SEQ ID NO: 52809 - DNA, 58 bp, Homo sapiens; identical to SEQ ID NO: 22482
  chr16:57686682-57686740
  hypo

SEQ ID NO: 52810 - DNA, 61 bp, Homo sapiens; identical to SEQ ID NO: 22483
  chr16:57697545-57697606
  hypo

SEQ ID NO: 52811 - DNA, 31 bp, Homo sapiens; identical to SEQ ID NO: 22484
  chr16:57716416-57716447
  hypo

SEQ ID NO: 52812 - DNA, 70 bp, Homo sapiens; identical to SEQ ID NO: 22485
  chr16:57734045-57734115
  hypo

SEQ ID NO: 52813 - DNA, 31 bp, Homo sapiens; identical to SEQ ID NO: 22486
  chr16:57734123-57734154
  hypo

SEQ ID NO: 52814 - DNA, 31 bp, Homo sapiens; identical to SEQ ID NO: 22487
  chr16:57734164-57734195
  hypo

SEQ ID NO: 52815 - DNA, 38 bp, Homo sapiens; identical to SEQ ID NO: 22489
  chr16:57737537-57737575
  hypo

SEQ ID NO: 52816 - DNA, 31 bp, Homo sapiens; identical to SEQ ID NO: 22490
  chr16:57737582-57737613
  hypo

SEQ ID NO: 52817 - DNA, 31 bp, Homo sapiens; identical to SEQ ID NO: 22491
  chr16:57935622-57935653
  hypo

SEQ ID NO: 52818 - DNA, 109 bp, Homo sapiens; identical to SEQ ID NO: 5627
  chr16:58059828-58059937
  hypo

SEQ ID NO: 52819 - DNA, 31 bp, Homo sapiens; identical to SEQ ID NO: 5628
  chr16:58060039-58060070
  hypo

SEQ ID NO: 52820 - DNA, 271 bp, Homo sapiens; identical to SEQ ID NO: 5629
  chr16:58060089-58060360
  hypo

SEQ ID NO: 52821 - DNA, 198 bp, Homo sapiens; identical to SEQ ID NO: 5630
  chr16:58060366-58060564
  hypo

SEQ ID NO: 52822 - DNA, 31 bp, Homo sapiens; identical to SEQ ID NO: 22497
  chr16:58075443-58075474
  hypo

SEQ ID NO: 52823 - DNA, 68 bp, Homo sapiens; identical to SEQ ID NO: 22498
  chr16:58076201-58076269
  hypo

SEQ ID NO: 52824 - DNA, 45 bp, Homo sapiens; identical to SEQ ID NO: 22499
  chr16:58077137-58077182
  hypo

SEQ ID NO: 52825 - DNA, 41 bp, Homo sapiens; identical to SEQ ID NO: 22500
  chr16:58077186-58077227
  hypo

SEQ ID NO: 52826 - DNA, 31 bp, Homo sapiens; identical to SEQ ID NO: 22501
  chr16:58077258-58077289
  hypo

SEQ ID NO: 52827 - DNA, 175 bp, Homo sapiens; identical to SEQ ID NO: 22502
  chr16:58078934-58079109
  hypo

SEQ ID NO: 52828 - DNA, 31 bp, Homo sapiens; identical to SEQ ID NO: 5637
  chr16:58426353-58426384
  hypo

SEQ ID NO: 52829 - DNA, 31 bp, Homo sapiens; identical to SEQ ID NO: 22505
  chr16:58523213-58523244
  hypo

SEQ ID NO: 52830 - DNA, 55 bp, Homo sapiens; identical to SEQ ID NO: 22506
  chr16:58534052-58534107
  hypo

SEQ ID NO: 52831 - DNA, 106 bp, Homo sapiens; identical to SEQ ID NO: 22507
  chr16:58534115-58534221
  hypo

SEQ ID NO: 52832 - DNA, 2 bp, Homo sapiens
  chr16:58548288-58548290
  hypo
gg

SEQ ID NO: 52833 - DNA, 31 bp, Homo sapiens; identical to SEQ ID NO: 5640
  chr16:61445875-61445906
  hypo

SEQ ID NO: 52834 - DNA, 31 bp, Homo sapiens; identical to SEQ ID NO: 22511
  chr16:61615417-61615448
  hypo

SEQ ID NO: 52835 - DNA, 31 bp, Homo sapiens; identical to SEQ ID NO: 22513
  chr16:66420812-66420843
  hypo

SEQ ID NO: 52836 - DNA, 66 bp, Homo sapiens; identical to SEQ ID NO: 22514
  chr16:66440979-66441045
  hypo

SEQ ID NO: 52837 - DNA, 31 bp, Homo sapiens; identical to SEQ ID NO: 22515
  chr16:66579298-66579329
  hypo

SEQ ID NO: 52838 - DNA, 31 bp, Homo sapiens; identical to SEQ ID NO: 22516
  chr16:66579342-66579373
  hypo

SEQ ID NO: 52839 - DNA, 31 bp, Homo sapiens; identical to SEQ ID NO: 22517
  chr16:66579387-66579418
  hypo

SEQ ID NO: 52840 - DNA, 95 bp, Homo sapiens; identical to SEQ ID NO: 5645
  chr16:66730082-66730177
  hypo

SEQ ID NO: 52841 - DNA, 139 bp, Homo sapiens; identical to SEQ ID NO: 5646
  chr16:66730190-66730329
  hypo

SEQ ID NO: 52842 - DNA, 46 bp, Homo sapiens; identical to SEQ ID NO: 5647
  chr16:66730334-66730380
  hypo

SEQ ID NO: 52843 - DNA, 31 bp, Homo sapiens; identical to SEQ ID NO: 22526
  chr16:66942965-66942996
  hypo

SEQ ID NO: 52844 - DNA, 31 bp, Homo sapiens; identical to SEQ ID NO: 22527
  chr16:66943016-66943047
  hypo

SEQ ID NO: 52845 - DNA, 31 bp, Homo sapiens; identical to SEQ ID NO: 22528
  chr16:67006194-67006225
  hypo

SEQ ID NO: 52846 - DNA, 47 bp, Homo sapiens; identical to SEQ ID NO: 22529
  chr16:67006280-67006327
  hypo

SEQ ID NO: 52847 - DNA, 49 bp, Homo sapiens; identical to SEQ ID NO: 22530
  chr16:67006336-67006385
  hypo

SEQ ID NO: 52848 - DNA, 71 bp, Homo sapiens; identical to SEQ ID NO: 5648
  chr16:67184511-67184582
  hypo

SEQ ID NO: 52849 - DNA, 31 bp, Homo sapiens; identical to SEQ ID NO: 22532
  chr16:67214547-67214578
  hypo

SEQ ID NO: 52850 - DNA, 31 bp, Homo sapiens; identical to SEQ ID NO: 22533
  chr16:67221090-67221121
  hypo

SEQ ID NO: 52851 - DNA, 41 bp, Homo sapiens; identical to SEQ ID NO: 22534
  chr16:67221145-67221186
  hypo

SEQ ID NO: 52852 - DNA, 87 bp, Homo sapiens; identical to SEQ ID NO: 22535
  chr16:67221198-67221285
  hypo

SEQ ID NO: 52853 - DNA, 42 bp, Homo sapiens; identical to SEQ ID NO: 22536
  chr16:67235495-67235537
  hypo

SEQ ID NO: 52854 - DNA, 2 bp, Homo sapiens
  chr16:67241602-67241604
  hypo
tg

SEQ ID NO: 52855 - DNA, 31 bp, Homo sapiens; identical to SEQ ID NO: 5651
  chr16:67280007-67280038
  hypo

SEQ ID NO: 52856 - DNA, 38 bp, Homo sapiens; identical to SEQ ID NO: 5652
  chr16:67280107-67280145
  hypo

SEQ ID NO: 52857 - DNA, 31 bp, Homo sapiens; identical to SEQ ID NO: 5653
  chr16:67280156-67280187
  hypo

SEQ ID NO: 52858 - DNA, 31 bp, Homo sapiens; identical to SEQ ID NO: 22542
  chr16:67321789-67321820
  hypo

SEQ ID NO: 52859 - DNA, 31 bp, Homo sapiens; identical to SEQ ID NO: 22543
  chr16:67446022-67446053
  hypo

SEQ ID NO: 52860 - DNA, 31 bp, Homo sapiens; identical to SEQ ID NO: 22544
  chr16:67456091-67456122
  hypo

SEQ ID NO: 52861 - DNA, 2 bp, Homo sapiens
  chr16:67678708-67678710
  hypo
tg

SEQ ID NO: 52862 - DNA, 153 bp, Homo sapiens; identical to SEQ ID NO: 39179
  chr16:67678786-67678939
  hypo

SEQ ID NO: 52863 - DNA, 67 bp, Homo sapiens; identical to SEQ ID NO: 39180
  chr16:67678975-67679042
  hypo

SEQ ID NO: 52864 - DNA, 114 bp, Homo sapiens; identical to SEQ ID NO: 22547
  chr16:67681426-67681540
  hypo

SEQ ID NO: 52865 - DNA, 31 bp, Homo sapiens; identical to SEQ ID NO: 22548
  chr16:67681543-67681574
  hypo

SEQ ID NO: 52866 - DNA, 35 bp, Homo sapiens; identical to SEQ ID NO: 22549
  chr16:67681591-67681626
  hypo

SEQ ID NO: 52867 - DNA, 31 bp, Homo sapiens; identical to SEQ ID NO: 22550
  chr16:67700331-67700362
  hypo

SEQ ID NO: 52868 - DNA, 30 bp, Homo sapiens; identical to SEQ ID NO: 22551
  chr16:67825195-67825225
  hypo

SEQ ID NO: 52869 - DNA, 41 bp, Homo sapiens; identical to SEQ ID NO: 22552
  chr16:67848820-67848861
  hypo

SEQ ID NO: 52870 - DNA, 31 bp, Homo sapiens; identical to SEQ ID NO: 22553
  chr16:67968862-67968893
  hypo

SEQ ID NO: 52871 - DNA, 43 bp, Homo sapiens; identical to SEQ ID NO: 5667
  chr16:68118920-68118963
  hypo

SEQ ID NO: 52872 - DNA, 31 bp, Homo sapiens; identical to SEQ ID NO: 5668
  chr16:68118965-68118996
  hypo

SEQ ID NO: 52873 - DNA, 72 bp, Homo sapiens; identical to SEQ ID NO: 5670
  chr16:68269812-68269884
  hypo

SEQ ID NO: 52874 - DNA, 34 bp, Homo sapiens; identical to SEQ ID NO: 5672
  chr16:68269920-68269954
  hypo

SEQ ID NO: 52875 - DNA, 28 bp, Homo sapiens
  chr16:68270100-68270128
  hypo
cccgcccgtggcgccccgcggggcgggg

SEQ ID NO: 52876 - DNA, 43 bp, Homo sapiens; identical to SEQ ID NO: 5674
  chr16:68271017-68271060
  hypo

SEQ ID NO: 52877 - DNA, 122 bp, Homo sapiens; identical to SEQ ID NO: 5675
  chr16:68271198-68271320
  hypo

SEQ ID NO: 52878 - DNA, 2 bp, Homo sapiens
  chr16:68362038-68362040
  hypo
ga

SEQ ID NO: 52879 - DNA, 9 bp, Homo sapiens
  chr16:68385591-68385600
  hypo
catttactc

SEQ ID NO: 52880 - DNA, 41 bp, Homo sapiens; identical to SEQ ID NO: 22571
  chr16:68386064-68386105
  hypo

SEQ ID NO: 52881 - DNA, 58 bp, Homo sapiens
  chr16:68386187-68386245
  hypo
gcctgctgccgtggcacaacctctacttctggtacgtgcggaccgctgtggaccagca

SEQ ID NO: 52882 - DNA, 38 bp, Homo sapiens; identical to SEQ ID NO: 22573
  chr16:68386267-68386305
  hypo

SEQ ID NO: 52883 - DNA, 31 bp, Homo sapiens; identical to SEQ ID NO: 22574
  chr16:68386337-68386368
  hypo

SEQ ID NO: 52884 - DNA, 31 bp, Homo sapiens; identical to SEQ ID NO: 22575
  chr16:68397456-68397487
  hypo

SEQ ID NO: 52885 - DNA, 31 bp, Homo sapiens; identical to SEQ ID NO: 22576
  chr16:68560873-68560904
  hypo

SEQ ID NO: 52886 - DNA, 92 bp, Homo sapiens; identical to SEQ ID NO: 5678
  chr16:68564223-68564315
  hypo

SEQ ID NO: 52887 - DNA, 31 bp, Homo sapiens; identical to SEQ ID NO: 22578
  chr16:68672309-68672340
  hypo

SEQ ID NO: 52888 - DNA, 36 bp, Homo sapiens; identical to SEQ ID NO: 22579
  chr16:68697406-68697442
  hypo

SEQ ID NO: 52889 - DNA, 31 bp, Homo sapiens; identical to SEQ ID NO: 22580
  chr16:68721866-68721897
  hypo

SEQ ID NO: 52890 - DNA, 45 bp, Homo sapiens; identical to SEQ ID NO: 22581
  chr16:68737003-68737048
  hypo

SEQ ID NO: 52891 - DNA, 31 bp, Homo sapiens; identical to SEQ ID NO: 22582
  chr16:68737078-68737109
  hypo

SEQ ID NO: 52892 - DNA, 39 bp, Homo sapiens; identical to SEQ ID NO: 22583
  chr16:68737156-68737195
  hypo

SEQ ID NO: 52893 - DNA, 35 bp, Homo sapiens; identical to SEQ ID NO: 22584
  chr16:68739593-68739628
  hypo

SEQ ID NO: 52894 - DNA, 32 bp, Homo sapiens; identical to SEQ ID NO: 22585
  chr16:68743255-68743287
  hypo

SEQ ID NO: 52895 - DNA, 60 bp, Homo sapiens; identical to SEQ ID NO: 22590
  chr16:68782355-68782415
  hypo

SEQ ID NO: 52896 - DNA, 30 bp, Homo sapiens; identical to SEQ ID NO: 22591
  chr16:68792435-68792465
  hypo

SEQ ID NO: 52897 - DNA, 35 bp, Homo sapiens; identical to SEQ ID NO: 22593
  chr16:68838290-68838325
  hypo

SEQ ID NO: 52898 - DNA, 31 bp, Homo sapiens; identical to SEQ ID NO: 22594
  chr16:68849365-68849396
  hypo

SEQ ID NO: 52899 - DNA, 42 bp, Homo sapiens; identical to SEQ ID NO: 22595
  chr16:68849439-68849481
  hypo

SEQ ID NO: 52900 - DNA, 37 bp, Homo sapiens; identical to SEQ ID NO: 22596
  chr16:68849496-68849533
  hypo

SEQ ID NO: 52901 - DNA, 36 bp, Homo sapiens; identical to SEQ ID NO: 22599
  chr16:68854967-68855003
  hypo

SEQ ID NO: 52902 - DNA, 31 bp, Homo sapiens; identical to SEQ ID NO: 22600
  chr16:68855031-68855062
  hypo

SEQ ID NO: 52903 - DNA, 31 bp, Homo sapiens; identical to SEQ ID NO: 22602
  chr16:68856756-68856787
  hypo

SEQ ID NO: 52904 - DNA, 30 bp, Homo sapiens; identical to SEQ ID NO: 22603
  chr16:68866427-68866457
  hypo

SEQ ID NO: 52905 - DNA, 31 bp, Homo sapiens; identical to SEQ ID NO: 22604
  chr16:68876699-68876730
  hypo

SEQ ID NO: 52906 - DNA, 2 bp, Homo sapiens
  chr16:68876781-68876783
  hypo
tg

SEQ ID NO: 52907 - DNA, 112 bp, Homo sapiens; identical to SEQ ID NO: 5684
  chr16:69139770-69139882
  hypo

SEQ ID NO: 52908 - DNA, 31 bp, Homo sapiens; identical to SEQ ID NO: 5685
  chr16:69139917-69139948
  hypo

SEQ ID NO: 52909 - DNA, 317 bp, Homo sapiens; identical to SEQ ID NO: 5686
  chr16:69139985-69140302
  hypo

SEQ ID NO: 52910 - DNA, 31 bp, Homo sapiens; identical to SEQ ID NO: 5687
  chr16:69140341-69140372
  hypo

SEQ ID NO: 52911 - DNA, 34 bp, Homo sapiens; identical to SEQ ID NO: 22613
  chr16:69344403-69344437
  hypo

SEQ ID NO: 52912 - DNA, 31 bp, Homo sapiens; identical to SEQ ID NO: 22614
  chr16:69400784-69400815
  hypo

SEQ ID NO: 52913 - DNA, 31 bp, Homo sapiens; identical to SEQ ID NO: 22615
  chr16:69560242-69560273
  hypo

SEQ ID NO: 52914 - DNA, 31 bp, Homo sapiens; identical to SEQ ID NO: 22616
  chr16:69641962-69641993
  hypo

SEQ ID NO: 52915 - DNA, 31 bp, Homo sapiens; identical to SEQ ID NO: 22617
  chr16:69746590-69746621
  hypo

SEQ ID NO: 52916 - DNA, 31 bp, Homo sapiens; identical to SEQ ID NO: 22618
  chr16:69789089-69789120
  hypo

SEQ ID NO: 52917 - DNA, 50 bp, Homo sapiens; identical to SEQ ID NO: 22619
  chr16:69825949-69825999
  hypo

SEQ ID NO: 52918 - DNA, 31 bp, Homo sapiens; identical to SEQ ID NO: 22620
  chr16:69826018-69826049
  hypo

SEQ ID NO: 52919 - DNA, 44 bp, Homo sapiens; identical to SEQ ID NO: 22621
  chr16:69826088-69826132
  hypo

SEQ ID NO: 52920 - DNA, 31 bp, Homo sapiens; identical to SEQ ID NO: 22622
  chr16:69922554-69922585
  hypo

SEQ ID NO: 52921 - DNA, 55 bp, Homo sapiens; identical to SEQ ID NO: 22623
  chr16:70399210-70399265
  hypo

SEQ ID NO: 52922 - DNA, 45 bp, Homo sapiens; identical to SEQ ID NO: 22624
  chr16:70433886-70433931
  hypo

SEQ ID NO: 52923 - DNA, 34 bp, Homo sapiens; identical to SEQ ID NO: 22625
  chr16:70433953-70433987
  hypo

SEQ ID NO: 52924 - DNA, 31 bp, Homo sapiens; identical to SEQ ID NO: 22627
  chr16:70595196-70595227
  hypo

SEQ ID NO: 52925 - DNA, 31 bp, Homo sapiens; identical to SEQ ID NO: 22628
  chr16:70595266-70595297
  hypo

SEQ ID NO: 52926 - DNA, 31 bp, Homo sapiens; identical to SEQ ID NO: 22629
  chr16:70632022-70632053
  hypo

SEQ ID NO: 52927 - DNA, 2 bp, Homo sapiens
  chr16:70794491-70794493
  hypo
gt

SEQ ID NO: 52928 - DNA, 38 bp, Homo sapiens; identical to SEQ ID NO: 22632
  chr16:70796477-70796515
  hypo

SEQ ID NO: 52929 - DNA, 31 bp, Homo sapiens; identical to SEQ ID NO: 22633
  chr16:70803217-70803248
  hypo

SEQ ID NO: 52930 - DNA, 31 bp, Homo sapiens; identical to SEQ ID NO: 22634
  chr16:70825254-70825285
  hypo

SEQ ID NO: 52931 - DNA, 35 bp, Homo sapiens; identical to SEQ ID NO: 22635
  chr16:71537484-71537519
  hypo

SEQ ID NO: 52932 - DNA, 41 bp, Homo sapiens; identical to SEQ ID NO: 22636
  chr16:71537550-71537591
  hypo

SEQ ID NO: 52933 - DNA, 31 bp, Homo sapiens; identical to SEQ ID NO: 22637
  chr16:71537636-71537667
  hypo

SEQ ID NO: 52934 - DNA, 31 bp, Homo sapiens; identical to SEQ ID NO: 22638
  chr16:71715650-71715681
  hypo

SEQ ID NO: 52935 - DNA, 35 bp, Homo sapiens; identical to SEQ ID NO: 22639
  chr16:71756039-71756074
  hypo

SEQ ID NO: 52936 - DNA, 34 bp, Homo sapiens; identical to SEQ ID NO: 22640
  chr16:71948332-71948366
  hypo

SEQ ID NO: 52937 - DNA, 31 bp, Homo sapiens; identical to SEQ ID NO: 22641
  chr16:72060654-72060685
  hypo

SEQ ID NO: 52938 - DNA, 31 bp, Homo sapiens; identical to SEQ ID NO: 22642
  chr16:72829265-72829296
  hypo

SEQ ID NO: 52939 - DNA, 31 bp, Homo sapiens; identical to SEQ ID NO: 22643
  chr16:72835834-72835865
  hypo

SEQ ID NO: 52940 - DNA, 31 bp, Homo sapiens; identical to SEQ ID NO: 22644
  chr16:72893758-72893789
  hypo

SEQ ID NO: 52941 - DNA, 31 bp, Homo sapiens; identical to SEQ ID NO: 22646
  chr16:72906629-72906660
  hypo

SEQ ID NO: 52942 - DNA, 31 bp, Homo sapiens; identical to SEQ ID NO: 22647
  chr16:72906685-72906716
  hypo

SEQ ID NO: 52943 - DNA, 31 bp, Homo sapiens; identical to SEQ ID NO: 22648
  chr16:72906734-72906765
  hypo

SEQ ID NO: 52944 - DNA, 40 bp, Homo sapiens; identical to SEQ ID NO: 22649
  chr16:72916140-72916180
  hypo

SEQ ID NO: 52945 - DNA, 53 bp, Homo sapiens; identical to SEQ ID NO: 22650
  chr16:72916246-72916299
  hypo

SEQ ID NO: 52946 - DNA, 31 bp, Homo sapiens; identical to SEQ ID NO: 22651
  chr16:72916308-72916339
  hypo

SEQ ID NO: 52947 - DNA, 31 bp, Homo sapiens; identical to SEQ ID NO: 22652
  chr16:72919232-72919263
  hypo

SEQ ID NO: 52948 - DNA, 31 bp, Homo sapiens; identical to SEQ ID NO: 22653
  chr16:72945690-72945721
  hypo

SEQ ID NO: 52949 - DNA, 38 bp, Homo sapiens; identical to SEQ ID NO: 22654
  chr16:72945768-72945806
  hypo

SEQ ID NO: 52950 - DNA, 31 bp, Homo sapiens; identical to SEQ ID NO: 22655
  chr16:72966921-72966952
  hypo

SEQ ID NO: 52951 - DNA, 102 bp, Homo sapiens; identical to SEQ ID NO: 22656
  chr16:72984702-72984804
  hypo

SEQ ID NO: 52952 - DNA, 31 bp, Homo sapiens; identical to SEQ ID NO: 22657
  chr16:72989875-72989906
  hypo

SEQ ID NO: 52953 - DNA, 31 bp, Homo sapiens; identical to SEQ ID NO: 22658
  chr16:72991202-72991233
  hypo

SEQ ID NO: 52954 - DNA, 35 bp, Homo sapiens; identical to SEQ ID NO: 22659
  chr16:72992066-72992101
  hypo

SEQ ID NO: 52955 - DNA, 112 bp, Homo sapiens; identical to SEQ ID NO: 22660
  chr16:72992110-72992222
  hypo

SEQ ID NO: 52956 - DNA, 31 bp, Homo sapiens; identical to SEQ ID NO: 22661
  chr16:72992396-72992427
  hypo

SEQ ID NO: 52957 - DNA, 31 bp, Homo sapiens; identical to SEQ ID NO: 22662
  chr16:72993524-72993555
  hypo

SEQ ID NO: 52958 - DNA, 136 bp, Homo sapiens; identical to SEQ ID NO: 22663
  chr16:72993617-72993753
  hypo

SEQ ID NO: 52959 - DNA, 107 bp, Homo sapiens; identical to SEQ ID NO: 22664
  chr16:72993773-72993880
  hypo

SEQ ID NO: 52960 - DNA, 40 bp, Homo sapiens; identical to SEQ ID NO: 22665
  chr16:72993886-72993926
  hypo

SEQ ID NO: 52961 - DNA, 124 bp, Homo sapiens; identical to SEQ ID NO: 22666
  chr16:72993979-72994103
  hypo

SEQ ID NO: 52962 - DNA, 36 bp, Homo sapiens; identical to SEQ ID NO: 22667
  chr16:72994171-72994207
  hypo

SEQ ID NO: 52963 - DNA, 31 bp, Homo sapiens; identical to SEQ ID NO: 22668
  chr16:72994368-72994399
  hypo

SEQ ID NO: 52964 - DNA, 31 bp, Homo sapiens; identical to SEQ ID NO: 22669
  chr16:72994507-72994538
  hypo

SEQ ID NO: 52965 - DNA, 31 bp, Homo sapiens; identical to SEQ ID NO: 22670
  chr16:72997029-72997060
  hypo

SEQ ID NO: 52966 - DNA, 58 bp, Homo sapiens; identical to SEQ ID NO: 22671
  chr16:72997062-72997120
  hypo

SEQ ID NO: 52967 - DNA, 52 bp, Homo sapiens; identical to SEQ ID NO: 22672
  chr16:72997170-72997222
  hypo

SEQ ID NO: 52968 - DNA, 31 bp, Homo sapiens; identical to SEQ ID NO: 22673
  chr16:73000124-73000155
  hypo

SEQ ID NO: 52969 - DNA, 57 bp, Homo sapiens; identical to SEQ ID NO: 22675
  chr16:73007825-73007882
  hypo

SEQ ID NO: 52970 - DNA, 31 bp, Homo sapiens; identical to SEQ ID NO: 22676
  chr16:73026745-73026776
  hypo

SEQ ID NO: 52971 - DNA, 31 bp, Homo sapiens; identical to SEQ ID NO: 22677
  chr16:73063563-73063594
  hypo

SEQ ID NO: 52972 - DNA, 31 bp, Homo sapiens; identical to SEQ ID NO: 5700
  chr16:73091556-73091587
  hypo

SEQ ID NO: 52973 - DNA, 31 bp, Homo sapiens; identical to SEQ ID NO: 5701
  chr16:73091687-73091718
  hypo

SEQ ID NO: 52974 - DNA, 133 bp, Homo sapiens; identical to SEQ ID NO: 5702
  chr16:73091751-73091884
  hypo

SEQ ID NO: 52975 - DNA, 57 bp, Homo sapiens; identical to SEQ ID NO: 5704
  chr16:73092060-73092117
  hypo

SEQ ID NO: 52976 - DNA, 66 bp, Homo sapiens; identical to SEQ ID NO: 5705
  chr16:73092480-73092546
  hypo

SEQ ID NO: 52977 - DNA, 31 bp, Homo sapiens; identical to SEQ ID NO: 22684
  chr16:73162952-73162983
  hypo

SEQ ID NO: 52978 - DNA, 45 bp, Homo sapiens; identical to SEQ ID NO: 22685
  chr16:73208570-73208615
  hypo

SEQ ID NO: 52979 - DNA, 31 bp, Homo sapiens; identical to SEQ ID NO: 22686
  chr16:73208621-73208652
  hypo

SEQ ID NO: 52980 - DNA, 31 bp, Homo sapiens; identical to SEQ ID NO: 22687
  chr16:73222729-73222760
  hypo

SEQ ID NO: 52981 - DNA, 31 bp, Homo sapiens; identical to SEQ ID NO: 22688
  chr16:74767604-74767635
  hypo

SEQ ID NO: 52982 - DNA, 31 bp, Homo sapiens; identical to SEQ ID NO: 22690
  chr16:74901815-74901846
  hypo

SEQ ID NO: 52983 - DNA, 41 bp, Homo sapiens; identical to SEQ ID NO: 5708
  chr16:75018962-75019003
  hypo

SEQ ID NO: 52984 - DNA, 39 bp, Homo sapiens; identical to SEQ ID NO: 5709
  chr16:75033798-75033837
  hypo

SEQ ID NO: 52985 - DNA, 44 bp, Homo sapiens; identical to SEQ ID NO: 22696
  chr16:75057286-75057330
  hypo

SEQ ID NO: 52986 - DNA, 31 bp, Homo sapiens; identical to SEQ ID NO: 22698
  chr16:75075661-75075692
  hypo

SEQ ID NO: 52987 - DNA, 31 bp, Homo sapiens; identical to SEQ ID NO: 22700
  chr16:75113394-75113425
  hypo

SEQ ID NO: 52988 - DNA, 31 bp, Homo sapiens; identical to SEQ ID NO: 22701
  chr16:75113749-75113780
  hypo

SEQ ID NO: 52989 - DNA, 31 bp, Homo sapiens; identical to SEQ ID NO: 22702
  chr16:75122962-75122993
  hypo

SEQ ID NO: 52990 - DNA, 62 bp, Homo sapiens; identical to SEQ ID NO: 22703
  chr16:75127913-75127975
  hypo

SEQ ID NO: 52991 - DNA, 58 bp, Homo sapiens; identical to SEQ ID NO: 22704
  chr16:75128007-75128065
  hypo

SEQ ID NO: 52992 - DNA, 31 bp, Homo sapiens; identical to SEQ ID NO: 22705
  chr16:75128078-75128109
  hypo

SEQ ID NO: 52993 - DNA, 56 bp, Homo sapiens; identical to SEQ ID NO: 22706
  chr16:75136325-75136381
  hypo

SEQ ID NO: 52994 - DNA, 47 bp, Homo sapiens; identical to SEQ ID NO: 22707
  chr16:75136442-75136489
  hypo

SEQ ID NO: 52995 - DNA, 31 bp, Homo sapiens; identical to SEQ ID NO: 22708
  chr16:75136492-75136523
  hypo

SEQ ID NO: 52996 - DNA, 59 bp, Homo sapiens; identical to SEQ ID NO: 22709
  chr16:75136646-75136705
  hypo

SEQ ID NO: 52997 - DNA, 31 bp, Homo sapiens; identical to SEQ ID NO: 22710
  chr16:75136946-75136977
  hypo

SEQ ID NO: 52998 - DNA, 31 bp, Homo sapiens; identical to SEQ ID NO: 22711
  chr16:75138820-75138851
  hypo

SEQ ID NO: 52999 - DNA, 48 bp, Homo sapiens; identical to SEQ ID NO: 22712
  chr16:75138875-75138923
  hypo

SEQ ID NO: 53000 - DNA, 44 bp, Homo sapiens; identical to SEQ ID NO: 22713
  chr16:75138932-75138976
  hypo

SEQ ID NO: 53001 - DNA, 86 bp, Homo sapiens; identical to SEQ ID NO: 22714
  chr16:75139032-75139118
  hypo

SEQ ID NO: 53002 - DNA, 82 bp, Homo sapiens; identical to SEQ ID NO: 5718
  chr16:75299750-75299832
  hypo

SEQ ID NO: 53003 - DNA, 31 bp, Homo sapiens; identical to SEQ ID NO: 22721
  chr16:75606234-75606265
  hypo

SEQ ID NO: 53004 - DNA, 31 bp, Homo sapiens; identical to SEQ ID NO: 22722
  chr16:75606295-75606326
  hypo

SEQ ID NO: 53005 - DNA, 35 bp, Homo sapiens; identical to SEQ ID NO: 22723
  chr16:75606338-75606373
  hypo

SEQ ID NO: 53006 - DNA, 41 bp, Homo sapiens; identical to SEQ ID NO: 22724
  chr16:77747178-77747219
  hypo

SEQ ID NO: 53007 - DNA, 52 bp, Homo sapiens; identical to SEQ ID NO: 22725
  chr16:77752652-77752704
  hypo

SEQ ID NO: 53008 - DNA, 39 bp, Homo sapiens; identical to SEQ ID NO: 22726
  chr16:77752740-77752779
  hypo

SEQ ID NO: 53009 - DNA, 31 bp, Homo sapiens; identical to SEQ ID NO: 22727
  chr16:77752816-77752847
  hypo

SEQ ID NO: 53010 - DNA, 31 bp, Homo sapiens; identical to SEQ ID NO: 22728
  chr16:77752848-77752879
  hypo

SEQ ID NO: 53011 - DNA, 34 bp, Homo sapiens; identical to SEQ ID NO: 22729
  chr16:77752910-77752944
  hypo

SEQ ID NO: 53012 - DNA, 31 bp, Homo sapiens; identical to SEQ ID NO: 22730
  chr16:77753838-77753869
  hypo

SEQ ID NO: 53013 - DNA, 31 bp, Homo sapiens; identical to SEQ ID NO: 22732
  chr16:77762012-77762043
  hypo

SEQ ID NO: 53014 - DNA, 31 bp, Homo sapiens; identical to SEQ ID NO: 22733
  chr16:79077924-79077955
  hypo

SEQ ID NO: 53015 - DNA, 104 bp, Homo sapiens; identical to SEQ ID NO: 5721
  chr16:79636190-79636294
  hypo

SEQ ID NO: 53016 - DNA, 31 bp, Homo sapiens; identical to SEQ ID NO: 5724
  chr16:80837427-80837458
  hypo

SEQ ID NO: 53017 - DNA, 37 bp, Homo sapiens; identical to SEQ ID NO: 22736
  chr16:80931967-80932004
  hypo

SEQ ID NO: 53018 - DNA, 31 bp, Homo sapiens; identical to SEQ ID NO: 22738
  chr16:81094193-81094224
  hypo

SEQ ID NO: 53019 - DNA, 64 bp, Homo sapiens; identical to SEQ ID NO: 22739
  chr16:81315518-81315582
  hypo

SEQ ID NO: 53020 - DNA, 31 bp, Homo sapiens; identical to SEQ ID NO: 22740
  chr16:81315604-81315635
  hypo

SEQ ID NO: 53021 - DNA, 38 bp, Homo sapiens; identical to SEQ ID NO: 22741
  chr16:81315679-81315717
  hypo

SEQ ID NO: 53022 - DNA, 31 bp, Homo sapiens; identical to SEQ ID NO: 22742
  chr16:81335172-81335203
  hypo

SEQ ID NO: 53023 - DNA, 31 bp, Homo sapiens; identical to SEQ ID NO: 22743
  chr16:81335262-81335293
  hypo

SEQ ID NO: 53024 - DNA, 59 bp, Homo sapiens; identical to SEQ ID NO: 22744
  chr16:81335305-81335364
  hypo

SEQ ID NO: 53025 - DNA, 96 bp, Homo sapiens; identical to SEQ ID NO: 22745
  chr16:81492929-81493025
  hypo

SEQ ID NO: 53026 - DNA, 34 bp, Homo sapiens; identical to SEQ ID NO: 22746
  chr16:81493084-81493118
  hypo

SEQ ID NO: 53027 - DNA, 31 bp, Homo sapiens; identical to SEQ ID NO: 22747
  chr16:81505738-81505769
  hypo

SEQ ID NO: 53028 - DNA, 31 bp, Homo sapiens; identical to SEQ ID NO: 22750
  chr16:81564764-81564795
  hypo

SEQ ID NO: 53029 - DNA, 32 bp, Homo sapiens; identical to SEQ ID NO: 22751
  chr16:81581958-81581990
  hypo

SEQ ID NO: 53030 - DNA, 49 bp, Homo sapiens; identical to SEQ ID NO: 22752
  chr16:81620158-81620207
  hypo

SEQ ID NO: 53031 - DNA, 51 bp, Homo sapiens; identical to SEQ ID NO: 22753
  chr16:81620270-81620321
  hypo

SEQ ID NO: 53032 - DNA, 2 bp, Homo sapiens
  chr16:81627221-81627223
  hypo
ga

SEQ ID NO: 53033 - DNA, 27 bp, Homo sapiens
  chr16:81694713-81694740
  hypo
gggctacacccacgtctctgccagaca

SEQ ID NO: 53034 - DNA, 31 bp, Homo sapiens; identical to SEQ ID NO: 22758
  chr16:83862941-83862972
  hypo

SEQ ID NO: 53035 - DNA, 42 bp, Homo sapiens; identical to SEQ ID NO: 22759
  chr16:83999490-83999532
  hypo

SEQ ID NO: 53036 - DNA, 34 bp, Homo sapiens; identical to SEQ ID NO: 22760
  chr16:84004406-84004440
  hypo

SEQ ID NO: 53037 - DNA, 31 bp, Homo sapiens; identical to SEQ ID NO: 22761
  chr16:84031862-84031893
  hypo

SEQ ID NO: 53038 - DNA, 31 bp, Homo sapiens; identical to SEQ ID NO: 22762
  chr16:84129121-84129152
  hypo

SEQ ID NO: 53039 - DNA, 29 bp, Homo sapiens
  chr16:84129336-84129365
  hypo
ggctcttcgcaggggacgtgatgattgcc

SEQ ID NO: 53040 - DNA, 40 bp, Homo sapiens; identical to SEQ ID NO: 22764
  chr16:84129435-84129475
  hypo

SEQ ID NO: 53041 - DNA, 31 bp, Homo sapiens; identical to SEQ ID NO: 22765
  chr16:84229845-84229876
  hypo

SEQ ID NO: 53042 - DNA, 31 bp, Homo sapiens; identical to SEQ ID NO: 22766
  chr16:84270490-84270521
  hypo

SEQ ID NO: 53043 - DNA, 31 bp, Homo sapiens; identical to SEQ ID NO: 22767
  chr16:84296329-84296360
  hypo

SEQ ID NO: 53044 - DNA, 31 bp, Homo sapiens; identical to SEQ ID NO: 22768
  chr16:84296374-84296405
  hypo

SEQ ID NO: 53045 - DNA, 59 bp, Homo sapiens; identical to SEQ ID NO: 22769
  chr16:84296465-84296524
  hypo

SEQ ID NO: 53046 - DNA, 31 bp, Homo sapiens; identical to SEQ ID NO: 22770
  chr16:84484209-84484240
  hypo

SEQ ID NO: 53047 - DNA, 59 bp, Homo sapiens; identical to SEQ ID NO: 22771
  chr16:84813520-84813579
  hypo

SEQ ID NO: 53048 - DNA, 43 bp, Homo sapiens; identical to SEQ ID NO: 22772
  chr16:84813605-84813648
  hypo

SEQ ID NO: 53049 - DNA, 31 bp, Homo sapiens; identical to SEQ ID NO: 22773
  chr16:84813693-84813724
  hypo

SEQ ID NO: 53050 - DNA, 31 bp, Homo sapiens; identical to SEQ ID NO: 22774
  chr16:84886290-84886321
  hypo

SEQ ID NO: 53051 - DNA, 31 bp, Homo sapiens; identical to SEQ ID NO: 22775
  chr16:84886350-84886381
  hypo

SEQ ID NO: 53052 - DNA, 31 bp, Homo sapiens; identical to SEQ ID NO: 22776
  chr16:84886385-84886416
  hypo

SEQ ID NO: 53053 - DNA, 31 bp, Homo sapiens; identical to SEQ ID NO: 22778
  chr16:84904247-84904278
  hypo

SEQ ID NO: 53054 - DNA, 31 bp, Homo sapiens; identical to SEQ ID NO: 22779
  chr16:84904286-84904317
  hypo

SEQ ID NO: 53055 - DNA, 41 bp, Homo sapiens; identical to SEQ ID NO: 22780
  chr16:84904365-84904406
  hypo

SEQ ID NO: 53056 - DNA, 31 bp, Homo sapiens; identical to SEQ ID NO: 22781
  chr16:84912366-84912397
  hypo

SEQ ID NO: 53057 - DNA, 46 bp, Homo sapiens; identical to SEQ ID NO: 22782
  chr16:84954214-84954260
  hypo

SEQ ID NO: 53058 - DNA, 54 bp, Homo sapiens; identical to SEQ ID NO: 22784
  chr16:84965069-84965123
  hypo

SEQ ID NO: 53059 - DNA, 31 bp, Homo sapiens; identical to SEQ ID NO: 22785
  chr16:84965125-84965156
  hypo

SEQ ID NO: 53060 - DNA, 43 bp, Homo sapiens; identical to SEQ ID NO: 22786
  chr16:84965209-84965252
  hypo

SEQ ID NO: 53061 - DNA, 31 bp, Homo sapiens; identical to SEQ ID NO: 22787
  chr16:84974273-84974304
  hypo

SEQ ID NO: 53062 - DNA, 45 bp, Homo sapiens; identical to SEQ ID NO: 22788
  chr16:84974427-84974472
  hypo

SEQ ID NO: 53063 - DNA, 31 bp, Homo sapiens; identical to SEQ ID NO: 22789
  chr16:84974955-84974986
  hypo

SEQ ID NO: 53064 - DNA, 31 bp, Homo sapiens; identical to SEQ ID NO: 22790
  chr16:84987807-84987838
  hypo

SEQ ID NO: 53065 - DNA, 38 bp, Homo sapiens; identical to SEQ ID NO: 22793
  chr16:85007984-85008022
  hypo

SEQ ID NO: 53066 - DNA, 35 bp, Homo sapiens; identical to SEQ ID NO: 22794
  chr16:85008031-85008066
  hypo

SEQ ID NO: 53067 - DNA, 2 bp, Homo sapiens
  chr16:85033826-85033828
  hypo
cc

SEQ ID NO: 53068 - DNA, 31 bp, Homo sapiens; identical to SEQ ID NO: 22796
  chr16:85033906-85033937
  hypo

SEQ ID NO: 53069 - DNA, 31 bp, Homo sapiens; identical to SEQ ID NO: 22797
  chr16:85033977-85034008
  hypo

SEQ ID NO: 53070 - DNA, 2 bp, Homo sapiens
  chr16:85083547-85083549
  hypo
ga

SEQ ID NO: 53071 - DNA, 66 bp, Homo sapiens; identical to SEQ ID NO: 22802
  chr16:85196864-85196930
  hypo

SEQ ID NO: 53072 - DNA, 70 bp, Homo sapiens; identical to SEQ ID NO: 5737
  chr16:85202814-85202884
  hypo

SEQ ID NO: 53073 - DNA, 68 bp, Homo sapiens; identical to SEQ ID NO: 22804
  chr16:85214270-85214338
  hypo

SEQ ID NO: 53074 - DNA, 31 bp, Homo sapiens; identical to SEQ ID NO: 22805
  chr16:85214413-85214444
  hypo

SEQ ID NO: 53075 - DNA, 31 bp, Homo sapiens; identical to SEQ ID NO: 22806
  chr16:85236875-85236906
  hypo

SEQ ID NO: 53076 - DNA, 31 bp, Homo sapiens; identical to SEQ ID NO: 22807
  chr16:85238637-85238668
  hypo

SEQ ID NO: 53077 - DNA, 58 bp, Homo sapiens; identical to SEQ ID NO: 22808
  chr16:85241913-85241971
  hypo

SEQ ID NO: 53078 - DNA, 31 bp, Homo sapiens; identical to SEQ ID NO: 22809
  chr16:85245558-85245589
  hypo

SEQ ID NO: 53079 - DNA, 31 bp, Homo sapiens; identical to SEQ ID NO: 22810
  chr16:85245654-85245685
  hypo

SEQ ID NO: 53080 - DNA, 36 bp, Homo sapiens; identical to SEQ ID NO: 22811
  chr16:85245716-85245752
  hypo

SEQ ID NO: 53081 - DNA, 46 bp, Homo sapiens; identical to SEQ ID NO: 22812
  chr16:85283527-85283573
  hypo

SEQ ID NO: 53082 - DNA, 31 bp, Homo sapiens; identical to SEQ ID NO: 22813
  chr16:85285189-85285220
  hypo

SEQ ID NO: 53083 - DNA, 31 bp, Homo sapiens; identical to SEQ ID NO: 22814
  chr16:85289023-85289054
  hypo

SEQ ID NO: 53084 - DNA, 31 bp, Homo sapiens; identical to SEQ ID NO: 22815
  chr16:85294922-85294953
  hypo

SEQ ID NO: 53085 - DNA, 31 bp, Homo sapiens; identical to SEQ ID NO: 22816
  chr16:85299459-85299490
  hypo

SEQ ID NO: 53086 - DNA, 30 bp, Homo sapiens; identical to SEQ ID NO: 22817
  chr16:85321550-85321580
  hypo

SEQ ID NO: 53087 - DNA, 36 bp, Homo sapiens; identical to SEQ ID NO: 22818
  chr16:85327231-85327267
  hypo

SEQ ID NO: 53088 - DNA, 31 bp, Homo sapiens; identical to SEQ ID NO: 22819
  chr16:85327273-85327304
  hypo

SEQ ID NO: 53089 - DNA, 57 bp, Homo sapiens; identical to SEQ ID NO: 22820
  chr16:85327344-85327401
  hypo

SEQ ID NO: 53090 - DNA, 45 bp, Homo sapiens; identical to SEQ ID NO: 22821
  chr16:85332744-85332789
  hypo

SEQ ID NO: 53091 - DNA, 43 bp, Homo sapiens; identical to SEQ ID NO: 22822
  chr16:85351333-85351376
  hypo

SEQ ID NO: 53092 - DNA, 35 bp, Homo sapiens; identical to SEQ ID NO: 22823
  chr16:85351418-85351453
  hypo

SEQ ID NO: 53093 - DNA, 31 bp, Homo sapiens; identical to SEQ ID NO: 22824
  chr16:85351458-85351489
  hypo

SEQ ID NO: 53094 - DNA, 31 bp, Homo sapiens; identical to SEQ ID NO: 22825
  chr16:85351497-85351528
  hypo

SEQ ID NO: 53095 - DNA, 85 bp, Homo sapiens; identical to SEQ ID NO: 22826
  chr16:85364086-85364171
  hypo

SEQ ID NO: 53096 - DNA, 97 bp, Homo sapiens; identical to SEQ ID NO: 22827
  chr16:85364172-85364269
  hypo

SEQ ID NO: 53097 - DNA, 31 bp, Homo sapiens; identical to SEQ ID NO: 22828
  chr16:85376257-85376288
  hypo

SEQ ID NO: 53098 - DNA, 31 bp, Homo sapiens; identical to SEQ ID NO: 22829
  chr16:85407691-85407722
  hypo

SEQ ID NO: 53099 - DNA, 50 bp, Homo sapiens; identical to SEQ ID NO: 22830
  chr16:85407731-85407781
  hypo

SEQ ID NO: 53100 - DNA, 41 bp, Homo sapiens; identical to SEQ ID NO: 22831
  chr16:85407789-85407830
  hypo

SEQ ID NO: 53101 - DNA, 93 bp, Homo sapiens; identical to SEQ ID NO: 22832
  chr16:85407835-85407928
  hypo

SEQ ID NO: 53102 - DNA, 31 bp, Homo sapiens; identical to SEQ ID NO: 22833
  chr16:85426316-85426347
  hypo

SEQ ID NO: 53103 - DNA, 31 bp, Homo sapiens; identical to SEQ ID NO: 22834
  chr16:85426386-85426417
  hypo

SEQ ID NO: 53104 - DNA, 64 bp, Homo sapiens; identical to SEQ ID NO: 22835
  chr16:85426424-85426488
  hypo

SEQ ID NO: 53105 - DNA, 49 bp, Homo sapiens; identical to SEQ ID NO: 22836
  chr16:85432510-85432559
  hypo

SEQ ID NO: 53106 - DNA, 31 bp, Homo sapiens; identical to SEQ ID NO: 22837
  chr16:85446736-85446767
  hypo

SEQ ID NO: 53107 - DNA, 29 bp, Homo sapiens
  chr16:85498188-85498217
  hypo
ggggtgatggtcatgccggttgcacaggg

SEQ ID NO: 53108 - DNA, 31 bp, Homo sapiens; identical to SEQ ID NO: 22839
  chr16:85507602-85507633
  hypo

SEQ ID NO: 53109 - DNA, 42 bp, Homo sapiens; identical to SEQ ID NO: 22840
  chr16:85523183-85523225
  hypo

SEQ ID NO: 53110 - DNA, 93 bp, Homo sapiens; identical to SEQ ID NO: 22841
  chr16:85529539-85529632
  hypo

SEQ ID NO: 53111 - DNA, 31 bp, Homo sapiens; identical to SEQ ID NO: 22842
  chr16:85529758-85529789
  hypo

SEQ ID NO: 53112 - DNA, 31 bp, Homo sapiens; identical to SEQ ID NO: 22843
  chr16:85535587-85535618
  hypo

SEQ ID NO: 53113 - DNA, 62 bp, Homo sapiens; identical to SEQ ID NO: 22844
  chr16:85535633-85535695
  hypo

SEQ ID NO: 53114 - DNA, 61 bp, Homo sapiens; identical to SEQ ID NO: 22845
  chr16:85541367-85541428
  hypo

SEQ ID NO: 53115 - DNA, 67 bp, Homo sapiens; identical to SEQ ID NO: 22846
  chr16:85541460-85541527
  hypo

SEQ ID NO: 53116 - DNA, 98 bp, Homo sapiens; identical to SEQ ID NO: 22847
  chr16:85543125-85543223
  hypo

SEQ ID NO: 53117 - DNA, 60 bp, Homo sapiens; identical to SEQ ID NO: 22848
  chr16:85543251-85543311
  hypo

SEQ ID NO: 53118 - DNA, 31 bp, Homo sapiens; identical to SEQ ID NO: 22850
  chr16:85553675-85553706
  hypo

SEQ ID NO: 53119 - DNA, 31 bp, Homo sapiens; identical to SEQ ID NO: 22851
  chr16:85564298-85564329
  hypo

SEQ ID NO: 53120 - DNA, 17 bp, Homo sapiens
  chr16:85586222-85586239
  hypo
ccaccgcgctcagtctc

SEQ ID NO: 53121 - DNA, 2 bp, Homo sapiens
  chr16:85617747-85617749
  hypo
tg

SEQ ID NO: 53122 - DNA, 2 bp, Homo sapiens
  chr16:85671744-85671746
  hypo
tt

SEQ ID NO: 53123 - DNA, 31 bp, Homo sapiens; identical to SEQ ID NO: 22858
  chr16:85673047-85673078
  hypo

SEQ ID NO: 53124 - DNA, 61 bp, Homo sapiens; identical to SEQ ID NO: 22859
  chr16:85673085-85673146
  hypo

SEQ ID NO: 53125 - DNA, 2 bp, Homo sapiens
  chr16:85673183-85673185
  hypo
ta

SEQ ID NO: 53126 - DNA, 2 bp, Homo sapiens
  chr16:85673837-85673839
  hypo
tt

SEQ ID NO: 53127 - DNA, 31 bp, Homo sapiens; identical to SEQ ID NO: 22865
  chr16:85678804-85678835
  hypo

SEQ ID NO: 53128 - DNA, 2 bp, Homo sapiens
  chr16:85679145-85679147
  hypo
ag

SEQ ID NO: 53129 - DNA, 55 bp, Homo sapiens; identical to SEQ ID NO: 22868
  chr16:85682502-85682557
  hypo

SEQ ID NO: 53130 - DNA, 31 bp, Homo sapiens; identical to SEQ ID NO: 22869
  chr16:85683112-85683143
  hypo

SEQ ID NO: 53131 - DNA, 96 bp, Homo sapiens; identical to SEQ ID NO: 22870
  chr16:85683175-85683271
  hypo

SEQ ID NO: 53132 - DNA, 31 bp, Homo sapiens; identical to SEQ ID NO: 22871
  chr16:85683274-85683305
  hypo

SEQ ID NO: 53133 - DNA, 31 bp, Homo sapiens; identical to SEQ ID NO: 22873
  chr16:85685921-85685952
  hypo

SEQ ID NO: 53134 - DNA, 47 bp, Homo sapiens; identical to SEQ ID NO: 39241
  chr16:85932252-85932299
  hypo

SEQ ID NO: 53135 - DNA, 31 bp, Homo sapiens; identical to SEQ ID NO: 22877
  chr16:85959633-85959664
  hypo

SEQ ID NO: 53136 - DNA, 31 bp, Homo sapiens; identical to SEQ ID NO: 22878
  chr16:86078363-86078394
  hypo

SEQ ID NO: 53137 - DNA, 49 bp, Homo sapiens; identical to SEQ ID NO: 22879
  chr16:86561823-86561872
  hypo

SEQ ID NO: 53138 - DNA, 63 bp, Homo sapiens; identical to SEQ ID NO: 22881
  chr16:87250178-87250241
  hypo

SEQ ID NO: 53139 - DNA, 38 bp, Homo sapiens; identical to SEQ ID NO: 22882
  chr16:87310541-87310579
  hypo

SEQ ID NO: 53140 - DNA, 2 bp, Homo sapiens
  chr16:87356768-87356770
  hypo
gc

SEQ ID NO: 53141 - DNA, 77 bp, Homo sapiens; identical to SEQ ID NO: 5740
  chr16:87417729-87417806
  hypo

SEQ ID NO: 53142 - DNA, 31 bp, Homo sapiens; identical to SEQ ID NO: 5741
  chr16:87417849-87417880
  hypo

SEQ ID NO: 53143 - DNA, 287 bp, Homo sapiens; identical to SEQ ID NO: 39244
  chr16:87417882-87418169
  hypo

SEQ ID NO: 53144 - DNA, 12 bp, Homo sapiens
  chr16:87418200-87418212
  hypo
aaggcgtcctct

SEQ ID NO: 53145 - DNA, 37 bp, Homo sapiens; identical to SEQ ID NO: 22887
  chr16:87420751-87420788
  hypo

SEQ ID NO: 53146 - DNA, 44 bp, Homo sapiens; identical to SEQ ID NO: 22888
  chr16:87420849-87420893
  hypo

SEQ ID NO: 53147 - DNA, 122 bp, Homo sapiens; identical to SEQ ID NO: 5744
  chr16:87525991-87526113
  hypo

SEQ ID NO: 53148 - DNA, 390 bp, Homo sapiens; identical to SEQ ID NO: 5745
  chr16:87526239-87526629
  hypo

SEQ ID NO: 53149 - DNA, 212 bp, Homo sapiens; identical to SEQ ID NO: 5746
  chr16:87526765-87526977
  hypo

SEQ ID NO: 53150 - DNA, 60 bp, Homo sapiens; identical to SEQ ID NO: 5747
  chr16:87527024-87527084
  hypo

SEQ ID NO: 53151 - DNA, 31 bp, Homo sapiens; identical to SEQ ID NO: 22893
  chr16:87584286-87584317
  hypo

SEQ ID NO: 53152 - DNA, 31 bp, Homo sapiens; identical to SEQ ID NO: 22894
  chr16:87585846-87585877
  hypo

SEQ ID NO: 53153 - DNA, 31 bp, Homo sapiens; identical to SEQ ID NO: 22896
  chr16:87597530-87597561
  hypo

SEQ ID NO: 53154 - DNA, 31 bp, Homo sapiens; identical to SEQ ID NO: 22897
  chr16:87678207-87678238
  hypo

SEQ ID NO: 53155 - DNA, 2 bp, Homo sapiens
  chr16:87723112-87723114
  hypo
ct

SEQ ID NO: 53156 - DNA, 31 bp, Homo sapiens; identical to SEQ ID NO: 22906
  chr16:87774174-87774205
  hypo

SEQ ID NO: 53157 - DNA, 31 bp, Homo sapiens; identical to SEQ ID NO: 22907
  chr16:87810850-87810881
  hypo

SEQ ID NO: 53158 - DNA, 38 bp, Homo sapiens; identical to SEQ ID NO: 22909
  chr16:87983754-87983792
  hypo

SEQ ID NO: 53159 - DNA, 45 bp, Homo sapiens; identical to SEQ ID NO: 5755
  chr16:88061031-88061076
  hypo

SEQ ID NO: 53160 - DNA, 72 bp, Homo sapiens; identical to SEQ ID NO: 22911
  chr16:88073664-88073736
  hypo

SEQ ID NO: 53161 - DNA, 31 bp, Homo sapiens; identical to SEQ ID NO: 22912
  chr16:88073769-88073800
  hypo

SEQ ID NO: 53162 - DNA, 41 bp, Homo sapiens; identical to SEQ ID NO: 22913
  chr16:88073813-88073854
  hypo

SEQ ID NO: 53163 - DNA, 50 bp, Homo sapiens; identical to SEQ ID NO: 22914
  chr16:88078971-88079021
  hypo

SEQ ID NO: 53164 - DNA, 51 bp, Homo sapiens; identical to SEQ ID NO: 22915
  chr16:88084705-88084756
  hypo

SEQ ID NO: 53165 - DNA, 31 bp, Homo sapiens; identical to SEQ ID NO: 22916
  chr16:88237695-88237726
  hypo

SEQ ID NO: 53166 - DNA, 31 bp, Homo sapiens; identical to SEQ ID NO: 22917
  chr16:88356202-88356233
  hypo

SEQ ID NO: 53167 - DNA, 31 bp, Homo sapiens; identical to SEQ ID NO: 22918
  chr16:88375503-88375534
  hypo

SEQ ID NO: 53168 - DNA, 2 bp, Homo sapiens
  chr16:88504016-88504018
  hypo
tg

SEQ ID NO: 53169 - DNA, 31 bp, Homo sapiens; identical to SEQ ID NO: 22922
  chr16:88597829-88597860
  hypo

SEQ ID NO: 53170 - DNA, 77 bp, Homo sapiens; identical to SEQ ID NO: 22926
  chr16:88645406-88645483
  hypo

SEQ ID NO: 53171 - DNA, 36 bp, Homo sapiens; identical to SEQ ID NO: 22927
  chr16:88645515-88645551
  hypo

SEQ ID NO: 53172 - DNA, 62 bp, Homo sapiens; identical to SEQ ID NO: 22928
  chr16:88647917-88647979
  hypo

SEQ ID NO: 53173 - DNA, 61 bp, Homo sapiens; identical to SEQ ID NO: 22929
  chr16:88648007-88648068
  hypo

SEQ ID NO: 53174 - DNA, 31 bp, Homo sapiens; identical to SEQ ID NO: 22930
  chr16:88649039-88649070
  hypo

SEQ ID NO: 53175 - DNA, 31 bp, Homo sapiens; identical to SEQ ID NO: 22931
  chr16:88649082-88649113
  hypo

SEQ ID NO: 53176 - DNA, 41 bp, Homo sapiens; identical to SEQ ID NO: 22932
  chr16:88649116-88649157
  hypo

SEQ ID NO: 53177 - DNA, 31 bp, Homo sapiens; identical to SEQ ID NO: 22933
  chr16:88649207-88649238
  hypo

SEQ ID NO: 53178 - DNA, 31 bp, Homo sapiens; identical to SEQ ID NO: 22934
  chr16:88683206-88683237
  hypo

SEQ ID NO: 53179 - DNA, 65 bp, Homo sapiens; identical to SEQ ID NO: 22935
  chr16:88689148-88689213
  hypo

SEQ ID NO: 53180 - DNA, 40 bp, Homo sapiens; identical to SEQ ID NO: 22936
  chr16:88712059-88712099
  hypo

SEQ ID NO: 53181 - DNA, 2 bp, Homo sapiens
  chr16:88757465-88757467
  hypo
gg

SEQ ID NO: 53182 - DNA, 27 bp, Homo sapiens
  chr16:88757496-88757523
  hypo
cccttgggcctgcggcagatgaggtga

SEQ ID NO: 53183 - DNA, 2 bp, Homo sapiens
  chr16:88757526-88757528
  hypo
tt

SEQ ID NO: 53184 - DNA, 39 bp, Homo sapiens; identical to SEQ ID NO: 22939
  chr16:88785879-88785918
  hypo

SEQ ID NO: 53185 - DNA, 31 bp, Homo sapiens; identical to SEQ ID NO: 22940
  chr16:88800799-88800830
  hypo

SEQ ID NO: 53186 - DNA, 2 bp, Homo sapiens
  chr16:88827320-88827322
  hypo
gc

SEQ ID NO: 53187 - DNA, 2 bp, Homo sapiens
  chr16:88831229-88831231
  hypo
cc

SEQ ID NO: 53188 - DNA, 38 bp, Homo sapiens; identical to SEQ ID NO: 22943
  chr16:88831349-88831387
  hypo

SEQ ID NO: 53189 - DNA, 46 bp, Homo sapiens; identical to SEQ ID NO: 5756
  chr16:88878526-88878572
  hypo

SEQ ID NO: 53190 - DNA, 213 bp, Homo sapiens; identical to SEQ ID NO: 5757
  chr16:88878579-88878792
  hypo

SEQ ID NO: 53191 - DNA, 31 bp, Homo sapiens; identical to SEQ ID NO: 22947
  chr16:88891674-88891705
  hypo

SEQ ID NO: 53192 - DNA, 52 bp, Homo sapiens; identical to SEQ ID NO: 22948
  chr16:88892783-88892835
  hypo

SEQ ID NO: 53193 - DNA, 31 bp, Homo sapiens; identical to SEQ ID NO: 22949
  chr16:88927522-88927553
  hypo

SEQ ID NO: 53194 - DNA, 31 bp, Homo sapiens; identical to SEQ ID NO: 5760
  chr16:88938185-88938216
  hypo

SEQ ID NO: 53195 - DNA, 32 bp, Homo sapiens
  chr16:88943411-88943443
  hypo
ggtgggctgggggagccggggcgagaaggccc

SEQ ID NO: 53196 - DNA, 2 bp, Homo sapiens
  chr16:88948323-88948325
  hypo
ct

SEQ ID NO: 53197 - DNA, 2 bp, Homo sapiens
  chr16:88952173-88952175
  hypo
ag

SEQ ID NO: 53198 - DNA, 31 bp, Homo sapiens; identical to SEQ ID NO: 22975
  chr16:88956737-88956768
  hypo

SEQ ID NO: 53199 - DNA, 31 bp, Homo sapiens; identical to SEQ ID NO: 22976
  chr16:88956784-88956815
  hypo

SEQ ID NO: 53200 - DNA, 53 bp, Homo sapiens; identical to SEQ ID NO: 22977
  chr16:88956827-88956880
  hypo

SEQ ID NO: 53201 - DNA, 23 bp, Homo sapiens
  chr16:88958899-88958922
  hypo
gagggaagcggacatgaggacac

SEQ ID NO: 53202 - DNA, 34 bp, Homo sapiens; identical to SEQ ID NO: 22985
  chr16:88958934-88958968
  hypo

SEQ ID NO: 53203 - DNA, 31 bp, Homo sapiens; identical to SEQ ID NO: 22987
  chr16:88965556-88965587
  hypo

SEQ ID NO: 53204 - DNA, 2 bp, Homo sapiens
  chr16:88965601-88965603
  hypo
ct

SEQ ID NO: 53205 - DNA, 2 bp, Homo sapiens
  chr16:88997924-88997926
  hypo
ga

SEQ ID NO: 53206 - DNA, 2 bp, Homo sapiens
  chr16:88999616-88999618
  hypo
cc

SEQ ID NO: 53207 - DNA, 25 bp, Homo sapiens
  chr16:89010262-89010287
  hypo
atgtctgcagtctgtccgacaaggc

SEQ ID NO: 53208 - DNA, 31 bp, Homo sapiens; identical to SEQ ID NO: 22999
  chr16:89016744-89016775
  hypo

SEQ ID NO: 53209 - DNA, 63 bp, Homo sapiens; identical to SEQ ID NO: 23000
  chr16:89016779-89016842
  hypo

SEQ ID NO: 53210 - DNA, 63 bp, Homo sapiens; identical to SEQ ID NO: 23001
  chr16:89016846-89016909
  hypo

SEQ ID NO: 53211 - DNA, 31 bp, Homo sapiens; identical to SEQ ID NO: 23002
  chr16:89017008-89017039
  hypo

SEQ ID NO: 53212 - DNA, 31 bp, Homo sapiens; identical to SEQ ID NO: 23008
  chr16:89028918-89028949
  hypo

SEQ ID NO: 53213 - DNA, 52 bp, Homo sapiens; identical to SEQ ID NO: 23009
  chr16:89029033-89029085
  hypo

SEQ ID NO: 53214 - DNA, 31 bp, Homo sapiens; identical to SEQ ID NO: 23013
  chr16:89100279-89100310
  hypo

SEQ ID NO: 53215 - DNA, 31 bp, Homo sapiens; identical to SEQ ID NO: 23020
  chr16:89162715-89162746
  hypo

SEQ ID NO: 53216 - DNA, 31 bp, Homo sapiens; identical to SEQ ID NO: 23021
  chr16:89189484-89189515
  hypo

SEQ ID NO: 53217 - DNA, 31 bp, Homo sapiens; identical to SEQ ID NO: 5762
  chr16:89189687-89189718
  hypo

SEQ ID NO: 53218 - DNA, 31 bp, Homo sapiens; identical to SEQ ID NO: 23023
  chr16:89198356-89198387
  hypo

SEQ ID NO: 53219 - DNA, 31 bp, Homo sapiens; identical to SEQ ID NO: 23029
  chr16:89225781-89225812
  hypo

SEQ ID NO: 53220 - DNA, 53 bp, Homo sapiens; identical to SEQ ID NO: 23030
  chr16:89254514-89254567
  hypo

SEQ ID NO: 53221 - DNA, 2 bp, Homo sapiens
  chr16:89254607-89254609
  hypo
tc

SEQ ID NO: 53222 - DNA, 149 bp, Homo sapiens
  chr16:89254764-89254913
  hypo
gatgccggcacacacagatgcccacacacagatgccggcacacacacatgccggcacacacagatgcccacacacagatgccggcacacacacatgccggcacacacagatgcccacacacagatgccggcacacacagatgccggcac

SEQ ID NO: 53223 - DNA, 43 bp, Homo sapiens; identical to SEQ ID NO: 23032
  chr16:89347100-89347143
  hypo

SEQ ID NO: 53224 - DNA, 31 bp, Homo sapiens; identical to SEQ ID NO: 23033
  chr16:89354779-89354810
  hypo

SEQ ID NO: 53225 - DNA, 62 bp, Homo sapiens; identical to SEQ ID NO: 23034
  chr16:89360244-89360306
  hypo

SEQ ID NO: 53226 - DNA, 2 bp, Homo sapiens
  chr16:89360319-89360321
  hypo
gc

SEQ ID NO: 53227 - DNA, 6 bp, Homo sapiens
  chr16:89360355-89360361
  hypo
gggcag

SEQ ID NO: 53228 - DNA, 51 bp, Homo sapiens; identical to SEQ ID NO: 23036
  chr16:89409897-89409948
  hypo

SEQ ID NO: 53229 - DNA, 2 bp, Homo sapiens
  chr16:89410312-89410314
  hypo
tg

SEQ ID NO: 53230 - DNA, 31 bp, Homo sapiens; identical to SEQ ID NO: 23039
  chr16:89410650-89410681
  hypo

SEQ ID NO: 53231 - DNA, 31 bp, Homo sapiens; identical to SEQ ID NO: 23040
  chr16:89437588-89437619
  hypo

SEQ ID NO: 53232 - DNA, 31 bp, Homo sapiens; identical to SEQ ID NO: 23043
  chr16:89603136-89603167
  hypo

SEQ ID NO: 53233 - DNA, 114 bp, Homo sapiens; identical to SEQ ID NO: 23044
  chr16:89649561-89649675
  hypo

SEQ ID NO: 53234 - DNA, 31 bp, Homo sapiens; identical to SEQ ID NO: 23045
  chr16:89656477-89656508
  hypo

SEQ ID NO: 53235 - DNA, 2 bp, Homo sapiens
  chr16:89688128-89688130
  hypo
cg

SEQ ID NO: 53236 - DNA, 20 bp, Homo sapiens
  chr16:89713530-89713550
  hypo
tgtgagccacccctcccgat

SEQ ID NO: 53237 - DNA, 24 bp, Homo sapiens
  chr16:89713636-89713660
  hypo
cctgctgctcgaacctgtccatca

SEQ ID NO: 53238 - DNA, 66 bp, Homo sapiens; identical to SEQ ID NO: 5767
  chr16:89894506-89894572
  hypo

SEQ ID NO: 53239 - DNA, 273 bp, Homo sapiens; identical to SEQ ID NO: 23053
  chr16:89901202-89901475
  hypo

SEQ ID NO: 53240 - DNA, 2 bp, Homo sapiens
  chr16:89901551-89901553
  hypo
ac

SEQ ID NO: 53241 - DNA, 17 bp, Homo sapiens
  chr16:89901590-89901607
  hypo
cccgtgtgaatctgtga

SEQ ID NO: 53242 - DNA, 141 bp, Homo sapiens; identical to SEQ ID NO: 23055
  chr16:89966752-89966893
  hypo

SEQ ID NO: 53243 - DNA, 31 bp, Homo sapiens; identical to SEQ ID NO: 23057
  chr16:89982537-89982568
  hypo

SEQ ID NO: 53244 - DNA, 31 bp, Homo sapiens; identical to SEQ ID NO: 23058
  chr16:89982576-89982607
  hypo

SEQ ID NO: 53245 - DNA, 61 bp, Homo sapiens; identical to SEQ ID NO: 23059
  chr16:89985818-89985879
  hypo

SEQ ID NO: 53246 - DNA, 47 bp, Homo sapiens; identical to SEQ ID NO: 23060
  chr16:89985897-89985944
  hypo

SEQ ID NO: 53247 - DNA, 31 bp, Homo sapiens; identical to SEQ ID NO: 23061
  chr16:90039697-90039728
  hypo

SEQ ID NO: 53248 - DNA, 67 bp, Homo sapiens; identical to SEQ ID NO: 23062
  chr16:90044786-90044853
  hypo

SEQ ID NO: 53249 - DNA, 31 bp, Homo sapiens; identical to SEQ ID NO: 23063
  chr16:90053465-90053496
  hypo

SEQ ID NO: 53250 - DNA, 31 bp, Homo sapiens; identical to SEQ ID NO: 23064
  chr16:90060755-90060786
  hypo

SEQ ID NO: 53251 - DNA, 9 bp, Homo sapiens
  chr16:90066610-90066619
  hypo
cccagctcc

SEQ ID NO: 53252 - DNA, 31 bp, Homo sapiens; identical to SEQ ID NO: 23067
  chr16:90072248-90072279
  hypo

SEQ ID NO: 53253 - DNA, 31 bp, Homo sapiens; identical to SEQ ID NO: 23068
  chr16:90072284-90072315
  hypo

SEQ ID NO: 53254 - DNA, 58 bp, Homo sapiens; identical to SEQ ID NO: 23069
  chr16:90072355-90072413
  hypo

SEQ ID NO: 53255 - DNA, 53 bp, Homo sapiens; identical to SEQ ID NO: 23070
  chr16:90072421-90072474
  hypo

SEQ ID NO: 53256 - DNA, 60 bp, Homo sapiens; identical to SEQ ID NO: 23071
  chr16:90072489-90072549
  hypo

SEQ ID NO: 53257 - DNA, 31 bp, Homo sapiens; identical to SEQ ID NO: 23072
  chr16:90072679-90072710
  hypo

SEQ ID NO: 53258 - DNA, 31 bp, Homo sapiens; identical to SEQ ID NO: 23073
  chr16:90104654-90104685
  hypo

SEQ ID NO: 53259 - DNA, 31 bp, Homo sapiens; identical to SEQ ID NO: 23074
  chr16:90109400-90109431
  hypo

SEQ ID NO: 53260 - DNA, 31 bp, Homo sapiens; identical to SEQ ID NO: 23075
  chr17:512962-512993
  hypo

SEQ ID NO: 53261 - DNA, 31 bp, Homo sapiens; identical to SEQ ID NO: 23076
  chr17:513000-513031
  hypo

SEQ ID NO: 53262 - DNA, 79 bp, Homo sapiens; identical to SEQ ID NO: 5777
  chr17:635475-635554
  hypo

SEQ ID NO: 53263 - DNA, 138 bp, Homo sapiens; identical to SEQ ID NO: 5778
  chr17:635797-635935
  hypo

SEQ ID NO: 53264 - DNA, 47 bp, Homo sapiens; identical to SEQ ID NO: 5779
  chr17:635959-636006
  hypo

SEQ ID NO: 53265 - DNA, 138 bp, Homo sapiens; identical to SEQ ID NO: 5780
  chr17:636120-636258
  hypo

SEQ ID NO: 53266 - DNA, 37 bp, Homo sapiens; identical to SEQ ID NO: 23081
  chr17:684165-684202
  hypo

SEQ ID NO: 53267 - DNA, 34 bp, Homo sapiens; identical to SEQ ID NO: 23082
  chr17:744616-744650
  hypo

SEQ ID NO: 53268 - DNA, 31 bp, Homo sapiens; identical to SEQ ID NO: 23083
  chr17:761089-761120
  hypo

SEQ ID NO: 53269 - DNA, 35 bp, Homo sapiens; identical to SEQ ID NO: 23084
  chr17:797965-798000
  hypo

SEQ ID NO: 53270 - DNA, 31 bp, Homo sapiens; identical to SEQ ID NO: 23085
  chr17:817715-817746
  hypo

SEQ ID NO: 53271 - DNA, 50 bp, Homo sapiens; identical to SEQ ID NO: 23086
  chr17:817762-817812
  hypo

SEQ ID NO: 53272 - DNA, 31 bp, Homo sapiens; identical to SEQ ID NO: 23087
  chr17:830915-830946
  hypo

SEQ ID NO: 53273 - DNA, 85 bp, Homo sapiens; identical to SEQ ID NO: 5781
  chr17:883201-883286
  hypo

SEQ ID NO: 53274 - DNA, 31 bp, Homo sapiens; identical to SEQ ID NO: 23089
  chr17:926392-926423
  hypo

SEQ ID NO: 53275 - DNA, 31 bp, Homo sapiens; identical to SEQ ID NO: 23090
  chr17:930920-930951
  hypo

SEQ ID NO: 53276 - DNA, 67 bp, Homo sapiens; identical to SEQ ID NO: 23091
  chr17:952744-952811
  hypo

SEQ ID NO: 53277 - DNA, 66 bp, Homo sapiens; identical to SEQ ID NO: 23092
  chr17:1043598-1043664
  hypo

SEQ ID NO: 53278 - DNA, 31 bp, Homo sapiens; identical to SEQ ID NO: 5785
  chr17:1132221-1132252
  hypo

SEQ ID NO: 53279 - DNA, 31 bp, Homo sapiens; identical to SEQ ID NO: 5786
  chr17:1132264-1132295
  hypo

SEQ ID NO: 53280 - DNA, 31 bp, Homo sapiens; identical to SEQ ID NO: 23096
  chr17:1386689-1386720
  hypo

SEQ ID NO: 53281 - DNA, 31 bp, Homo sapiens; identical to SEQ ID NO: 23097
  chr17:1386729-1386760
  hypo

SEQ ID NO: 53282 - DNA, 37 bp, Homo sapiens; identical to SEQ ID NO: 23098
  chr17:1386788-1386825
  hypo

SEQ ID NO: 53283 - DNA, 2 bp, Homo sapiens
  chr17:1412389-1412391
  hypo
ca

SEQ ID NO: 53284 - DNA, 98 bp, Homo sapiens
  chr17:1412463-1412561
  hypo
aggctcactcgtggtccaggatgtttgggatgtctcgcccctcacaattctgcatctccaggatccggtcaaagtgctccagccgctggtaattgttg

SEQ ID NO: 53285 - DNA, 66 bp, Homo sapiens; identical to SEQ ID NO: 23100
  chr17:1451500-1451566
  hypo

SEQ ID NO: 53286 - DNA, 31 bp, Homo sapiens; identical to SEQ ID NO: 23101
  chr17:1454143-1454174
  hypo

SEQ ID NO: 53287 - DNA, 49 bp, Homo sapiens; identical to SEQ ID NO: 23102
  chr17:1462628-1462677
  hypo

SEQ ID NO: 53288 - DNA, 31 bp, Homo sapiens; identical to SEQ ID NO: 23103
  chr17:1462701-1462732
  hypo

SEQ ID NO: 53289 - DNA, 31 bp, Homo sapiens; identical to SEQ ID NO: 23104
  chr17:1462752-1462783
  hypo

SEQ ID NO: 53290 - DNA, 28 bp, Homo sapiens
  chr17:1494523-1494551
  hypo
ctccctgcccgtcgcccggctgcggtct

SEQ ID NO: 53291 - DNA, 84 bp, Homo sapiens; identical to SEQ ID NO: 5787
  chr17:1613423-1613507
  hypo

SEQ ID NO: 53292 - DNA, 31 bp, Homo sapiens; identical to SEQ ID NO: 5788
  chr17:1613564-1613595
  hypo

SEQ ID NO: 53293 - DNA, 95 bp, Homo sapiens; identical to SEQ ID NO: 5789
  chr17:1613634-1613729
  hypo

SEQ ID NO: 53294 - DNA, 31 bp, Homo sapiens; identical to SEQ ID NO: 23117
  chr17:1694899-1694930
  hypo

SEQ ID NO: 53295 - DNA, 31 bp, Homo sapiens; identical to SEQ ID NO: 23118
  chr17:1756299-1756330
  hypo

SEQ ID NO: 53296 - DNA, 31 bp, Homo sapiens; identical to SEQ ID NO: 23119
  chr17:1775555-1775586
  hypo

SEQ ID NO: 53297 - DNA, 85 bp, Homo sapiens; identical to SEQ ID NO: 23120
  chr17:1775687-1775772
  hypo

SEQ ID NO: 53298 - DNA, 73 bp, Homo sapiens; identical to SEQ ID NO: 23121
  chr17:1775780-1775853
  hypo

SEQ ID NO: 53299 - DNA, 31 bp, Homo sapiens; identical to SEQ ID NO: 23123
  chr17:1849980-1850011
  hypo

SEQ ID NO: 53300 - DNA, 31 bp, Homo sapiens; identical to SEQ ID NO: 23124
  chr17:1890004-1890035
  hypo

SEQ ID NO: 53301 - DNA, 31 bp, Homo sapiens; identical to SEQ ID NO: 23125
  chr17:1918318-1918349
  hypo

SEQ ID NO: 53302 - DNA, 31 bp, Homo sapiens; identical to SEQ ID NO: 5799
  chr17:2014997-2015028
  hypo

SEQ ID NO: 53303 - DNA, 35 bp, Homo sapiens; identical to SEQ ID NO: 23127
  chr17:2146559-2146594
  hypo

SEQ ID NO: 53304 - DNA, 31 bp, Homo sapiens; identical to SEQ ID NO: 23128
  chr17:2146601-2146632
  hypo

SEQ ID NO: 53305 - DNA, 2 bp, Homo sapiens
  chr17:2208026-2208028
  hypo
ag

SEQ ID NO: 53306 - DNA, 51 bp, Homo sapiens; identical to SEQ ID NO: 5800
  chr17:2302238-2302289
  hypo

SEQ ID NO: 53307 - DNA, 21 bp, Homo sapiens
  chr17:2529860-2529881
  hypo
cccccgaggcggagtcttgtt

SEQ ID NO: 53308 - DNA, 31 bp, Homo sapiens; identical to SEQ ID NO: 23136
  chr17:2624047-2624078
  hypo

SEQ ID NO: 53309 - DNA, 302 bp, Homo sapiens; identical to SEQ ID NO: 5802
  chr17:2756746-2757048
  hypo

SEQ ID NO: 53310 - DNA, 31 bp, Homo sapiens; identical to SEQ ID NO: 23138
  chr17:3561589-3561620
  hypo

SEQ ID NO: 53311 - DNA, 2 bp, Homo sapiens
  chr17:3585001-3585003
  hypo
ct

SEQ ID NO: 53312 - DNA, 31 bp, Homo sapiens; identical to SEQ ID NO: 23140
  chr17:3653521-3653552
  hypo

SEQ ID NO: 53313 - DNA, 83 bp, Homo sapiens; identical to SEQ ID NO: 23141
  chr17:3653629-3653712
  hypo

SEQ ID NO: 53314 - DNA, 49 bp, Homo sapiens; identical to SEQ ID NO: 23142
  chr17:3660205-3660254
  hypo

SEQ ID NO: 53315 - DNA, 68 bp, Homo sapiens; identical to SEQ ID NO: 23143
  chr17:3664935-3665003
  hypo

SEQ ID NO: 53316 - DNA, 2 bp, Homo sapiens
  chr17:3755003-3755005
  hypo
tt

SEQ ID NO: 53317 - DNA, 31 bp, Homo sapiens; identical to SEQ ID NO: 23145
  chr17:3755048-3755079
  hypo

SEQ ID NO: 53318 - DNA, 39 bp, Homo sapiens; identical to SEQ ID NO: 5806
  chr17:3778975-3779014
  hypo

SEQ ID NO: 53319 - DNA, 31 bp, Homo sapiens; identical to SEQ ID NO: 5807
  chr17:3779015-3779046
  hypo

SEQ ID NO: 53320 - DNA, 27 bp, Homo sapiens
  chr17:3792165-3792192
  hypo
ggagggaatatgtgtgcgcaggctgtg

SEQ ID NO: 53321 - DNA, 41 bp, Homo sapiens; identical to SEQ ID NO: 23150
  chr17:3793475-3793516
  hypo

SEQ ID NO: 53322 - DNA, 41 bp, Homo sapiens; identical to SEQ ID NO: 5808
  chr17:3867425-3867466
  hypo

SEQ ID NO: 53323 - DNA, 31 bp, Homo sapiens; identical to SEQ ID NO: 23154
  chr17:3980581-3980612
  hypo

SEQ ID NO: 53324 - DNA, 31 bp, Homo sapiens; identical to SEQ ID NO: 23155
  chr17:3980646-3980677
  hypo

SEQ ID NO: 53325 - DNA, 50 bp, Homo sapiens; identical to SEQ ID NO: 23156
  chr17:3980690-3980740
  hypo

SEQ ID NO: 53326 - DNA, 31 bp, Homo sapiens; identical to SEQ ID NO: 23157
  chr17:3980764-3980795
  hypo

SEQ ID NO: 53327 - DNA, 31 bp, Homo sapiens; identical to SEQ ID NO: 23158
  chr17:3982361-3982392
  hypo

SEQ ID NO: 53328 - DNA, 31 bp, Homo sapiens; identical to SEQ ID NO: 23160
  chr17:4048958-4048989
  hypo

SEQ ID NO: 53329 - DNA, 37 bp, Homo sapiens; identical to SEQ ID NO: 23161
  chr17:4048994-4049031
  hypo

SEQ ID NO: 53330 - DNA, 52 bp, Homo sapiens; identical to SEQ ID NO: 23162
  chr17:4049040-4049092
  hypo

SEQ ID NO: 53331 - DNA, 31 bp, Homo sapiens; identical to SEQ ID NO: 23163
  chr17:4215694-4215725
  hypo

SEQ ID NO: 53332 - DNA, 37 bp, Homo sapiens; identical to SEQ ID NO: 23164
  chr17:4273439-4273476
  hypo

SEQ ID NO: 53333 - DNA, 31 bp, Homo sapiens; identical to SEQ ID NO: 23165
  chr17:4289159-4289190
  hypo

SEQ ID NO: 53334 - DNA, 31 bp, Homo sapiens; identical to SEQ ID NO: 23166
  chr17:4350841-4350872
  hypo

SEQ ID NO: 53335 - DNA, 31 bp, Homo sapiens; identical to SEQ ID NO: 23167
  chr17:4446256-4446287
  hypo

SEQ ID NO: 53336 - DNA, 21 bp, Homo sapiens
  chr17:4446288-4446309
  hypo
gttgcccttcaagacccggag

SEQ ID NO: 53337 - DNA, 45 bp, Homo sapiens; identical to SEQ ID NO: 23169
  chr17:4461985-4462030
  hypo

SEQ ID NO: 53338 - DNA, 41 bp, Homo sapiens; identical to SEQ ID NO: 23170
  chr17:4462032-4462073
  hypo

SEQ ID NO: 53339 - DNA, 79 bp, Homo sapiens; identical to SEQ ID NO: 23171
  chr17:4500287-4500366
  hypo

SEQ ID NO: 53340 - DNA, 31 bp, Homo sapiens; identical to SEQ ID NO: 23172
  chr17:4500527-4500558
  hypo

SEQ ID NO: 53341 - DNA, 31 bp, Homo sapiens; identical to SEQ ID NO: 5809
  chr17:4642753-4642784
  hypo

SEQ ID NO: 53342 - DNA, 43 bp, Homo sapiens; identical to SEQ ID NO: 5810
  chr17:4647511-4647554
  hypo

SEQ ID NO: 53343 - DNA, 31 bp, Homo sapiens; identical to SEQ ID NO: 23176
  chr17:4880336-4880367
  hypo

SEQ ID NO: 53344 - DNA, 80 bp, Homo sapiens; identical to SEQ ID NO: 5812
  chr17:4890400-4890480
  hypo

SEQ ID NO: 53345 - DNA, 37 bp, Homo sapiens; identical to SEQ ID NO: 5813
  chr17:4890483-4890520
  hypo

SEQ ID NO: 53346 - DNA, 80 bp, Homo sapiens; identical to SEQ ID NO: 5814
  chr17:4890522-4890602
  hypo

SEQ ID NO: 53347 - DNA, 31 bp, Homo sapiens; identical to SEQ ID NO: 5815
  chr17:4900808-4900839
  hypo

SEQ ID NO: 53348 - DNA, 31 bp, Homo sapiens; identical to SEQ ID NO: 5816
  chr17:4901560-4901591
  hypo

SEQ ID NO: 53349 - DNA, 35 bp, Homo sapiens; identical to SEQ ID NO: 5817
  chr17:4901644-4901679
  hypo

SEQ ID NO: 53350 - DNA, 31 bp, Homo sapiens; identical to SEQ ID NO: 23183
  chr17:4950114-4950145
  hypo

SEQ ID NO: 53351 - DNA, 31 bp, Homo sapiens; identical to SEQ ID NO: 23184
  chr17:5033401-5033432
  hypo

SEQ ID NO: 53352 - DNA, 31 bp, Homo sapiens; identical to SEQ ID NO: 23185
  chr17:5033760-5033791
  hypo

SEQ ID NO: 53353 - DNA, 31 bp, Homo sapiens; identical to SEQ ID NO: 23186
  chr17:5080633-5080664
  hypo

SEQ ID NO: 53354 - DNA, 31 bp, Homo sapiens; identical to SEQ ID NO: 23187
  chr17:5131038-5131069
  hypo

SEQ ID NO: 53355 - DNA, 31 bp, Homo sapiens; identical to SEQ ID NO: 23188
  chr17:5392346-5392377
  hypo

SEQ ID NO: 53356 - DNA, 49 bp, Homo sapiens; identical to SEQ ID NO: 23189
  chr17:5404270-5404319
  hypo

SEQ ID NO: 53357 - DNA, 31 bp, Homo sapiens; identical to SEQ ID NO: 23190
  chr17:6011472-6011503
  hypo

SEQ ID NO: 53358 - DNA, 34 bp, Homo sapiens; identical to SEQ ID NO: 23191
  chr17:6420001-6420035
  hypo

SEQ ID NO: 53359 - DNA, 31 bp, Homo sapiens; identical to SEQ ID NO: 23192
  chr17:6456917-6456948
  hypo

SEQ ID NO: 53360 - DNA, 31 bp, Homo sapiens; identical to SEQ ID NO: 23193
  chr17:6456990-6457021
  hypo

SEQ ID NO: 53361 - DNA, 44 bp, Homo sapiens; identical to SEQ ID NO: 23194
  chr17:6457048-6457092
  hypo

SEQ ID NO: 53362 - DNA, 81 bp, Homo sapiens; identical to SEQ ID NO: 5823
  chr17:6459568-6459649
  hypo

SEQ ID NO: 53363 - DNA, 31 bp, Homo sapiens; identical to SEQ ID NO: 23198
  chr17:7044663-7044694
  hypo

SEQ ID NO: 53364 - DNA, 40 bp, Homo sapiens; identical to SEQ ID NO: 23199
  chr17:7048538-7048578
  hypo

SEQ ID NO: 53365 - DNA, 31 bp, Homo sapiens; identical to SEQ ID NO: 23200
  chr17:7112808-7112839
  hypo

SEQ ID NO: 53366 - DNA, 2 bp, Homo sapiens
  chr17:7136113-7136115
  hypo
aa

SEQ ID NO: 53367 - DNA, 1 bp, Homo sapiens
  chr17:7136145-7136146
  hypo
c

SEQ ID NO: 53368 - DNA, 31 bp, Homo sapiens; identical to SEQ ID NO: 23203
  chr17:7192923-7192954
  hypo

SEQ ID NO: 53369 - DNA, 57 bp, Homo sapiens; identical to SEQ ID NO: 5830
  chr17:7199819-7199876
  hypo

SEQ ID NO: 53370 - DNA, 31 bp, Homo sapiens; identical to SEQ ID NO: 23205
  chr17:7227438-7227469
  hypo

SEQ ID NO: 53371 - DNA, 58 bp, Homo sapiens; identical to SEQ ID NO: 5831
  chr17:7254510-7254568
  hypo

SEQ ID NO: 53372 - DNA, 64 bp, Homo sapiens; identical to SEQ ID NO: 5832
  chr17:7254941-7255005
  hypo

SEQ ID NO: 53373 - DNA, 122 bp, Homo sapiens; identical to SEQ ID NO: 5833
  chr17:7255020-7255142
  hypo

SEQ ID NO: 53374 - DNA, 396 bp, Homo sapiens; identical to SEQ ID NO: 5834
  chr17:7255306-7255702
  hypo

SEQ ID NO: 53375 - DNA, 123 bp, Homo sapiens; identical to SEQ ID NO: 5835
  chr17:7255719-7255842
  hypo

SEQ ID NO: 53376 - DNA, 31 bp, Homo sapiens; identical to SEQ ID NO: 23211
  chr17:7285129-7285160
  hypo

SEQ ID NO: 53377 - DNA, 31 bp, Homo sapiens; identical to SEQ ID NO: 23212
  chr17:7285192-7285223
  hypo

SEQ ID NO: 53378 - DNA, 33 bp, Homo sapiens
  chr17:7285238-7285271
  hypo
cacagatgagcctgggcgttttgtggccgcatg

SEQ ID NO: 53379 - DNA, 52 bp, Homo sapiens; identical to SEQ ID NO: 23214
  chr17:7292300-7292352
  hypo

SEQ ID NO: 53380 - DNA, 31 bp, Homo sapiens; identical to SEQ ID NO: 5839
  chr17:7307051-7307082
  hypo

SEQ ID NO: 53381 - DNA, 44 bp, Homo sapiens; identical to SEQ ID NO: 23216
  chr17:7318436-7318480
  hypo

SEQ ID NO: 53382 - DNA, 34 bp, Homo sapiens; identical to SEQ ID NO: 23217
  chr17:7318915-7318949
  hypo

SEQ ID NO: 53383 - DNA, 36 bp, Homo sapiens; identical to SEQ ID NO: 23218
  chr17:7320501-7320537
  hypo

SEQ ID NO: 53384 - DNA, 31 bp, Homo sapiens; identical to SEQ ID NO: 23219
  chr17:7329116-7329147
  hypo

SEQ ID NO: 53385 - DNA, 31 bp, Homo sapiens; identical to SEQ ID NO: 23221
  chr17:7460246-7460277
  hypo

SEQ ID NO: 53386 - DNA, 31 bp, Homo sapiens; identical to SEQ ID NO: 23222
  chr17:7494034-7494065
  hypo

SEQ ID NO: 53387 - DNA, 38 bp, Homo sapiens; identical to SEQ ID NO: 23223
  chr17:7494078-7494116
  hypo

SEQ ID NO: 53388 - DNA, 42 bp, Homo sapiens; identical to SEQ ID NO: 23224
  chr17:7536910-7536952
  hypo

SEQ ID NO: 53389 - DNA, 38 bp, Homo sapiens; identical to SEQ ID NO: 23226
  chr17:7662607-7662645
  hypo

SEQ ID NO: 53390 - DNA, 61 bp, Homo sapiens; identical to SEQ ID NO: 23227
  chr17:7662753-7662814
  hypo

SEQ ID NO: 53391 - DNA, 31 bp, Homo sapiens; identical to SEQ ID NO: 23228
  chr17:7695958-7695989
  hypo

SEQ ID NO: 53392 - DNA, 31 bp, Homo sapiens; identical to SEQ ID NO: 23229
  chr17:7699939-7699970
  hypo

SEQ ID NO: 53393 - DNA, 31 bp, Homo sapiens; identical to SEQ ID NO: 23230
  chr17:7710675-7710706
  hypo

SEQ ID NO: 53394 - DNA, 31 bp, Homo sapiens; identical to SEQ ID NO: 23231
  chr17:7710740-7710771
  hypo

SEQ ID NO: 53395 - DNA, 72 bp, Homo sapiens; identical to SEQ ID NO: 23232
  chr17:7710780-7710852
  hypo

SEQ ID NO: 53396 - DNA, 31 bp, Homo sapiens; identical to SEQ ID NO: 23233
  chr17:7769320-7769351
  hypo

SEQ ID NO: 53397 - DNA, 43 bp, Homo sapiens; identical to SEQ ID NO: 23234
  chr17:7797153-7797196
  hypo

SEQ ID NO: 53398 - DNA, 31 bp, Homo sapiens; identical to SEQ ID NO: 23235
  chr17:7798327-7798358
  hypo

SEQ ID NO: 53399 - DNA, 89 bp, Homo sapiens; identical to SEQ ID NO: 23236
  chr17:7798624-7798713
  hypo

SEQ ID NO: 53400 - DNA, 55 bp, Homo sapiens; identical to SEQ ID NO: 23237
  chr17:7798754-7798809
  hypo

SEQ ID NO: 53401 - DNA, 31 bp, Homo sapiens; identical to SEQ ID NO: 23238
  chr17:7800249-7800280
  hypo

SEQ ID NO: 53402 - DNA, 42 bp, Homo sapiens; identical to SEQ ID NO: 23239
  chr17:7800308-7800350
  hypo

SEQ ID NO: 53403 - DNA, 31 bp, Homo sapiens; identical to SEQ ID NO: 23240
  chr17:7809784-7809815
  hypo

SEQ ID NO: 53404 - DNA, 31 bp, Homo sapiens; identical to SEQ ID NO: 23241
  chr17:7810098-7810129
  hypo

SEQ ID NO: 53405 - DNA, 50 bp, Homo sapiens; identical to SEQ ID NO: 23242
  chr17:7811071-7811121
  hypo

SEQ ID NO: 53406 - DNA, 31 bp, Homo sapiens; identical to SEQ ID NO: 23243
  chr17:7813719-7813750
  hypo

SEQ ID NO: 53407 - DNA, 42 bp, Homo sapiens; identical to SEQ ID NO: 23244
  chr17:7813757-7813799
  hypo

SEQ ID NO: 53408 - DNA, 31 bp, Homo sapiens; identical to SEQ ID NO: 23246
  chr17:7951706-7951737
  hypo

SEQ ID NO: 53409 - DNA, 31 bp, Homo sapiens; identical to SEQ ID NO: 23247
  chr17:7951911-7951942
  hypo

SEQ ID NO: 53410 - DNA, 31 bp, Homo sapiens; identical to SEQ ID NO: 23248
  chr17:8012301-8012332
  hypo

SEQ ID NO: 53411 - DNA, 40 bp, Homo sapiens; identical to SEQ ID NO: 23249
  chr17:8012397-8012437
  hypo

SEQ ID NO: 53412 - DNA, 14 bp, Homo sapiens
  chr17:8104417-8104431
  hypo
caacagagcaagat

SEQ ID NO: 53413 - DNA, 41 bp, Homo sapiens; identical to SEQ ID NO: 23256
  chr17:8104666-8104707
  hypo

SEQ ID NO: 53414 - DNA, 31 bp, Homo sapiens; identical to SEQ ID NO: 23257
  chr17:8138839-8138870
  hypo

SEQ ID NO: 53415 - DNA, 45 bp, Homo sapiens; identical to SEQ ID NO: 23258
  chr17:8325970-8326015
  hypo

SEQ ID NO: 53416 - DNA, 2 bp, Homo sapiens
  chr17:8409684-8409686
  hypo
tg

SEQ ID NO: 53417 - DNA, 22 bp, Homo sapiens
  chr17:8409729-8409751
  hypo
ggtcggtcgtctccccgtcgag

SEQ ID NO: 53418 - DNA, 51 bp, Homo sapiens; identical to SEQ ID NO: 23261
  chr17:8438421-8438472
  hypo

SEQ ID NO: 53419 - DNA, 50 bp, Homo sapiens; identical to SEQ ID NO: 23262
  chr17:8438530-8438580
  hypo

SEQ ID NO: 53420 - DNA, 31 bp, Homo sapiens; identical to SEQ ID NO: 23263
  chr17:8471491-8471522
  hypo

SEQ ID NO: 53421 - DNA, 49 bp, Homo sapiens; identical to SEQ ID NO: 23264
  chr17:8700776-8700825
  hypo

SEQ ID NO: 53422 - DNA, 31 bp, Homo sapiens; identical to SEQ ID NO: 5851
  chr17:8759639-8759670
  hypo

SEQ ID NO: 53423 - DNA, 31 bp, Homo sapiens; identical to SEQ ID NO: 23267
  chr17:8794407-8794438
  hypo

SEQ ID NO: 53424 - DNA, 45 bp, Homo sapiens; identical to SEQ ID NO: 23268
  chr17:9041942-9041987
  hypo

SEQ ID NO: 53425 - DNA, 31 bp, Homo sapiens; identical to SEQ ID NO: 23269
  chr17:9115730-9115761
  hypo

SEQ ID NO: 53426 - DNA, 34 bp, Homo sapiens; identical to SEQ ID NO: 23270
  chr17:9122495-9122529
  hypo

SEQ ID NO: 53427 - DNA, 52 bp, Homo sapiens; identical to SEQ ID NO: 23271
  chr17:9124885-9124937
  hypo

SEQ ID NO: 53428 - DNA, 31 bp, Homo sapiens; identical to SEQ ID NO: 23272
  chr17:9125130-9125161
  hypo

SEQ ID NO: 53429 - DNA, 45 bp, Homo sapiens; identical to SEQ ID NO: 23273
  chr17:9127007-9127052
  hypo

SEQ ID NO: 53430 - DNA, 81 bp, Homo sapiens; identical to SEQ ID NO: 23274
  chr17:9127065-9127146
  hypo

SEQ ID NO: 53431 - DNA, 31 bp, Homo sapiens; identical to SEQ ID NO: 23275
  chr17:9127181-9127212
  hypo

SEQ ID NO: 53432 - DNA, 31 bp, Homo sapiens; identical to SEQ ID NO: 23276
  chr17:9153887-9153918
  hypo

SEQ ID NO: 53433 - DNA, 333 bp, Homo sapiens; identical to SEQ ID NO: 5856
  chr17:9548970-9549303
  hypo

SEQ ID NO: 53434 - DNA, 39 bp, Homo sapiens; identical to SEQ ID NO: 23278
  chr17:9576952-9576991
  hypo

SEQ ID NO: 53435 - DNA, 31 bp, Homo sapiens; identical to SEQ ID NO: 23280
  chr17:9631364-9631395
  hypo

SEQ ID NO: 53436 - DNA, 34 bp, Homo sapiens; identical to SEQ ID NO: 23281
  chr17:9631405-9631439
  hypo

SEQ ID NO: 53437 - DNA, 30 bp, Homo sapiens; identical to SEQ ID NO: 12076
  chr17:15268977-15269007
  hypo

SEQ ID NO: 53438 - DNA, 31 bp, Homo sapiens; identical to SEQ ID NO: 23285
  chr17:15411201-15411232
  hypo

SEQ ID NO: 53439 - DNA, 31 bp, Homo sapiens; identical to SEQ ID NO: 23286
  chr17:15500063-15500094
  hypo

SEQ ID NO: 53440 - DNA, 47 bp, Homo sapiens; identical to SEQ ID NO: 23287
  chr17:15500097-15500144
  hypo

SEQ ID NO: 53441 - DNA, 60 bp, Homo sapiens; identical to SEQ ID NO: 23288
  chr17:15500157-15500217
  hypo

SEQ ID NO: 53442 - DNA, 31 bp, Homo sapiens; identical to SEQ ID NO: 23289
  chr17:15500646-15500677
  hypo

SEQ ID NO: 53443 - DNA, 31 bp, Homo sapiens; identical to SEQ ID NO: 23291
  chr17:15721506-15721537
  hypo

SEQ ID NO: 53444 - DNA, 46 bp, Homo sapiens; identical to SEQ ID NO: 23293
  chr17:15843703-15843749
  hypo

SEQ ID NO: 53445 - DNA, 54 bp, Homo sapiens; identical to SEQ ID NO: 23295
  chr17:15873030-15873084
  hypo

SEQ ID NO: 53446 - DNA, 31 bp, Homo sapiens; identical to SEQ ID NO: 23296
  chr17:15873113-15873144
  hypo

SEQ ID NO: 53447 - DNA, 31 bp, Homo sapiens; identical to SEQ ID NO: 23297
  chr17:15873186-15873217
  hypo

SEQ ID NO: 53448 - DNA, 31 bp, Homo sapiens; identical to SEQ ID NO: 23299
  chr17:16248028-16248059
  hypo

SEQ ID NO: 53449 - DNA, 31 bp, Homo sapiens; identical to SEQ ID NO: 23302
  chr17:16295226-16295257
  hypo

SEQ ID NO: 53450 - DNA, 41 bp, Homo sapiens; identical to SEQ ID NO: 23303
  chr17:16305046-16305087
  hypo

SEQ ID NO: 53451 - DNA, 31 bp, Homo sapiens; identical to SEQ ID NO: 23304
  chr17:16369822-16369853
  hypo

SEQ ID NO: 53452 - DNA, 46 bp, Homo sapiens; identical to SEQ ID NO: 23305
  chr17:16385290-16385336
  hypo

SEQ ID NO: 53453 - DNA, 31 bp, Homo sapiens; identical to SEQ ID NO: 23306
  chr17:16385339-16385370
  hypo

SEQ ID NO: 53454 - DNA, 31 bp, Homo sapiens; identical to SEQ ID NO: 23307
  chr17:16385381-16385412
  hypo

SEQ ID NO: 53455 - DNA, 41 bp, Homo sapiens; identical to SEQ ID NO: 23308
  chr17:16391198-16391239
  hypo

SEQ ID NO: 53456 - DNA, 31 bp, Homo sapiens; identical to SEQ ID NO: 23309
  chr17:16391265-16391296
  hypo

SEQ ID NO: 53457 - DNA, 61 bp, Homo sapiens; identical to SEQ ID NO: 23310
  chr17:16391310-16391371
  hypo

SEQ ID NO: 53458 - DNA, 58 bp, Homo sapiens; identical to SEQ ID NO: 5858
  chr17:16395228-16395286
  hypo

SEQ ID NO: 53459 - DNA, 31 bp, Homo sapiens; identical to SEQ ID NO: 23312
  chr17:16434314-16434345
  hypo

SEQ ID NO: 53460 - DNA, 31 bp, Homo sapiens; identical to SEQ ID NO: 23313
  chr17:16434352-16434383
  hypo

SEQ ID NO: 53461 - DNA, 74 bp, Homo sapiens; identical to SEQ ID NO: 23314
  chr17:16434441-16434515
  hypo

SEQ ID NO: 53462 - DNA, 33 bp, Homo sapiens; identical to SEQ ID NO: 23316
  chr17:16927736-16927769
  hypo

SEQ ID NO: 53463 - DNA, 31 bp, Homo sapiens; identical to SEQ ID NO: 23317
  chr17:16927903-16927934
  hypo

SEQ ID NO: 53464 - DNA, 62 bp, Homo sapiens; identical to SEQ ID NO: 23318
  chr17:17045771-17045833
  hypo

SEQ ID NO: 53465 - DNA, 57 bp, Homo sapiens; identical to SEQ ID NO: 23319
  chr17:17045834-17045891
  hypo

SEQ ID NO: 53466 - DNA, 31 bp, Homo sapiens; identical to SEQ ID NO: 23321
  chr17:17080459-17080490
  hypo

SEQ ID NO: 53467 - DNA, 31 bp, Homo sapiens; identical to SEQ ID NO: 23322
  chr17:17142227-17142258
  hypo

SEQ ID NO: 53468 - DNA, 31 bp, Homo sapiens; identical to SEQ ID NO: 23323
  chr17:17251262-17251293
  hypo

SEQ ID NO: 53469 - DNA, 46 bp, Homo sapiens; identical to SEQ ID NO: 23324
  chr17:17251296-17251342
  hypo

SEQ ID NO: 53470 - DNA, 31 bp, Homo sapiens; identical to SEQ ID NO: 23325
  chr17:17251344-17251375
  hypo

SEQ ID NO: 53471 - DNA, 31 bp, Homo sapiens; identical to SEQ ID NO: 23326
  chr17:17257801-17257832
  hypo

SEQ ID NO: 53472 - DNA, 37 bp, Homo sapiens; identical to SEQ ID NO: 23328
  chr17:17303347-17303384
  hypo

SEQ ID NO: 53473 - DNA, 31 bp, Homo sapiens; identical to SEQ ID NO: 23329
  chr17:17325163-17325194
  hypo

SEQ ID NO: 53474 - DNA, 61 bp, Homo sapiens; identical to SEQ ID NO: 23330
  chr17:17325201-17325262
  hypo

SEQ ID NO: 53475 - DNA, 31 bp, Homo sapiens; identical to SEQ ID NO: 23331
  chr17:17325274-17325305
  hypo

SEQ ID NO: 53476 - DNA, 31 bp, Homo sapiens; identical to SEQ ID NO: 23332
  chr17:17325316-17325347
  hypo

SEQ ID NO: 53477 - DNA, 31 bp, Homo sapiens; identical to SEQ ID NO: 23333
  chr17:17328456-17328487
  hypo

SEQ ID NO: 53478 - DNA, 31 bp, Homo sapiens; identical to SEQ ID NO: 23334
  chr17:17352482-17352513
  hypo

SEQ ID NO: 53479 - DNA, 53 bp, Homo sapiens; identical to SEQ ID NO: 23335
  chr17:17402428-17402481
  hypo

SEQ ID NO: 53480 - DNA, 31 bp, Homo sapiens; identical to SEQ ID NO: 23336
  chr17:17413541-17413572
  hypo

SEQ ID NO: 53481 - DNA, 37 bp, Homo sapiens; identical to SEQ ID NO: 23337
  chr17:17431919-17431956
  hypo

SEQ ID NO: 53482 - DNA, 31 bp, Homo sapiens; identical to SEQ ID NO: 23338
  chr17:17447944-17447975
  hypo

SEQ ID NO: 53483 - DNA, 70 bp, Homo sapiens; identical to SEQ ID NO: 23339
  chr17:17448007-17448077
  hypo

SEQ ID NO: 53484 - DNA, 31 bp, Homo sapiens; identical to SEQ ID NO: 23340
  chr17:17492208-17492239
  hypo

SEQ ID NO: 53485 - DNA, 62 bp, Homo sapiens; identical to SEQ ID NO: 23341
  chr17:17602524-17602586
  hypo

SEQ ID NO: 53486 - DNA, 53 bp, Homo sapiens; identical to SEQ ID NO: 23342
  chr17:17602602-17602655
  hypo

SEQ ID NO: 53487 - DNA, 93 bp, Homo sapiens; identical to SEQ ID NO: 23343
  chr17:17618836-17618929
  hypo

SEQ ID NO: 53488 - DNA, 55 bp, Homo sapiens; identical to SEQ ID NO: 23344
  chr17:17881579-17881634
  hypo

SEQ ID NO: 53489 - DNA, 31 bp, Homo sapiens; identical to SEQ ID NO: 23345
  chr17:17881637-17881668
  hypo

SEQ ID NO: 53490 - DNA, 31 bp, Homo sapiens; identical to SEQ ID NO: 23346
  chr17:17881671-17881702
  hypo

SEQ ID NO: 53491 - DNA, 31 bp, Homo sapiens; identical to SEQ ID NO: 23347
  chr17:17881731-17881762
  hypo

SEQ ID NO: 53492 - DNA, 54 bp, Homo sapiens; identical to SEQ ID NO: 23348
  chr17:17910432-17910486
  hypo

SEQ ID NO: 53493 - DNA, 31 bp, Homo sapiens; identical to SEQ ID NO: 23349
  chr17:18139365-18139396
  hypo

SEQ ID NO: 53494 - DNA, 31 bp, Homo sapiens; identical to SEQ ID NO: 23350
  chr17:18139409-18139440
  hypo

SEQ ID NO: 53495 - DNA, 31 bp, Homo sapiens; identical to SEQ ID NO: 23351
  chr17:18139457-18139488
  hypo

SEQ ID NO: 53496 - DNA, 31 bp, Homo sapiens; identical to SEQ ID NO: 23352
  chr17:18139489-18139520
  hypo

SEQ ID NO: 53497 - DNA, 31 bp, Homo sapiens; identical to SEQ ID NO: 23353
  chr17:18139523-18139554
  hypo

SEQ ID NO: 53498 - DNA, 54 bp, Homo sapiens; identical to SEQ ID NO: 23354
  chr17:18150272-18150326
  hypo

SEQ ID NO: 53499 - DNA, 62 bp, Homo sapiens; identical to SEQ ID NO: 23355
  chr17:18267502-18267564
  hypo

SEQ ID NO: 53500 - DNA, 31 bp, Homo sapiens; identical to SEQ ID NO: 23356
  chr17:18278360-18278391
  hypo

SEQ ID NO: 53501 - DNA, 31 bp, Homo sapiens; identical to SEQ ID NO: 23357
  chr17:18399915-18399946
  hypo

SEQ ID NO: 53502 - DNA, 68 bp, Homo sapiens; identical to SEQ ID NO: 23358
  chr17:18399951-18400019
  hypo

SEQ ID NO: 53503 - DNA, 31 bp, Homo sapiens; identical to SEQ ID NO: 23359
  chr17:18400024-18400055
  hypo

SEQ ID NO: 53504 - DNA, 31 bp, Homo sapiens; identical to SEQ ID NO: 23360
  chr17:18575701-18575732
  hypo

SEQ ID NO: 53505 - DNA, 35 bp, Homo sapiens; identical to SEQ ID NO: 23361
  chr17:18760367-18760402
  hypo

SEQ ID NO: 53506 - DNA, 31 bp, Homo sapiens; identical to SEQ ID NO: 23362
  chr17:18895944-18895975
  hypo

SEQ ID NO: 53507 - DNA, 31 bp, Homo sapiens; identical to SEQ ID NO: 23363
  chr17:18915678-18915709
  hypo

SEQ ID NO: 53508 - DNA, 207 bp, Homo sapiens; identical to SEQ ID NO: 5863
  chr17:19140729-19140936
  hypo

SEQ ID NO: 53509 - DNA, 69 bp, Homo sapiens; identical to SEQ ID NO: 5864
  chr17:19140942-19141011
  hypo

SEQ ID NO: 53510 - DNA, 31 bp, Homo sapiens; identical to SEQ ID NO: 5869
  chr17:19282088-19282119
  hypo

SEQ ID NO: 53511 - DNA, 194 bp, Homo sapiens; identical to SEQ ID NO: 5870
  chr17:19282131-19282325
  hypo

SEQ ID NO: 53512 - DNA, 31 bp, Homo sapiens; identical to SEQ ID NO: 5871
  chr17:19391541-19391572
  hypo

SEQ ID NO: 53513 - DNA, 31 bp, Homo sapiens; identical to SEQ ID NO: 23369
  chr17:19616224-19616255
  hypo

SEQ ID NO: 53514 - DNA, 38 bp, Homo sapiens; identical to SEQ ID NO: 23370
  chr17:19616277-19616315
  hypo

SEQ ID NO: 53515 - DNA, 78 bp, Homo sapiens; identical to SEQ ID NO: 23371
  chr17:19618656-19618734
  hypo

SEQ ID NO: 53516 - DNA, 31 bp, Homo sapiens; identical to SEQ ID NO: 23372
  chr17:19623342-19623373
  hypo

SEQ ID NO: 53517 - DNA, 38 bp, Homo sapiens; identical to SEQ ID NO: 23373
  chr17:19623379-19623417
  hypo

SEQ ID NO: 53518 - DNA, 68 bp, Homo sapiens; identical to SEQ ID NO: 23374
  chr17:19623423-19623491
  hypo

SEQ ID NO: 53519 - DNA, 66 bp, Homo sapiens; identical to SEQ ID NO: 23375
  chr17:19641467-19641533
  hypo

SEQ ID NO: 53520 - DNA, 59 bp, Homo sapiens; identical to SEQ ID NO: 23376
  chr17:19642883-19642942
  hypo

SEQ ID NO: 53521 - DNA, 38 bp, Homo sapiens; identical to SEQ ID NO: 23377
  chr17:19643640-19643678
  hypo

SEQ ID NO: 53522 - DNA, 31 bp, Homo sapiens; identical to SEQ ID NO: 23378
  chr17:19644759-19644790
  hypo

SEQ ID NO: 53523 - DNA, 31 bp, Homo sapiens; identical to SEQ ID NO: 23379
  chr17:19644795-19644826
  hypo

SEQ ID NO: 53524 - DNA, 57 bp, Homo sapiens; identical to SEQ ID NO: 23380
  chr17:19644877-19644934
  hypo

SEQ ID NO: 53525 - DNA, 31 bp, Homo sapiens; identical to SEQ ID NO: 23381
  chr17:19645605-19645636
  hypo

SEQ ID NO: 53526 - DNA, 41 bp, Homo sapiens; identical to SEQ ID NO: 23382
  chr17:19646479-19646520
  hypo

SEQ ID NO: 53527 - DNA, 31 bp, Homo sapiens; identical to SEQ ID NO: 23383
  chr17:19680416-19680447
  hypo

SEQ ID NO: 53528 - DNA, 31 bp, Homo sapiens; identical to SEQ ID NO: 23384
  chr17:19686486-19686517
  hypo

SEQ ID NO: 53529 - DNA, 40 bp, Homo sapiens; identical to SEQ ID NO: 23385
  chr17:19687002-19687042
  hypo

SEQ ID NO: 53530 - DNA, 40 bp, Homo sapiens; identical to SEQ ID NO: 23386
  chr17:19687067-19687107
  hypo

SEQ ID NO: 53531 - DNA, 31 bp, Homo sapiens; identical to SEQ ID NO: 23387
  chr17:19721310-19721341
  hypo

SEQ ID NO: 53532 - DNA, 31 bp, Homo sapiens; identical to SEQ ID NO: 23388
  chr17:19736606-19736637
  hypo

SEQ ID NO: 53533 - DNA, 39 bp, Homo sapiens; identical to SEQ ID NO: 23389
  chr17:19736688-19736727
  hypo

SEQ ID NO: 53534 - DNA, 46 bp, Homo sapiens; identical to SEQ ID NO: 23392
  chr17:19773272-19773318
  hypo

SEQ ID NO: 53535 - DNA, 31 bp, Homo sapiens; identical to SEQ ID NO: 23395
  chr17:20014223-20014254
  hypo

SEQ ID NO: 53536 - DNA, 154 bp, Homo sapiens; identical to SEQ ID NO: 23396
  chr17:20805560-20805714
  hypo

SEQ ID NO: 53537 - DNA, 2 bp, Homo sapiens
  chr17:20817538-20817540
  hypo
ga

SEQ ID NO: 53538 - DNA, 71 bp, Homo sapiens; identical to SEQ ID NO: 23398
  chr17:20841353-20841424
  hypo

SEQ ID NO: 53539 - DNA, 31 bp, Homo sapiens; identical to SEQ ID NO: 23399
  chr17:20841510-20841541
  hypo

SEQ ID NO: 53540 - DNA, 31 bp, Homo sapiens; identical to SEQ ID NO: 23400
  chr17:20908351-20908382
  hypo

SEQ ID NO: 53541 - DNA, 31 bp, Homo sapiens; identical to SEQ ID NO: 23401
  chr17:20908396-20908427
  hypo

SEQ ID NO: 53542 - DNA, 45 bp, Homo sapiens; identical to SEQ ID NO: 23402
  chr17:20908438-20908483
  hypo

SEQ ID NO: 53543 - DNA, 52 bp, Homo sapiens; identical to SEQ ID NO: 23403
  chr17:20919059-20919111
  hypo

SEQ ID NO: 53544 - DNA, 60 bp, Homo sapiens; identical to SEQ ID NO: 23404
  chr17:20950608-20950668
  hypo

SEQ ID NO: 53545 - DNA, 2 bp, Homo sapiens
  chr17:21104000-21104002
  hypo
ca

SEQ ID NO: 53546 - DNA, 70 bp, Homo sapiens; identical to SEQ ID NO: 23406
  chr17:21104291-21104361
  hypo

SEQ ID NO: 53547 - DNA, 31 bp, Homo sapiens; identical to SEQ ID NO: 23407
  chr17:21196972-21197003
  hypo

SEQ ID NO: 53548 - DNA, 88 bp, Homo sapiens; identical to SEQ ID NO: 23408
  chr17:21204235-21204323
  hypo

SEQ ID NO: 53549 - DNA, 31 bp, Homo sapiens; identical to SEQ ID NO: 23409
  chr17:25620313-25620344
  hypo

SEQ ID NO: 53550 - DNA, 68 bp, Homo sapiens; identical to SEQ ID NO: 23410
  chr17:25620346-25620414
  hypo

SEQ ID NO: 53551 - DNA, 31 bp, Homo sapiens; identical to SEQ ID NO: 23415
  chr17:25948186-25948217
  hypo

SEQ ID NO: 53552 - DNA, 31 bp, Homo sapiens; identical to SEQ ID NO: 23416
  chr17:26851172-26851203
  hypo

SEQ ID NO: 53553 - DNA, 36 bp, Homo sapiens; identical to SEQ ID NO: 23417
  chr17:26851872-26851908
  hypo

SEQ ID NO: 53554 - DNA, 31 bp, Homo sapiens; identical to SEQ ID NO: 23418
  chr17:26861031-26861062
  hypo

SEQ ID NO: 53555 - DNA, 31 bp, Homo sapiens; identical to SEQ ID NO: 5878
  chr17:26925397-26925428
  hypo

SEQ ID NO: 53556 - DNA, 31 bp, Homo sapiens; identical to SEQ ID NO: 23422
  chr17:27179809-27179840
  hypo

SEQ ID NO: 53557 - DNA, 31 bp, Homo sapiens; identical to SEQ ID NO: 23423
  chr17:27301127-27301158
  hypo

SEQ ID NO: 53558 - DNA, 37 bp, Homo sapiens; identical to SEQ ID NO: 23425
  chr17:27421182-27421219
  hypo

SEQ ID NO: 53559 - DNA, 36 bp, Homo sapiens; identical to SEQ ID NO: 23426
  chr17:27421467-27421503
  hypo

SEQ ID NO: 53560 - DNA, 31 bp, Homo sapiens; identical to SEQ ID NO: 23427
  chr17:27421545-27421576
  hypo

SEQ ID NO: 53561 - DNA, 2 bp, Homo sapiens
  chr17:27716045-27716047
  hypo
ac

SEQ ID NO: 53562 - DNA, 67 bp, Homo sapiens; identical to SEQ ID NO: 23431
  chr17:27902813-27902880
  hypo

SEQ ID NO: 53563 - DNA, 52 bp, Homo sapiens; identical to SEQ ID NO: 23432
  chr17:27902895-27902947
  hypo

SEQ ID NO: 53564 - DNA, 48 bp, Homo sapiens; identical to SEQ ID NO: 23433
  chr17:27934685-27934733
  hypo

SEQ ID NO: 53565 - DNA, 36 bp, Homo sapiens; identical to SEQ ID NO: 23434
  chr17:27934863-27934899
  hypo

SEQ ID NO: 53566 - DNA, 31 bp, Homo sapiens; identical to SEQ ID NO: 23435
  chr17:27935137-27935168
  hypo

SEQ ID NO: 53567 - DNA, 31 bp, Homo sapiens; identical to SEQ ID NO: 23436
  chr17:27936394-27936425
  hypo

SEQ ID NO: 53568 - DNA, 31 bp, Homo sapiens; identical to SEQ ID NO: 23439
  chr17:29234451-29234482
  hypo

SEQ ID NO: 53569 - DNA, 31 bp, Homo sapiens; identical to SEQ ID NO: 5883
  chr17:29815732-29815763
  hypo

SEQ ID NO: 53570 - DNA, 31 bp, Homo sapiens; identical to SEQ ID NO: 23441
  chr17:29841345-29841376
  hypo

SEQ ID NO: 53571 - DNA, 41 bp, Homo sapiens; identical to SEQ ID NO: 23442
  chr17:29855527-29855568
  hypo

SEQ ID NO: 53572 - DNA, 2 bp, Homo sapiens
  chr17:30333111-30333113
  hypo
ta

SEQ ID NO: 53573 - DNA, 31 bp, Homo sapiens; identical to SEQ ID NO: 23449
  chr17:30632642-30632673
  hypo

SEQ ID NO: 53574 - DNA, 13 bp, Homo sapiens
  chr17:30710916-30710929
  hypo
tcaaaaaacaaca

SEQ ID NO: 53575 - DNA, 90 bp, Homo sapiens; identical to SEQ ID NO: 5884
  chr17:30813421-30813511
  hypo

SEQ ID NO: 53576 - DNA, 31 bp, Homo sapiens; identical to SEQ ID NO: 23452
  chr17:30844874-30844905
  hypo

SEQ ID NO: 53577 - DNA, 59 bp, Homo sapiens; identical to SEQ ID NO: 23453
  chr17:30844941-30845000
  hypo

SEQ ID NO: 53578 - DNA, 31 bp, Homo sapiens; identical to SEQ ID NO: 23454
  chr17:30845006-30845037
  hypo

SEQ ID NO: 53579 - DNA, 31 bp, Homo sapiens; identical to SEQ ID NO: 23454
  chr17:30845043-30845074
  hypo

SEQ ID NO: 53580 - DNA, 2 bp, Homo sapiens
  chr17:30954268-30954270
  hypo
ag

SEQ ID NO: 53581 - DNA, 31 bp, Homo sapiens; identical to SEQ ID NO: 5885
  chr17:31203739-31203770
  hypo

SEQ ID NO: 53582 - DNA, 2 bp, Homo sapiens
  chr17:31214019-31214021
  hypo
at

SEQ ID NO: 53583 - DNA, 31 bp, Homo sapiens; identical to SEQ ID NO: 23461
  chr17:33521041-33521072
  hypo

SEQ ID NO: 53584 - DNA, 30 bp, Homo sapiens; identical to SEQ ID NO: 23462
  chr17:33896140-33896170
  hypo

SEQ ID NO: 53585 - DNA, 1 bp, Homo sapiens
  chr17:33917230-33917231
  hypo
c

SEQ ID NO: 53586 - DNA, 31 bp, Homo sapiens; identical to SEQ ID NO: 23464
  chr17:35488970-35489001
  hypo

SEQ ID NO: 53587 - DNA, 36 bp, Homo sapiens; identical to SEQ ID NO: 23465
  chr17:35489020-35489056
  hypo

SEQ ID NO: 53588 - DNA, 34 bp, Homo sapiens; identical to SEQ ID NO: 23466
  chr17:35489101-35489135
  hypo

SEQ ID NO: 53589 - DNA, 31 bp, Homo sapiens; identical to SEQ ID NO: 23467
  chr17:35802039-35802070
  hypo

SEQ ID NO: 53590 - DNA, 31 bp, Homo sapiens; identical to SEQ ID NO: 5895
  chr17:35816364-35816395
  hypo

SEQ ID NO: 53591 - DNA, 31 bp, Homo sapiens; identical to SEQ ID NO: 23470
  chr17:35870345-35870376
  hypo

SEQ ID NO: 53592 - DNA, 31 bp, Homo sapiens; identical to SEQ ID NO: 23471
  chr17:36089510-36089541
  hypo

SEQ ID NO: 53593 - DNA, 46 bp, Homo sapiens; identical to SEQ ID NO: 5901
  chr17:36762362-36762408
  hypo

SEQ ID NO: 53594 - DNA, 31 bp, Homo sapiens; identical to SEQ ID NO: 23473
  chr17:36790406-36790437
  hypo

SEQ ID NO: 53595 - DNA, 43 bp, Homo sapiens; identical to SEQ ID NO: 23474
  chr17:36818502-36818545
  hypo

SEQ ID NO: 53596 - DNA, 46 bp, Homo sapiens; identical to SEQ ID NO: 23477
  chr17:36876594-36876640
  hypo

SEQ ID NO: 53597 - DNA, 34 bp, Homo sapiens; identical to SEQ ID NO: 5903
  chr17:36886753-36886787
  hypo

SEQ ID NO: 53598 - DNA, 83 bp, Homo sapiens; identical to SEQ ID NO: 5904
  chr17:36886817-36886900
  hypo

SEQ ID NO: 53599 - DNA, 38 bp, Homo sapiens; identical to SEQ ID NO: 5907
  chr17:36904349-36904387
  hypo

SEQ ID NO: 53600 - DNA, 62 bp, Homo sapiens; identical to SEQ ID NO: 5908
  chr17:36905150-36905212
  hypo

SEQ ID NO: 53601 - DNA, 227 bp, Homo sapiens; identical to SEQ ID NO: 39379
  chr17:36905241-36905468
  hypo

SEQ ID NO: 53602 - DNA, 2 bp, Homo sapiens
  chr17:37011082-37011084
  hypo
aa

SEQ ID NO: 53603 - DNA, 78 bp, Homo sapiens; identical to SEQ ID NO: 23485
  chr17:37084607-37084685
  hypo

SEQ ID NO: 53604 - DNA, 31 bp, Homo sapiens; identical to SEQ ID NO: 23487
  chr17:37389382-37389413
  hypo

SEQ ID NO: 53605 - DNA, 40 bp, Homo sapiens; identical to SEQ ID NO: 23488
  chr17:37445219-37445259
  hypo

SEQ ID NO: 53606 - DNA, 31 bp, Homo sapiens; identical to SEQ ID NO: 23489
  chr17:37452477-37452508
  hypo

SEQ ID NO: 53607 - DNA, 31 bp, Homo sapiens; identical to SEQ ID NO: 23490
  chr17:37483845-37483876
  hypo

SEQ ID NO: 53608 - DNA, 31 bp, Homo sapiens; identical to SEQ ID NO: 5920
  chr17:37762909-37762940
  hypo

SEQ ID NO: 53609 - DNA, 56 bp, Homo sapiens; identical to SEQ ID NO: 5921
  chr17:37774744-37774800
  hypo

SEQ ID NO: 53610 - DNA, 75 bp, Homo sapiens; identical to SEQ ID NO: 5922
  chr17:37774835-37774910
  hypo

SEQ ID NO: 53611 - DNA, 31 bp, Homo sapiens; identical to SEQ ID NO: 5923
  chr17:37775053-37775084
  hypo

SEQ ID NO: 53612 - DNA, 31 bp, Homo sapiens; identical to SEQ ID NO: 5926
  chr17:37844562-37844593
  hypo

SEQ ID NO: 53613 - DNA, 31 bp, Homo sapiens; identical to SEQ ID NO: 23499
  chr17:37864743-37864774
  hypo

SEQ ID NO: 53614 - DNA, 31 bp, Homo sapiens; identical to SEQ ID NO: 23501
  chr17:38176410-38176441
  hypo

SEQ ID NO: 53615 - DNA, 10 bp, Homo sapiens
  chr17:38179273-38179283
  hypo
aggccacctg

SEQ ID NO: 53616 - DNA, 31 bp, Homo sapiens; identical to SEQ ID NO: 23503
  chr17:38179339-38179370
  hypo

SEQ ID NO: 53617 - DNA, 2 bp, Homo sapiens
  chr17:38179396-38179398
  hypo
tt

SEQ ID NO: 53618 - DNA, 31 bp, Homo sapiens; identical to SEQ ID NO: 23505
  chr17:38179437-38179468
  hypo

SEQ ID NO: 53619 - DNA, 53 bp, Homo sapiens; identical to SEQ ID NO: 23506
  chr17:38179481-38179534
  hypo

SEQ ID NO: 53620 - DNA, 31 bp, Homo sapiens; identical to SEQ ID NO: 23507
  chr17:38179546-38179577
  hypo

SEQ ID NO: 53621 - DNA, 31 bp, Homo sapiens; identical to SEQ ID NO: 23508
  chr17:38183023-38183054
  hypo

SEQ ID NO: 53622 - DNA, 40 bp, Homo sapiens; identical to SEQ ID NO: 5930
  chr17:38228512-38228552
  hypo

SEQ ID NO: 53623 - DNA, 31 bp, Homo sapiens; identical to SEQ ID NO: 23510
  chr17:38251852-38251883
  hypo

SEQ ID NO: 53624 - DNA, 43 bp, Homo sapiens; identical to SEQ ID NO: 23511
  chr17:38276279-38276322
  hypo

SEQ ID NO: 53625 - DNA, 31 bp, Homo sapiens; identical to SEQ ID NO: 5936
  chr17:38498601-38498632
  hypo

SEQ ID NO: 53626 - DNA, 48 bp, Homo sapiens; identical to SEQ ID NO: 5937
  chr17:38498897-38498945
  hypo

SEQ ID NO: 53627 - DNA, 31 bp, Homo sapiens; identical to SEQ ID NO: 23516
  chr17:38821260-38821291
  hypo

SEQ ID NO: 53628 - DNA, 31 bp, Homo sapiens; identical to SEQ ID NO: 23517
  chr17:39651771-39651802
  hypo

SEQ ID NO: 53629 - DNA, 31 bp, Homo sapiens; identical to SEQ ID NO: 23518
  chr17:39659225-39659256
  hypo

SEQ ID NO: 53630 - DNA, 47 bp, Homo sapiens; identical to SEQ ID NO: 5938
  chr17:39684386-39684433
  hypo

SEQ ID NO: 53631 - DNA, 31 bp, Homo sapiens; identical to SEQ ID NO: 23521
  chr17:39702524-39702555
  hypo

SEQ ID NO: 53632 - DNA, 50 bp, Homo sapiens; identical to SEQ ID NO: 23522
  chr17:39803751-39803801
  hypo

SEQ ID NO: 53633 - DNA, 31 bp, Homo sapiens; identical to SEQ ID NO: 23525
  chr17:40353779-40353810
  hypo

SEQ ID NO: 53634 - DNA, 41 bp, Homo sapiens; identical to SEQ ID NO: 23527
  chr17:40370155-40370196
  hypo

SEQ ID NO: 53635 - DNA, 57 bp, Homo sapiens; identical to SEQ ID NO: 23528
  chr17:40370237-40370294
  hypo

SEQ ID NO: 53636 - DNA, 31 bp, Homo sapiens; identical to SEQ ID NO: 23529
  chr17:40371744-40371775
  hypo

SEQ ID NO: 53637 - DNA, 73 bp, Homo sapiens; identical to SEQ ID NO: 23530
  chr17:40371788-40371861
  hypo

SEQ ID NO: 53638 - DNA, 41 bp, Homo sapiens; identical to SEQ ID NO: 23531
  chr17:40371918-40371959
  hypo

SEQ ID NO: 53639 - DNA, 31 bp, Homo sapiens; identical to SEQ ID NO: 23532
  chr17:40371968-40371999
  hypo

SEQ ID NO: 53640 - DNA, 89 bp, Homo sapiens; identical to SEQ ID NO: 23533
  chr17:40372018-40372107
  hypo

SEQ ID NO: 53641 - DNA, 82 bp, Homo sapiens; identical to SEQ ID NO: 23534
  chr17:40372229-40372311
  hypo

SEQ ID NO: 53642 - DNA, 31 bp, Homo sapiens; identical to SEQ ID NO: 23535
  chr17:40372376-40372407
  hypo

SEQ ID NO: 53643 - DNA, 31 bp, Homo sapiens; identical to SEQ ID NO: 23536
  chr17:40375374-40375405
  hypo

SEQ ID NO: 53644 - DNA, 55 bp, Homo sapiens; identical to SEQ ID NO: 23537
  chr17:40375468-40375523
  hypo

SEQ ID NO: 53645 - DNA, 31 bp, Homo sapiens; identical to SEQ ID NO: 23538
  chr17:40376747-40376778
  hypo

SEQ ID NO: 53646 - DNA, 82 bp, Homo sapiens; identical to SEQ ID NO: 23542
  chr17:40387768-40387850
  hypo

SEQ ID NO: 53647 - DNA, 31 bp, Homo sapiens; identical to SEQ ID NO: 5941
  chr17:40429066-40429097
  hypo

SEQ ID NO: 53648 - DNA, 30 bp, Homo sapiens; identical to SEQ ID NO: 23545
  chr17:40445941-40445971
  hypo

SEQ ID NO: 53649 - DNA, 31 bp, Homo sapiens; identical to SEQ ID NO: 23546
  chr17:40447591-40447622
  hypo

SEQ ID NO: 53650 - DNA, 50 bp, Homo sapiens; identical to SEQ ID NO: 23547
  chr17:40447630-40447680
  hypo

SEQ ID NO: 53651 - DNA, 41 bp, Homo sapiens; identical to SEQ ID NO: 23548
  chr17:40447698-40447739
  hypo

SEQ ID NO: 53652 - DNA, 31 bp, Homo sapiens; identical to SEQ ID NO: 23549
  chr17:40453234-40453265
  hypo

SEQ ID NO: 53653 - DNA, 61 bp, Homo sapiens; identical to SEQ ID NO: 23550
  chr17:40453339-40453400
  hypo

SEQ ID NO: 53654 - DNA, 31 bp, Homo sapiens; identical to SEQ ID NO: 23551
  chr17:40453898-40453929
  hypo

SEQ ID NO: 53655 - DNA, 31 bp, Homo sapiens; identical to SEQ ID NO: 23552
  chr17:40456104-40456135
  hypo

SEQ ID NO: 53656 - DNA, 56 bp, Homo sapiens; identical to SEQ ID NO: 23553
  chr17:40456201-40456257
  hypo

SEQ ID NO: 53657 - DNA, 45 bp, Homo sapiens; identical to SEQ ID NO: 23554
  chr17:40456259-40456304
  hypo

SEQ ID NO: 53658 - DNA, 54 bp, Homo sapiens; identical to SEQ ID NO: 23555
  chr17:40456376-40456430
  hypo

SEQ ID NO: 53659 - DNA, 44 bp, Homo sapiens; identical to SEQ ID NO: 23556
  chr17:40456438-40456482
  hypo

SEQ ID NO: 53660 - DNA, 31 bp, Homo sapiens; identical to SEQ ID NO: 23557
  chr17:40456492-40456523
  hypo

SEQ ID NO: 53661 - DNA, 42 bp, Homo sapiens; identical to SEQ ID NO: 23558
  chr17:40458358-40458400
  hypo

SEQ ID NO: 53662 - DNA, 31 bp, Homo sapiens; identical to SEQ ID NO: 23559
  chr17:40458424-40458455
  hypo

SEQ ID NO: 53663 - DNA, 48 bp, Homo sapiens; identical to SEQ ID NO: 23560
  chr17:40458470-40458518
  hypo

SEQ ID NO: 53664 - DNA, 31 bp, Homo sapiens; identical to SEQ ID NO: 23561
  chr17:40459506-40459537
  hypo

SEQ ID NO: 53665 - DNA, 31 bp, Homo sapiens; identical to SEQ ID NO: 23562
  chr17:40459538-40459569
  hypo

SEQ ID NO: 53666 - DNA, 43 bp, Homo sapiens; identical to SEQ ID NO: 23563
  chr17:40459571-40459614
  hypo

SEQ ID NO: 53667 - DNA, 31 bp, Homo sapiens; identical to SEQ ID NO: 23564
  chr17:40461335-40461366
  hypo

SEQ ID NO: 53668 - DNA, 54 bp, Homo sapiens; identical to SEQ ID NO: 5947
  chr17:40575291-40575345
  hypo

SEQ ID NO: 53669 - DNA, 31 bp, Homo sapiens; identical to SEQ ID NO: 5948
  chr17:40575351-40575382
  hypo

SEQ ID NO: 53670 - DNA, 37 bp, Homo sapiens; identical to SEQ ID NO: 23569
  chr17:40699455-40699492
  hypo

SEQ ID NO: 53671 - DNA, 31 bp, Homo sapiens; identical to SEQ ID NO: 23572
  chr17:40743624-40743655
  hypo

SEQ ID NO: 53672 - DNA, 56 bp, Homo sapiens; identical to SEQ ID NO: 23573
  chr17:40897647-40897703
  hypo

SEQ ID NO: 53673 - DNA, 36 bp, Homo sapiens; identical to SEQ ID NO: 23574
  chr17:40939516-40939552
  hypo

SEQ ID NO: 53674 - DNA, 40 bp, Homo sapiens; identical to SEQ ID NO: 5949
  chr17:40950713-40950753
  hypo

SEQ ID NO: 53675 - DNA, 49 bp, Homo sapiens; identical to SEQ ID NO: 5950
  chr17:40950807-40950856
  hypo

SEQ ID NO: 53676 - DNA, 41 bp, Homo sapiens; identical to SEQ ID NO: 23578
  chr17:41131473-41131514
  hypo

SEQ ID NO: 53677 - DNA, 30 bp, Homo sapiens; identical to SEQ ID NO: 23579
  chr17:41320635-41320665
  hypo

SEQ ID NO: 53678 - DNA, 31 bp, Homo sapiens; identical to SEQ ID NO: 23580
  chr17:41389668-41389699
  hypo

SEQ ID NO: 53679 - DNA, 44 bp, Homo sapiens; identical to SEQ ID NO: 23582
  chr17:41399426-41399470
  hypo

SEQ ID NO: 53680 - DNA, 31 bp, Homo sapiens; identical to SEQ ID NO: 23583
  chr17:41451802-41451833
  hypo

SEQ ID NO: 53681 - DNA, 88 bp, Homo sapiens; identical to SEQ ID NO: 23584
  chr17:41456126-41456214
  hypo

SEQ ID NO: 53682 - DNA, 31 bp, Homo sapiens; identical to SEQ ID NO: 23585
  chr17:41456218-41456249
  hypo

SEQ ID NO: 53683 - DNA, 43 bp, Homo sapiens; identical to SEQ ID NO: 23586
  chr17:41570141-41570184
  hypo

SEQ ID NO: 53684 - DNA, 31 bp, Homo sapiens; identical to SEQ ID NO: 23587
  chr17:41634686-41634717
  hypo

SEQ ID NO: 53685 - DNA, 31 bp, Homo sapiens; identical to SEQ ID NO: 23588
  chr17:41646432-41646463
  hypo

SEQ ID NO: 53686 - DNA, 42 bp, Homo sapiens; identical to SEQ ID NO: 23589
  chr17:41692629-41692671
  hypo

SEQ ID NO: 53687 - DNA, 30 bp, Homo sapiens; identical to SEQ ID NO: 39407
  chr17:41723872-41723902
  hypo

SEQ ID NO: 53688 - DNA, 31 bp, Homo sapiens; identical to SEQ ID NO: 23592
  chr17:41729456-41729487
  hypo

SEQ ID NO: 53689 - DNA, 31 bp, Homo sapiens; identical to SEQ ID NO: 23593
  chr17:41824096-41824127
  hypo

SEQ ID NO: 53690 - DNA, 42 bp, Homo sapiens; identical to SEQ ID NO: 23594
  chr17:41895346-41895388
  hypo

SEQ ID NO: 53691 - DNA, 31 bp, Homo sapiens; identical to SEQ ID NO: 23595
  chr17:41907276-41907307
  hypo

SEQ ID NO: 53692 - DNA, 58 bp, Homo sapiens; identical to SEQ ID NO: 23596
  chr17:42019593-42019651
  hypo

SEQ ID NO: 53693 - DNA, 60 bp, Homo sapiens; identical to SEQ ID NO: 39416
  chr17:42092357-42092417
  hypo

SEQ ID NO: 53694 - DNA, 59 bp, Homo sapiens; identical to SEQ ID NO: 5963
  chr17:42287943-42288002
  hypo

SEQ ID NO: 53695 - DNA, 31 bp, Homo sapiens; identical to SEQ ID NO: 5964
  chr17:42288062-42288093
  hypo

SEQ ID NO: 53696 - DNA, 31 bp, Homo sapiens; identical to SEQ ID NO: 23604
  chr17:42304494-42304525
  hypo

SEQ ID NO: 53697 - DNA, 31 bp, Homo sapiens; identical to SEQ ID NO: 23606
  chr17:42338003-42338034
  hypo

SEQ ID NO: 53698 - DNA, 2 bp, Homo sapiens
  chr17:42395127-42395129
  hypo
cc

SEQ ID NO: 53699 - DNA, 53 bp, Homo sapiens; identical to SEQ ID NO: 23608
  chr17:42395459-42395512
  hypo

SEQ ID NO: 53700 - DNA, 2 bp, Homo sapiens
  chr17:42395519-42395521
  hypo
ag

SEQ ID NO: 53701 - DNA, 40 bp, Homo sapiens
  chr17:42395550-42395590
  hypo
acgagtgcctggtgagcgacagtcccgagggcagcccagc

SEQ ID NO: 53702 - DNA, 23 bp, Homo sapiens
  chr17:42401271-42401294
  hypo
cactgggattacaggcgtgagcc

SEQ ID NO: 53703 - DNA, 22 bp, Homo sapiens
  chr17:42402751-42402773
  hypo
ccccgccccggccgcgcgcggc

SEQ ID NO: 53704 - DNA, 71 bp, Homo sapiens; identical to SEQ ID NO: 39422
  chr17:42402917-42402988
  hypo

SEQ ID NO: 53705 - DNA, 79 bp, Homo sapiens; identical to SEQ ID NO: 23613
  chr17:42427827-42427906
  hypo

SEQ ID NO: 53706 - DNA, 31 bp, Homo sapiens; identical to SEQ ID NO: 23614
  chr17:42427966-42427997
  hypo

SEQ ID NO: 53707 - DNA, 31 bp, Homo sapiens; identical to SEQ ID NO: 23615
  chr17:42662278-42662309
  hypo

SEQ ID NO: 53708 - DNA, 31 bp, Homo sapiens; identical to SEQ ID NO: 23616
  chr17:42848907-42848938
  hypo

SEQ ID NO: 53709 - DNA, 31 bp, Homo sapiens; identical to SEQ ID NO: 23620
  chr17:42963909-42963940
  hypo

SEQ ID NO: 53710 - DNA, 64 bp, Homo sapiens; identical to SEQ ID NO: 23621
  chr17:42981555-42981619
  hypo

SEQ ID NO: 53711 - DNA, 31 bp, Homo sapiens; identical to SEQ ID NO: 23622
  chr17:42981928-42981959
  hypo

SEQ ID NO: 53712 - DNA, 31 bp, Homo sapiens; identical to SEQ ID NO: 23623
  chr17:42999485-42999516
  hypo

SEQ ID NO: 53713 - DNA, 31 bp, Homo sapiens; identical to SEQ ID NO: 23624
  chr17:43121670-43121701
  hypo

SEQ ID NO: 53714 - DNA, 31 bp, Homo sapiens; identical to SEQ ID NO: 23625
  chr17:43180537-43180568
  hypo

SEQ ID NO: 53715 - DNA, 48 bp, Homo sapiens; identical to SEQ ID NO: 23626
  chr17:43193913-43193961
  hypo

SEQ ID NO: 53716 - DNA, 54 bp, Homo sapiens; identical to SEQ ID NO: 23627
  chr17:43196205-43196259
  hypo

SEQ ID NO: 53717 - DNA, 31 bp, Homo sapiens; identical to SEQ ID NO: 5970
  chr17:43209588-43209619
  hypo

SEQ ID NO: 53718 - DNA, 33 bp, Homo sapiens; identical to SEQ ID NO: 23629
  chr17:43296202-43296235
  hypo

SEQ ID NO: 53719 - DNA, 163 bp, Homo sapiens; identical to SEQ ID NO: 5972
  chr17:43298738-43298901
  hypo

SEQ ID NO: 53720 - DNA, 71 bp, Homo sapiens
  chr17:43321226-43321297
  hypo
gcgcagcctcatcacccgctttgagcgggagcagcggccaatggaggagctgtcagaggaggaccgcttca

SEQ ID NO: 53721 - DNA, 434 bp, Homo sapiens; identical to SEQ ID NO: 5975
  chr17:43324812-43325246
  hypo

SEQ ID NO: 53722 - DNA, 31 bp, Homo sapiens; identical to SEQ ID NO: 23633
  chr17:44861962-44861993
  hypo

SEQ ID NO: 53723 - DNA, 31 bp, Homo sapiens; identical to SEQ ID NO: 23634
  chr17:44949746-44949777
  hypo

SEQ ID NO: 53724 - DNA, 6 bp, Homo sapiens
  chr17:45022269-45022275
  hypo
ttttta

SEQ ID NO: 53725 - DNA, 39 bp, Homo sapiens
  chr17:45970934-45970973
  hypo
ttcacaccctgtcctccgccccgtgtgcgcacacttttt

SEQ ID NO: 53726 - DNA, 2 bp, Homo sapiens
  chr17:46124900-46124902
  hypo
aa

SEQ ID NO: 53727 - DNA, 95 bp, Homo sapiens; identical to SEQ ID NO: 39436
  chr17:46125148-46125243
  hypo

SEQ ID NO: 53728 - DNA, 58 bp, Homo sapiens; identical to SEQ ID NO: 23645
  chr17:46176825-46176883
  hypo

SEQ ID NO: 53729 - DNA, 38 bp, Homo sapiens; identical to SEQ ID NO: 23648
  chr17:46223565-46223603
  hypo

SEQ ID NO: 53730 - DNA, 31 bp, Homo sapiens; identical to SEQ ID NO: 23649
  chr17:46872246-46872277
  hypo

SEQ ID NO: 53731 - DNA, 31 bp, Homo sapiens; identical to SEQ ID NO: 23650
  chr17:47126022-47126053
  hypo

SEQ ID NO: 53732 - DNA, 31 bp, Homo sapiens; identical to SEQ ID NO: 6005
  chr17:47307938-47307969
  hypo

SEQ ID NO: 53733 - DNA, 31 bp, Homo sapiens; identical to SEQ ID NO: 23654
  chr17:48435304-48435335
  hypo

SEQ ID NO: 53734 - DNA, 47 bp, Homo sapiens; identical to SEQ ID NO: 23655
  chr17:48539229-48539276
  hypo

SEQ ID NO: 53735 - DNA, 31 bp, Homo sapiens; identical to SEQ ID NO: 23656
  chr17:48565302-48565333
  hypo

SEQ ID NO: 53736 - DNA, 31 bp, Homo sapiens; identical to SEQ ID NO: 23657
  chr17:48565337-48565368
  hypo

SEQ ID NO: 53737 - DNA, 37 bp, Homo sapiens; identical to SEQ ID NO: 23662
  chr17:48613865-48613902
  hypo

SEQ ID NO: 53738 - DNA, 48 bp, Homo sapiens; identical to SEQ ID NO: 23663
  chr17:48613905-48613953
  hypo

SEQ ID NO: 53739 - DNA, 43 bp, Homo sapiens; identical to SEQ ID NO: 23666
  chr17:48620599-48620642
  hypo

SEQ ID NO: 53740 - DNA, 2 bp, Homo sapiens
  chr17:48620644-48620646
  hypo
gc

SEQ ID NO: 53741 - DNA, 31 bp, Homo sapiens; identical to SEQ ID NO: 23668
  chr17:48668917-48668948
  hypo

SEQ ID NO: 53742 - DNA, 31 bp, Homo sapiens; identical to SEQ ID NO: 23669
  chr17:48690339-48690370
  hypo

SEQ ID NO: 53743 - DNA, 38 bp, Homo sapiens; identical to SEQ ID NO: 23670
  chr17:48890602-48890640
  hypo

SEQ ID NO: 53744 - DNA, 31 bp, Homo sapiens; identical to SEQ ID NO: 23671
  chr17:48970894-48970925
  hypo

SEQ ID NO: 53745 - DNA, 31 bp, Homo sapiens; identical to SEQ ID NO: 23672
  chr17:49015437-49015468
  hypo

SEQ ID NO: 53746 - DNA, 31 bp, Homo sapiens; identical to SEQ ID NO: 6021
  chr17:49027999-49028030
  hypo

SEQ ID NO: 53747 - DNA, 31 bp, Homo sapiens; identical to SEQ ID NO: 6022
  chr17:49028084-49028115
  hypo

SEQ ID NO: 53748 - DNA, 31 bp, Homo sapiens; identical to SEQ ID NO: 23675
  chr17:49200570-49200601
  hypo

SEQ ID NO: 53749 - DNA, 24 bp, Homo sapiens
  chr17:49229458-49229482
  hypo
gcgggaagctgagtcacgagaatc

SEQ ID NO: 53750 - DNA, 2 bp, Homo sapiens
  chr17:53479135-53479137
  hypo
ag

SEQ ID NO: 53751 - DNA, 31 bp, Homo sapiens; identical to SEQ ID NO: 23687
  chr17:55664888-55664919
  hypo

SEQ ID NO: 53752 - DNA, 31 bp, Homo sapiens; identical to SEQ ID NO: 23688
  chr17:55931430-55931461
  hypo

SEQ ID NO: 53753 - DNA, 31 bp, Homo sapiens; identical to SEQ ID NO: 23689
  chr17:55962007-55962038
  hypo

SEQ ID NO: 53754 - DNA, 31 bp, Homo sapiens; identical to SEQ ID NO: 23690
  chr17:55965542-55965573
  hypo

SEQ ID NO: 53755 - DNA, 31 bp, Homo sapiens; identical to SEQ ID NO: 23692
  chr17:56020028-56020059
  hypo

SEQ ID NO: 53756 - DNA, 153 bp, Homo sapiens; identical to SEQ ID NO: 6030
  chr17:56032159-56032312
  hypo

SEQ ID NO: 53757 - DNA, 63 bp, Homo sapiens; identical to SEQ ID NO: 6031
  chr17:56032482-56032545
  hypo

SEQ ID NO: 53758 - DNA, 31 bp, Homo sapiens; identical to SEQ ID NO: 23695
  chr17:56037719-56037750
  hypo

SEQ ID NO: 53759 - DNA, 87 bp, Homo sapiens; identical to SEQ ID NO: 6034
  chr17:56296472-56296559
  hypo

SEQ ID NO: 53760 - DNA, 34 bp, Homo sapiens; identical to SEQ ID NO: 6035
  chr17:56296611-56296645
  hypo

SEQ ID NO: 53761 - DNA, 31 bp, Homo sapiens; identical to SEQ ID NO: 23698
  chr17:56388456-56388487
  hypo

SEQ ID NO: 53762 - DNA, 31 bp, Homo sapiens; identical to SEQ ID NO: 23699
  chr17:56389452-56389483
  hypo

SEQ ID NO: 53763 - DNA, 40 bp, Homo sapiens; identical to SEQ ID NO: 23700
  chr17:56389490-56389530
  hypo

SEQ ID NO: 53764 - DNA, 31 bp, Homo sapiens; identical to SEQ ID NO: 6036
  chr17:56401799-56401830
  hypo

SEQ ID NO: 53765 - DNA, 41 bp, Homo sapiens; identical to SEQ ID NO: 6037
  chr17:56402169-56402210
  hypo

SEQ ID NO: 53766 - DNA, 93 bp, Homo sapiens; identical to SEQ ID NO: 6038
  chr17:56402236-56402329
  hypo

SEQ ID NO: 53767 - DNA, 31 bp, Homo sapiens; identical to SEQ ID NO: 23713
  chr17:57297160-57297191
  hypo

SEQ ID NO: 53768 - DNA, 31 bp, Homo sapiens; identical to SEQ ID NO: 23714
  chr17:57398859-57398890
  hypo

SEQ ID NO: 53769 - DNA, 40 bp, Homo sapiens; identical to SEQ ID NO: 23717
  chr17:57476110-57476150
  hypo

SEQ ID NO: 53770 - DNA, 31 bp, Homo sapiens; identical to SEQ ID NO: 23718
  chr17:57476228-57476259
  hypo

SEQ ID NO: 53771 - DNA, 31 bp, Homo sapiens; identical to SEQ ID NO: 23719
  chr17:57476260-57476291
  hypo

SEQ ID NO: 53772 - DNA, 31 bp, Homo sapiens; identical to SEQ ID NO: 23720
  chr17:57761794-57761825
  hypo

SEQ ID NO: 53773 - DNA, 10 bp, Homo sapiens
  chr17:57787535-57787545
  hypo
agacagagcc

SEQ ID NO: 53774 - DNA, 26 bp, Homo sapiens
  chr17:57879948-57879974
  hypo
tttcatttttttatgtcgcccaggct

SEQ ID NO: 53775 - DNA, 31 bp, Homo sapiens; identical to SEQ ID NO: 23723
  chr17:58134321-58134352
  hypo

SEQ ID NO: 53776 - DNA, 42 bp, Homo sapiens; identical to SEQ ID NO: 23724
  chr17:59395454-59395496
  hypo

SEQ ID NO: 53777 - DNA, 96 bp, Homo sapiens; identical to SEQ ID NO: 23725
  chr17:59434279-59434375
  hypo

SEQ ID NO: 53778 - DNA, 31 bp, Homo sapiens; identical to SEQ ID NO: 23726
  chr17:59434411-59434442
  hypo

SEQ ID NO: 53779 - DNA, 31 bp, Homo sapiens; identical to SEQ ID NO: 23727
  chr17:59445736-59445767
  hypo

SEQ ID NO: 53780 - DNA, 31 bp, Homo sapiens; identical to SEQ ID NO: 23729
  chr17:59570612-59570643
  hypo

SEQ ID NO: 53781 - DNA, 32 bp, Homo sapiens; identical to SEQ ID NO: 23730
  chr17:60006123-60006155
  hypo

SEQ ID NO: 53782 - DNA, 33 bp, Homo sapiens; identical to SEQ ID NO: 23731
  chr17:60084914-60084947
  hypo

SEQ ID NO: 53783 - DNA, 31 bp, Homo sapiens; identical to SEQ ID NO: 23734
  chr17:60517103-60517134
  hypo

SEQ ID NO: 53784 - DNA, 31 bp, Homo sapiens; identical to SEQ ID NO: 23736
  chr17:60750843-60750874
  hypo

SEQ ID NO: 53785 - DNA, 31 bp, Homo sapiens; identical to SEQ ID NO: 23737
  chr17:60754816-60754847
  hypo

SEQ ID NO: 53786 - DNA, 44 bp, Homo sapiens; identical to SEQ ID NO: 6053
  chr17:60781449-60781493
  hypo

SEQ ID NO: 53787 - DNA, 62 bp, Homo sapiens; identical to SEQ ID NO: 6054
  chr17:60781523-60781585
  hypo

SEQ ID NO: 53788 - DNA, 31 bp, Homo sapiens; identical to SEQ ID NO: 23740
  chr17:60793412-60793443
  hypo

SEQ ID NO: 53789 - DNA, 56 bp, Homo sapiens; identical to SEQ ID NO: 23741
  chr17:60793465-60793521
  hypo

SEQ ID NO: 53790 - DNA, 31 bp, Homo sapiens; identical to SEQ ID NO: 23742
  chr17:60793547-60793578
  hypo

SEQ ID NO: 53791 - DNA, 83 bp, Homo sapiens; identical to SEQ ID NO: 23743
  chr17:61527569-61527652
  hypo

SEQ ID NO: 53792 - DNA, 31 bp, Homo sapiens; identical to SEQ ID NO: 23744
  chr17:61527715-61527746
  hypo

SEQ ID NO: 53793 - DNA, 31 bp, Homo sapiens; identical to SEQ ID NO: 23745
  chr17:61527749-61527780
  hypo

SEQ ID NO: 53794 - DNA, 31 bp, Homo sapiens; identical to SEQ ID NO: 23746
  chr17:61529704-61529735
  hypo

SEQ ID NO: 53795 - DNA, 18 bp, Homo sapiens
  chr17:61677496-61677514
  hypo
tgggattacaggcgtgag

SEQ ID NO: 53796 - DNA, 31 bp, Homo sapiens; identical to SEQ ID NO: 23748
  chr17:61700817-61700848
  hypo

SEQ ID NO: 53797 - DNA, 31 bp, Homo sapiens; identical to SEQ ID NO: 23752
  chr17:61780924-61780955
  hypo

SEQ ID NO: 53798 - DNA, 31 bp, Homo sapiens; identical to SEQ ID NO: 23753
  chr17:61864839-61864870
  hypo

SEQ ID NO: 53799 - DNA, 33 bp, Homo sapiens; identical to SEQ ID NO: 23754
  chr17:61864894-61864927
  hypo

SEQ ID NO: 53800 - DNA, 31 bp, Homo sapiens; identical to SEQ ID NO: 23755
  chr17:61908469-61908500
  hypo

SEQ ID NO: 53801 - DNA, 31 bp, Homo sapiens; identical to SEQ ID NO: 6063
  chr17:61921252-61921283
  hypo

SEQ ID NO: 53802 - DNA, 56 bp, Homo sapiens; identical to SEQ ID NO: 23758
  chr17:62782503-62782559
  hypo

SEQ ID NO: 53803 - DNA, 18 bp, Homo sapiens
  chr17:62782737-62782755
  hypo
ctggcagatgaagctgcg

SEQ ID NO: 53804 - DNA, 38 bp, Homo sapiens; identical to SEQ ID NO: 23760
  chr17:62831162-62831200
  hypo

SEQ ID NO: 53805 - DNA, 31 bp, Homo sapiens; identical to SEQ ID NO: 6064
  chr17:63555851-63555882
  hypo

SEQ ID NO: 53806 - DNA, 65 bp, Homo sapiens; identical to SEQ ID NO: 6065
  chr17:63555886-63555951
  hypo

SEQ ID NO: 53807 - DNA, 85 bp, Homo sapiens; identical to SEQ ID NO: 6066
  chr17:63556317-63556402
  hypo

SEQ ID NO: 53808 - DNA, 152 bp, Homo sapiens; identical to SEQ ID NO: 6068
  chr17:63556784-63556936
  hypo

SEQ ID NO: 53809 - DNA, 36 bp, Homo sapiens; identical to SEQ ID NO: 6069
  chr17:63556996-63557032
  hypo

SEQ ID NO: 53810 - DNA, 51 bp, Homo sapiens; identical to SEQ ID NO: 6070
  chr17:63557343-63557394
  hypo

SEQ ID NO: 53811 - DNA, 31 bp, Homo sapiens; identical to SEQ ID NO: 6071
  chr17:63557793-63557824
  hypo

SEQ ID NO: 53812 - DNA, 31 bp, Homo sapiens; identical to SEQ ID NO: 6072
  chr17:64298538-64298569
  hypo

SEQ ID NO: 53813 - DNA, 44 bp, Homo sapiens; identical to SEQ ID NO: 23771
  chr17:64751376-64751420
  hypo

SEQ ID NO: 53814 - DNA, 31 bp, Homo sapiens; identical to SEQ ID NO: 23772
  chr17:64935531-64935562
  hypo

SEQ ID NO: 53815 - DNA, 31 bp, Homo sapiens; identical to SEQ ID NO: 23773
  chr17:65027609-65027640
  hypo

SEQ ID NO: 53816 - DNA, 39 bp, Homo sapiens; identical to SEQ ID NO: 23774
  chr17:65027713-65027752
  hypo

SEQ ID NO: 53817 - DNA, 57 bp, Homo sapiens; identical to SEQ ID NO: 6073
  chr17:65242141-65242198
  hypo

SEQ ID NO: 53818 - DNA, 31 bp, Homo sapiens; identical to SEQ ID NO: 23777
  chr17:65297603-65297634
  hypo

SEQ ID NO: 53819 - DNA, 2 bp, Homo sapiens
  chr17:65363296-65363298
  hypo
tc

SEQ ID NO: 53820 - DNA, 31 bp, Homo sapiens; identical to SEQ ID NO: 23780
  chr17:65593931-65593962
  hypo

SEQ ID NO: 53821 - DNA, 39 bp, Homo sapiens; identical to SEQ ID NO: 23781
  chr17:66420528-66420567
  hypo

SEQ ID NO: 53822 - DNA, 2 bp, Homo sapiens
  chr17:66434323-66434325
  hypo
tt

SEQ ID NO: 53823 - DNA, 31 bp, Homo sapiens; identical to SEQ ID NO: 6075
  chr17:66434432-66434463
  hypo

SEQ ID NO: 53824 - DNA, 31 bp, Homo sapiens; identical to SEQ ID NO: 23784
  chr17:66440109-66440140
  hypo

SEQ ID NO: 53825 - DNA, 45 bp, Homo sapiens; identical to SEQ ID NO: 23787
  chr17:67468375-67468420
  hypo

SEQ ID NO: 53826 - DNA, 31 bp, Homo sapiens; identical to SEQ ID NO: 23788
  chr17:67468445-67468476
  hypo

SEQ ID NO: 53827 - DNA, 48 bp, Homo sapiens; identical to SEQ ID NO: 23789
  chr17:67468537-67468585
  hypo

SEQ ID NO: 53828 - DNA, 43 bp, Homo sapiens; identical to SEQ ID NO: 23790
  chr17:70380790-70380833
  hypo

SEQ ID NO: 53829 - DNA, 31 bp, Homo sapiens; identical to SEQ ID NO: 23791
  chr17:70657361-70657392
  hypo

SEQ ID NO: 53830 - DNA, 31 bp, Homo sapiens; identical to SEQ ID NO: 23792
  chr17:70657400-70657431
  hypo

SEQ ID NO: 53831 - DNA, 40 bp, Homo sapiens; identical to SEQ ID NO: 23793
  chr17:70657439-70657479
  hypo

SEQ ID NO: 53832 - DNA, 2 bp, Homo sapiens
  chr17:70657502-70657504
  hypo
tc

SEQ ID NO: 53833 - DNA, 31 bp, Homo sapiens; identical to SEQ ID NO: 23795
  chr17:70680596-70680627
  hypo

SEQ ID NO: 53834 - DNA, 2 bp, Homo sapiens
  chr17:71161117-71161119
  hypo
aa

SEQ ID NO: 53835 - DNA, 2 bp, Homo sapiens
  chr17:71201619-71201621
  hypo
tt

SEQ ID NO: 53836 - DNA, 58 bp, Homo sapiens; identical to SEQ ID NO: 23799
  chr17:71201705-71201763
  hypo

SEQ ID NO: 53837 - DNA, 31 bp, Homo sapiens; identical to SEQ ID NO: 23800
  chr17:71201767-71201798
  hypo

SEQ ID NO: 53838 - DNA, 39 bp, Homo sapiens; identical to SEQ ID NO: 23801
  chr17:71202330-71202369
  hypo

SEQ ID NO: 53839 - DNA, 31 bp, Homo sapiens; identical to SEQ ID NO: 23802
  chr17:71202510-71202541
  hypo

SEQ ID NO: 53840 - DNA, 31 bp, Homo sapiens; identical to SEQ ID NO: 23803
  chr17:71271188-71271219
  hypo

SEQ ID NO: 53841 - DNA, 31 bp, Homo sapiens; identical to SEQ ID NO: 23804
  chr17:71272580-71272611
  hypo

SEQ ID NO: 53842 - DNA, 31 bp, Homo sapiens; identical to SEQ ID NO: 23805
  chr17:71280548-71280579
  hypo

SEQ ID NO: 53843 - DNA, 314 bp, Homo sapiens; identical to SEQ ID NO: 6086
  chr17:71306966-71307280
  hypo

SEQ ID NO: 53844 - DNA, 55 bp, Homo sapiens; identical to SEQ ID NO: 6087
  chr17:71307339-71307394
  hypo

SEQ ID NO: 53845 - DNA, 31 bp, Homo sapiens; identical to SEQ ID NO: 6088
  chr17:71307397-71307428
  hypo

SEQ ID NO: 53846 - DNA, 212 bp, Homo sapiens; identical to SEQ ID NO: 6089
  chr17:71307437-71307649
  hypo

SEQ ID NO: 53847 - DNA, 189 bp, Homo sapiens; identical to SEQ ID NO: 6091
  chr17:71307781-71307970
  hypo

SEQ ID NO: 53848 - DNA, 38 bp, Homo sapiens; identical to SEQ ID NO: 6092
  chr17:71307971-71308009
  hypo

SEQ ID NO: 53849 - DNA, 76 bp, Homo sapiens; identical to SEQ ID NO: 6093
  chr17:71308017-71308093
  hypo

SEQ ID NO: 53850 - DNA, 51 bp, Homo sapiens; identical to SEQ ID NO: 23813
  chr17:71325319-71325370
  hypo

SEQ ID NO: 53851 - DNA, 31 bp, Homo sapiens; identical to SEQ ID NO: 23814
  chr17:71326304-71326335
  hypo

SEQ ID NO: 53852 - DNA, 40 bp, Homo sapiens; identical to SEQ ID NO: 23815
  chr17:71326403-71326443
  hypo

SEQ ID NO: 53853 - DNA, 31 bp, Homo sapiens; identical to SEQ ID NO: 23816
  chr17:71328372-71328403
  hypo

SEQ ID NO: 53854 - DNA, 31 bp, Homo sapiens; identical to SEQ ID NO: 23817
  chr17:71345760-71345791
  hypo

SEQ ID NO: 53855 - DNA, 58 bp, Homo sapiens; identical to SEQ ID NO: 23818
  chr17:71345902-71345960
  hypo

SEQ ID NO: 53856 - DNA, 31 bp, Homo sapiens; identical to SEQ ID NO: 23819
  chr17:71351037-71351068
  hypo

SEQ ID NO: 53857 - DNA, 38 bp, Homo sapiens; identical to SEQ ID NO: 23820
  chr17:71354306-71354344
  hypo

SEQ ID NO: 53858 - DNA, 37 bp, Homo sapiens; identical to SEQ ID NO: 23821
  chr17:71364485-71364522
  hypo

SEQ ID NO: 53859 - DNA, 59 bp, Homo sapiens; identical to SEQ ID NO: 23822
  chr17:71364564-71364623
  hypo

SEQ ID NO: 53860 - DNA, 31 bp, Homo sapiens; identical to SEQ ID NO: 23823
  chr17:71410786-71410817
  hypo

SEQ ID NO: 53861 - DNA, 35 bp, Homo sapiens; identical to SEQ ID NO: 23824
  chr17:72243966-72244001
  hypo

SEQ ID NO: 53862 - DNA, 177 bp, Homo sapiens; identical to SEQ ID NO: 6104
  chr17:72449938-72450115
  hypo

SEQ ID NO: 53863 - DNA, 106 bp, Homo sapiens; identical to SEQ ID NO: 6105
  chr17:72450206-72450312
  hypo

SEQ ID NO: 53864 - DNA, 154 bp, Homo sapiens; identical to SEQ ID NO: 6107
  chr17:72450353-72450507
  hypo

SEQ ID NO: 53865 - DNA, 43 bp, Homo sapiens; identical to SEQ ID NO: 6111
  chr17:72983605-72983648
  hypo

SEQ ID NO: 53866 - DNA, 37 bp, Homo sapiens; identical to SEQ ID NO: 6112
  chr17:72983650-72983687
  hypo

SEQ ID NO: 53867 - DNA, 76 bp, Homo sapiens; identical to SEQ ID NO: 6113
  chr17:72983764-72983840
  hypo

SEQ ID NO: 53868 - DNA, 63 bp, Homo sapiens; identical to SEQ ID NO: 6114
  chr17:72983858-72983921
  hypo

SEQ ID NO: 53869 - DNA, 417 bp, Homo sapiens; identical to SEQ ID NO: 6115
  chr17:72983946-72984363
  hypo

SEQ ID NO: 53870 - DNA, 2 bp, Homo sapiens
  chr17:73031636-73031638
  hypo
cg

SEQ ID NO: 53871 - DNA, 35 bp, Homo sapiens; identical to SEQ ID NO: 23836
  chr17:73067478-73067513
  hypo

SEQ ID NO: 53872 - DNA, 31 bp, Homo sapiens; identical to SEQ ID NO: 23838
  chr17:73095844-73095875
  hypo

SEQ ID NO: 53873 - DNA, 31 bp, Homo sapiens; identical to SEQ ID NO: 23839
  chr17:73096893-73096924
  hypo

SEQ ID NO: 53874 - DNA, 31 bp, Homo sapiens; identical to SEQ ID NO: 23840
  chr17:73101011-73101042
  hypo

SEQ ID NO: 53875 - DNA, 51 bp, Homo sapiens; identical to SEQ ID NO: 23843
  chr17:73209660-73209711
  hypo

SEQ ID NO: 53876 - DNA, 31 bp, Homo sapiens; identical to SEQ ID NO: 23844
  chr17:73209767-73209798
  hypo

SEQ ID NO: 53877 - DNA, 2 bp, Homo sapiens
  chr17:73236200-73236202
  hypo
ag

SEQ ID NO: 53878 - DNA, 34 bp, Homo sapiens
  chr17:73236302-73236336
  hypo
ttccccgctgcagctggcacgctctggagggaag

SEQ ID NO: 53879 - DNA, 31 bp, Homo sapiens; identical to SEQ ID NO: 23847
  chr17:73236349-73236380
  hypo

SEQ ID NO: 53880 - DNA, 31 bp, Homo sapiens; identical to SEQ ID NO: 23848
  chr17:73236389-73236420
  hypo

SEQ ID NO: 53881 - DNA, 31 bp, Homo sapiens; identical to SEQ ID NO: 23849
  chr17:73241506-73241537
  hypo

SEQ ID NO: 53882 - DNA, 62 bp, Homo sapiens; identical to SEQ ID NO: 23850
  chr17:73241588-73241650
  hypo

SEQ ID NO: 53883 - DNA, 41 bp, Homo sapiens; identical to SEQ ID NO: 23851
  chr17:73311871-73311912
  hypo

SEQ ID NO: 53884 - DNA, 31 bp, Homo sapiens; identical to SEQ ID NO: 6117
  chr17:73422367-73422398
  hypo

SEQ ID NO: 53885 - DNA, 31 bp, Homo sapiens; identical to SEQ ID NO: 6118
  chr17:73422420-73422451
  hypo

SEQ ID NO: 53886 - DNA, 171 bp, Homo sapiens; identical to SEQ ID NO: 6119
  chr17:73511276-73511447
  hypo

SEQ ID NO: 53887 - DNA, 23 bp, Homo sapiens
  chr17:73546299-73546322
  hypo
gtgcagccgcgattcagggttgc

SEQ ID NO: 53888 - DNA, 51 bp, Homo sapiens; identical to SEQ ID NO: 23859
  chr17:73569824-73569875
  hypo

SEQ ID NO: 53889 - DNA, 31 bp, Homo sapiens; identical to SEQ ID NO: 23860
  chr17:73581211-73581242
  hypo

SEQ ID NO: 53890 - DNA, 50 bp, Homo sapiens; identical to SEQ ID NO: 39538
  chr17:73585893-73585943
  hypo

SEQ ID NO: 53891 - DNA, 31 bp, Homo sapiens; identical to SEQ ID NO: 23866
  chr17:73596005-73596036
  hypo

SEQ ID NO: 53892 - DNA, 31 bp, Homo sapiens; identical to SEQ ID NO: 23867
  chr17:73611622-73611653
  hypo

SEQ ID NO: 53893 - DNA, 47 bp, Homo sapiens; identical to SEQ ID NO: 23868
  chr17:73611654-73611701
  hypo

SEQ ID NO: 53894 - DNA, 44 bp, Homo sapiens; identical to SEQ ID NO: 23873
  chr17:73638312-73638356
  hypo

SEQ ID NO: 53895 - DNA, 2 bp, Homo sapiens
  chr17:73638387-73638389
  hypo
cc

SEQ ID NO: 53896 - DNA, 31 bp, Homo sapiens; identical to SEQ ID NO: 23875
  chr17:73692187-73692218
  hypo

SEQ ID NO: 53897 - DNA, 31 bp, Homo sapiens; identical to SEQ ID NO: 23876
  chr17:73692240-73692271
  hypo

SEQ ID NO: 53898 - DNA, 2 bp, Homo sapiens
  chr17:73693130-73693132
  hypo
ac

SEQ ID NO: 53899 - DNA, 36 bp, Homo sapiens; identical to SEQ ID NO: 23878
  chr17:73736027-73736063
  hypo

SEQ ID NO: 53900 - DNA, 31 bp, Homo sapiens; identical to SEQ ID NO: 23879
  chr17:73800549-73800580
  hypo

SEQ ID NO: 53901 - DNA, 49 bp, Homo sapiens; identical to SEQ ID NO: 23880
  chr17:73808745-73808794
  hypo

SEQ ID NO: 53902 - DNA, 33 bp, Homo sapiens
  chr17:73811152-73811185
  hypo
gagatgactaagccagcgcactcatgctggagg

SEQ ID NO: 53903 - DNA, 45 bp, Homo sapiens; identical to SEQ ID NO: 23882
  chr17:73822057-73822102
  hypo

SEQ ID NO: 53904 - DNA, 46 bp, Homo sapiens; identical to SEQ ID NO: 6125
  chr17:73874666-73874712
  hypo

SEQ ID NO: 53905 - DNA, 31 bp, Homo sapiens; identical to SEQ ID NO: 23884
  chr17:73921368-73921399
  hypo

SEQ ID NO: 53906 - DNA, 31 bp, Homo sapiens; identical to SEQ ID NO: 23886
  chr17:74008700-74008731
  hypo

SEQ ID NO: 53907 - DNA, 31 bp, Homo sapiens; identical to SEQ ID NO: 23887
  chr17:74008772-74008803
  hypo

SEQ ID NO: 53908 - DNA, 31 bp, Homo sapiens; identical to SEQ ID NO: 23888
  chr17:74013673-74013704
  hypo

SEQ ID NO: 53909 - DNA, 31 bp, Homo sapiens; identical to SEQ ID NO: 23889
  chr17:74013713-74013744
  hypo

SEQ ID NO: 53910 - DNA, 92 bp, Homo sapiens; identical to SEQ ID NO: 23890
  chr17:74013758-74013850
  hypo

SEQ ID NO: 53911 - DNA, 81 bp, Homo sapiens; identical to SEQ ID NO: 23891
  chr17:74019374-74019455
  hypo

SEQ ID NO: 53912 - DNA, 31 bp, Homo sapiens; identical to SEQ ID NO: 23892
  chr17:74019499-74019530
  hypo

SEQ ID NO: 53913 - DNA, 2 bp, Homo sapiens
  chr17:74028303-74028305
  hypo
ga

SEQ ID NO: 53914 - DNA, 31 bp, Homo sapiens; identical to SEQ ID NO: 23895
  chr17:74028504-74028535
  hypo

SEQ ID NO: 53915 - DNA, 31 bp, Homo sapiens; identical to SEQ ID NO: 23896
  chr17:74042047-74042078
  hypo

SEQ ID NO: 53916 - DNA, 31 bp, Homo sapiens; identical to SEQ ID NO: 23897
  chr17:74042085-74042116
  hypo

SEQ ID NO: 53917 - DNA, 58 bp, Homo sapiens; identical to SEQ ID NO: 23898
  chr17:74042124-74042182
  hypo

SEQ ID NO: 53918 - DNA, 42 bp, Homo sapiens; identical to SEQ ID NO: 23899
  chr17:74042220-74042262
  hypo

SEQ ID NO: 53919 - DNA, 2 bp, Homo sapiens
  chr17:74047796-74047798
  hypo
tt

SEQ ID NO: 53920 - DNA, 36 bp, Homo sapiens; identical to SEQ ID NO: 23903
  chr17:74050641-74050677
  hypo

SEQ ID NO: 53921 - DNA, 64 bp, Homo sapiens; identical to SEQ ID NO: 23904
  chr17:74275120-74275184
  hypo

SEQ ID NO: 53922 - DNA, 31 bp, Homo sapiens; identical to SEQ ID NO: 23905
  chr17:74303839-74303870
  hypo

SEQ ID NO: 53923 - DNA, 2 bp, Homo sapiens
  chr17:74390362-74390364
  hypo
ag

SEQ ID NO: 53924 - DNA, 17 bp, Homo sapiens
  chr17:74390459-74390476
  hypo
agcgctgcctcagtaaa

SEQ ID NO: 53925 - DNA, 31 bp, Homo sapiens; identical to SEQ ID NO: 23907
  chr17:74392166-74392197
  hypo

SEQ ID NO: 53926 - DNA, 40 bp, Homo sapiens; identical to SEQ ID NO: 23908
  chr17:74397332-74397372
  hypo

SEQ ID NO: 53927 - DNA, 31 bp, Homo sapiens; identical to SEQ ID NO: 23909
  chr17:74412535-74412566
  hypo

SEQ ID NO: 53928 - DNA, 47 bp, Homo sapiens; identical to SEQ ID NO: 23910
  chr17:74435186-74435233
  hypo

SEQ ID NO: 53929 - DNA, 31 bp, Homo sapiens; identical to SEQ ID NO: 23911
  chr17:74516485-74516516
  hypo

SEQ ID NO: 53930 - DNA, 31 bp, Homo sapiens; identical to SEQ ID NO: 23912
  chr17:74527623-74527654
  hypo

SEQ ID NO: 53931 - DNA, 41 bp, Homo sapiens; identical to SEQ ID NO: 23913
  chr17:74529367-74529408
  hypo

SEQ ID NO: 53932 - DNA, 39 bp, Homo sapiens; identical to SEQ ID NO: 23915
  chr17:74531808-74531847
  hypo

SEQ ID NO: 53933 - DNA, 55 bp, Homo sapiens; identical to SEQ ID NO: 23916
  chr17:74531888-74531943
  hypo

SEQ ID NO: 53934 - DNA, 31 bp, Homo sapiens; identical to SEQ ID NO: 23917
  chr17:74531972-74532003
  hypo

SEQ ID NO: 53935 - DNA, 69 bp, Homo sapiens; identical to SEQ ID NO: 23918
  chr17:74533184-74533253
  hypo

SEQ ID NO: 53936 - DNA, 49 bp, Homo sapiens; identical to SEQ ID NO: 23920
  chr17:74551831-74551880
  hypo

SEQ ID NO: 53937 - DNA, 31 bp, Homo sapiens; identical to SEQ ID NO: 23921
  chr17:74623751-74623782
  hypo

SEQ ID NO: 53938 - DNA, 149 bp, Homo sapiens; identical to SEQ ID NO: 23922
  chr17:74625058-74625207
  hypo

SEQ ID NO: 53939 - DNA, 31 bp, Homo sapiens; identical to SEQ ID NO: 23923
  chr17:74629628-74629659
  hypo

SEQ ID NO: 53940 - DNA, 51 bp, Homo sapiens; identical to SEQ ID NO: 23924
  chr17:74629738-74629789
  hypo

SEQ ID NO: 53941 - DNA, 31 bp, Homo sapiens; identical to SEQ ID NO: 23925
  chr17:74645178-74645209
  hypo

SEQ ID NO: 53942 - DNA, 31 bp, Homo sapiens; identical to SEQ ID NO: 23926
  chr17:74920518-74920549
  hypo

SEQ ID NO: 53943 - DNA, 31 bp, Homo sapiens; identical to SEQ ID NO: 23927
  chr17:75132864-75132895
  hypo

SEQ ID NO: 53944 - DNA, 31 bp, Homo sapiens; identical to SEQ ID NO: 23928
  chr17:75207701-75207732
  hypo

SEQ ID NO: 53945 - DNA, 31 bp, Homo sapiens; identical to SEQ ID NO: 23930
  chr17:75208211-75208242
  hypo

SEQ ID NO: 53946 - DNA, 31 bp, Homo sapiens; identical to SEQ ID NO: 23931
  chr17:75209401-75209432
  hypo

SEQ ID NO: 53947 - DNA, 54 bp, Homo sapiens; identical to SEQ ID NO: 23932
  chr17:75209443-75209497
  hypo

SEQ ID NO: 53948 - DNA, 65 bp, Homo sapiens; identical to SEQ ID NO: 23934
  chr17:75306481-75306546
  hypo

SEQ ID NO: 53949 - DNA, 31 bp, Homo sapiens; identical to SEQ ID NO: 23935
  chr17:75306547-75306578
  hypo

SEQ ID NO: 53950 - DNA, 58 bp, Homo sapiens; identical to SEQ ID NO: 23936
  chr17:75306582-75306640
  hypo

SEQ ID NO: 53951 - DNA, 31 bp, Homo sapiens; identical to SEQ ID NO: 23937
  chr17:75354843-75354874
  hypo

SEQ ID NO: 53952 - DNA, 83 bp, Homo sapiens; identical to SEQ ID NO: 23938
  chr17:75354962-75355045
  hypo

SEQ ID NO: 53953 - DNA, 31 bp, Homo sapiens; identical to SEQ ID NO: 6136
  chr17:75392295-75392326
  hypo

SEQ ID NO: 53954 - DNA, 42 bp, Homo sapiens; identical to SEQ ID NO: 23942
  chr17:75398355-75398397
  hypo

SEQ ID NO: 53955 - DNA, 36 bp, Homo sapiens; identical to SEQ ID NO: 23943
  chr17:75398427-75398463
  hypo

SEQ ID NO: 53956 - DNA, 93 bp, Homo sapiens; identical to SEQ ID NO: 23944
  chr17:75398472-75398565
  hypo

SEQ ID NO: 53957 - DNA, 31 bp, Homo sapiens; identical to SEQ ID NO: 23945
  chr17:75398566-75398597
  hypo

SEQ ID NO: 53958 - DNA, 31 bp, Homo sapiens; identical to SEQ ID NO: 23946
  chr17:75438182-75438213
  hypo

SEQ ID NO: 53959 - DNA, 31 bp, Homo sapiens; identical to SEQ ID NO: 23947
  chr17:75452753-75452784
  hypo

SEQ ID NO: 53960 - DNA, 31 bp, Homo sapiens; identical to SEQ ID NO: 23948
  chr17:75452870-75452901
  hypo

SEQ ID NO: 53961 - DNA, 31 bp, Homo sapiens; identical to SEQ ID NO: 23949
  chr17:75477290-75477321
  hypo

SEQ ID NO: 53962 - DNA, 31 bp, Homo sapiens; identical to SEQ ID NO: 23950
  chr17:75875368-75875399
  hypo

SEQ ID NO: 53963 - DNA, 31 bp, Homo sapiens; identical to SEQ ID NO: 23951
  chr17:75875422-75875453
  hypo

SEQ ID NO: 53964 - DNA, 39 bp, Homo sapiens; identical to SEQ ID NO: 23952
  chr17:75875465-75875504
  hypo

SEQ ID NO: 53965 - DNA, 31 bp, Homo sapiens; identical to SEQ ID NO: 23953
  chr17:75875520-75875551
  hypo

SEQ ID NO: 53966 - DNA, 49 bp, Homo sapiens; identical to SEQ ID NO: 23954
  chr17:76046727-76046776
  hypo

SEQ ID NO: 53967 - DNA, 31 bp, Homo sapiens; identical to SEQ ID NO: 23955
  chr17:76076543-76076574
  hypo

SEQ ID NO: 53968 - DNA, 31 bp, Homo sapiens; identical to SEQ ID NO: 23957
  chr17:76093764-76093795
  hypo

SEQ ID NO: 53969 - DNA, 2 bp, Homo sapiens
  chr17:76101036-76101038
  hypo
tg

SEQ ID NO: 53970 - DNA, 54 bp, Homo sapiens; identical to SEQ ID NO: 23959
  chr17:76104280-76104334
  hypo

SEQ ID NO: 53971 - DNA, 31 bp, Homo sapiens; identical to SEQ ID NO: 23960
  chr17:76109601-76109632
  hypo

SEQ ID NO: 53972 - DNA, 31 bp, Homo sapiens; identical to SEQ ID NO: 23961
  chr17:76114989-76115020
  hypo

SEQ ID NO: 53973 - DNA, 44 bp, Homo sapiens; identical to SEQ ID NO: 23962
  chr17:76115079-76115123
  hypo

SEQ ID NO: 53974 - DNA, 34 bp, Homo sapiens; identical to SEQ ID NO: 23963
  chr17:76129455-76129489
  hypo

SEQ ID NO: 53975 - DNA, 99 bp, Homo sapiens; identical to SEQ ID NO: 23964
  chr17:76129496-76129595
  hypo

SEQ ID NO: 53976 - DNA, 43 bp, Homo sapiens; identical to SEQ ID NO: 23965
  chr17:76129602-76129645
  hypo

SEQ ID NO: 53977 - DNA, 31 bp, Homo sapiens; identical to SEQ ID NO: 23966
  chr17:76132636-76132667
  hypo

SEQ ID NO: 53978 - DNA, 52 bp, Homo sapiens; identical to SEQ ID NO: 23967
  chr17:76132685-76132737
  hypo

SEQ ID NO: 53979 - DNA, 31 bp, Homo sapiens; identical to SEQ ID NO: 23968
  chr17:76132748-76132779
  hypo

SEQ ID NO: 53980 - DNA, 47 bp, Homo sapiens; identical to SEQ ID NO: 23974
  chr17:76145562-76145609
  hypo

SEQ ID NO: 53981 - DNA, 89 bp, Homo sapiens; identical to SEQ ID NO: 23976
  chr17:76152519-76152608
  hypo

SEQ ID NO: 53982 - DNA, 31 bp, Homo sapiens; identical to SEQ ID NO: 23977
  chr17:76152623-76152654
  hypo

SEQ ID NO: 53983 - DNA, 56 bp, Homo sapiens; identical to SEQ ID NO: 23978
  chr17:76153509-76153565
  hypo

SEQ ID NO: 53984 - DNA, 31 bp, Homo sapiens; identical to SEQ ID NO: 23979
  chr17:76167731-76167762
  hypo

SEQ ID NO: 53985 - DNA, 2 bp, Homo sapiens
  chr17:76187506-76187508
  hypo
ta

SEQ ID NO: 53986 - DNA, 31 bp, Homo sapiens; identical to SEQ ID NO: 23982
  chr17:76204092-76204123
  hypo

SEQ ID NO: 53987 - DNA, 90 bp, Homo sapiens; identical to SEQ ID NO: 23983
  chr17:76232493-76232583
  hypo

SEQ ID NO: 53988 - DNA, 31 bp, Homo sapiens; identical to SEQ ID NO: 23984
  chr17:76232605-76232636
  hypo

SEQ ID NO: 53989 - DNA, 31 bp, Homo sapiens; identical to SEQ ID NO: 23985
  chr17:76232658-76232689
  hypo

SEQ ID NO: 53990 - DNA, 31 bp, Homo sapiens; identical to SEQ ID NO: 23986
  chr17:76260378-76260409
  hypo

SEQ ID NO: 53991 - DNA, 41 bp, Homo sapiens; identical to SEQ ID NO: 23987
  chr17:76275113-76275154
  hypo

SEQ ID NO: 53992 - DNA, 74 bp, Homo sapiens; identical to SEQ ID NO: 6137
  chr17:76349230-76349304
  hypo

SEQ ID NO: 53993 - DNA, 31 bp, Homo sapiens; identical to SEQ ID NO: 23989
  chr17:76364857-76364888
  hypo

SEQ ID NO: 53994 - DNA, 2 bp, Homo sapiens
  chr17:76395587-76395589
  hypo
ac

SEQ ID NO: 53995 - DNA, 36 bp, Homo sapiens; identical to SEQ ID NO: 23993
  chr17:76396876-76396912
  hypo

SEQ ID NO: 53996 - DNA, 2 bp, Homo sapiens
  chr17:76404758-76404760
  hypo
ga

SEQ ID NO: 53997 - DNA, 31 bp, Homo sapiens; identical to SEQ ID NO: 23995
  chr17:76449723-76449754
  hypo

SEQ ID NO: 53998 - DNA, 42 bp, Homo sapiens; identical to SEQ ID NO: 23996
  chr17:76456116-76456158
  hypo

SEQ ID NO: 53999 - DNA, 31 bp, Homo sapiens; identical to SEQ ID NO: 23998
  chr17:76690198-76690229
  hypo

SEQ ID NO: 54000 - DNA, 39 bp, Homo sapiens; identical to SEQ ID NO: 23999
  chr17:76690280-76690319
  hypo

SEQ ID NO: 54001 - DNA, 56 bp, Homo sapiens; identical to SEQ ID NO: 24000
  chr17:76690340-76690396
  hypo

SEQ ID NO: 54002 - DNA, 31 bp, Homo sapiens; identical to SEQ ID NO: 24001
  chr17:76722779-76722810
  hypo

SEQ ID NO: 54003 - DNA, 31 bp, Homo sapiens; identical to SEQ ID NO: 24002
  chr17:76722815-76722846
  hypo

SEQ ID NO: 54004 - DNA, 42 bp, Homo sapiens; identical to SEQ ID NO: 24003
  chr17:76722851-76722893
  hypo

SEQ ID NO: 54005 - DNA, 73 bp, Homo sapiens; identical to SEQ ID NO: 24004
  chr17:76722895-76722968
  hypo

SEQ ID NO: 54006 - DNA, 31 bp, Homo sapiens; identical to SEQ ID NO: 24006
  chr17:76766766-76766797
  hypo

SEQ ID NO: 54007 - DNA, 36 bp, Homo sapiens; identical to SEQ ID NO: 24007
  chr17:76818659-76818695
  hypo

SEQ ID NO: 54008 - DNA, 69 bp, Homo sapiens; identical to SEQ ID NO: 6142
  chr17:76921483-76921552
  hypo

SEQ ID NO: 54009 - DNA, 40 bp, Homo sapiens; identical to SEQ ID NO: 24009
  chr17:76963989-76964029
  hypo

SEQ ID NO: 54010 - DNA, 73 bp, Homo sapiens; identical to SEQ ID NO: 24010
  chr17:76977963-76978036
  hypo

SEQ ID NO: 54011 - DNA, 2 bp, Homo sapiens
  chr17:76991521-76991523
  hypo
ct

SEQ ID NO: 54012 - DNA, 42 bp, Homo sapiens; identical to SEQ ID NO: 24013
  chr17:76993489-76993531
  hypo

SEQ ID NO: 54013 - DNA, 31 bp, Homo sapiens; identical to SEQ ID NO: 24014
  chr17:76993544-76993575
  hypo

SEQ ID NO: 54014 - DNA, 31 bp, Homo sapiens; identical to SEQ ID NO: 24015
  chr17:76995120-76995151
  hypo

SEQ ID NO: 54015 - DNA, 31 bp, Homo sapiens; identical to SEQ ID NO: 24016
  chr17:76995178-76995209
  hypo

SEQ ID NO: 54016 - DNA, 2 bp, Homo sapiens
  chr17:76996978-76996980
  hypo
ca

SEQ ID NO: 54017 - DNA, 31 bp, Homo sapiens; identical to SEQ ID NO: 24018
  chr17:76997236-76997267
  hypo

SEQ ID NO: 54018 - DNA, 31 bp, Homo sapiens; identical to SEQ ID NO: 24019
  chr17:76998746-76998777
  hypo

SEQ ID NO: 54019 - DNA, 31 bp, Homo sapiens; identical to SEQ ID NO: 24020
  chr17:76999157-76999188
  hypo

SEQ ID NO: 54020 - DNA, 31 bp, Homo sapiens; identical to SEQ ID NO: 24024
  chr17:77004087-77004118
  hypo

SEQ ID NO: 54021 - DNA, 61 bp, Homo sapiens; identical to SEQ ID NO: 24025
  chr17:77043871-77043932
  hypo

SEQ ID NO: 54022 - DNA, 31 bp, Homo sapiens; identical to SEQ ID NO: 24026
  chr17:77070098-77070129
  hypo

SEQ ID NO: 54023 - DNA, 81 bp, Homo sapiens; identical to SEQ ID NO: 6144
  chr17:77070948-77071029
  hypo

SEQ ID NO: 54024 - DNA, 63 bp, Homo sapiens; identical to SEQ ID NO: 6145
  chr17:77071239-77071302
  hypo

SEQ ID NO: 54025 - DNA, 165 bp, Homo sapiens; identical to SEQ ID NO: 6146
  chr17:77071338-77071503
  hypo

SEQ ID NO: 54026 - DNA, 61 bp, Homo sapiens; identical to SEQ ID NO: 24030
  chr17:77086020-77086081
  hypo

SEQ ID NO: 54027 - DNA, 31 bp, Homo sapiens; identical to SEQ ID NO: 24031
  chr17:77151474-77151505
  hypo

SEQ ID NO: 54028 - DNA, 76 bp, Homo sapiens; identical to SEQ ID NO: 6147
  chr17:77771455-77771531
  hypo

SEQ ID NO: 54029 - DNA, 38 bp, Homo sapiens; identical to SEQ ID NO: 6148
  chr17:77771550-77771588
  hypo

SEQ ID NO: 54030 - DNA, 38 bp, Homo sapiens; identical to SEQ ID NO: 6149
  chr17:77771592-77771630
  hypo

SEQ ID NO: 54031 - DNA, 46 bp, Homo sapiens; identical to SEQ ID NO: 6150
  chr17:77774930-77774976
  hypo

SEQ ID NO: 54032 - DNA, 2 bp, Homo sapiens
  chr17:77807458-77807460
  hypo
ac

SEQ ID NO: 54033 - DNA, 38 bp, Homo sapiens; identical to SEQ ID NO: 24039
  chr17:77808043-77808081
  hypo

SEQ ID NO: 54034 - DNA, 2 bp, Homo sapiens
  chr17:77808374-77808376
  hypo
ca

SEQ ID NO: 54035 - DNA, 154 bp, Homo sapiens; identical to SEQ ID NO: 6154
  chr17:77813599-77813753
  hypo

SEQ ID NO: 54036 - DNA, 31 bp, Homo sapiens; identical to SEQ ID NO: 6155
  chr17:77813829-77813860
  hypo

SEQ ID NO: 54037 - DNA, 31 bp, Homo sapiens; identical to SEQ ID NO: 24044
  chr17:77825848-77825879
  hypo

SEQ ID NO: 54038 - DNA, 31 bp, Homo sapiens; identical to SEQ ID NO: 24045
  chr17:77908724-77908755
  hypo

SEQ ID NO: 54039 - DNA, 31 bp, Homo sapiens; identical to SEQ ID NO: 24046
  chr17:77911917-77911948
  hypo

SEQ ID NO: 54040 - DNA, 31 bp, Homo sapiens; identical to SEQ ID NO: 24047
  chr17:77912318-77912349
  hypo

SEQ ID NO: 54041 - DNA, 51 bp, Homo sapiens; identical to SEQ ID NO: 24048
  chr17:77912350-77912401
  hypo

SEQ ID NO: 54042 - DNA, 44 bp, Homo sapiens; identical to SEQ ID NO: 24049
  chr17:77912468-77912512
  hypo

SEQ ID NO: 54043 - DNA, 31 bp, Homo sapiens; identical to SEQ ID NO: 24050
  chr17:77913050-77913081
  hypo

SEQ ID NO: 54044 - DNA, 95 bp, Homo sapiens; identical to SEQ ID NO: 24051
  chr17:77913109-77913204
  hypo

SEQ ID NO: 54045 - DNA, 65 bp, Homo sapiens; identical to SEQ ID NO: 24052
  chr17:77914637-77914702
  hypo

SEQ ID NO: 54046 - DNA, 158 bp, Homo sapiens; identical to SEQ ID NO: 24053
  chr17:77914725-77914883
  hypo

SEQ ID NO: 54047 - DNA, 31 bp, Homo sapiens; identical to SEQ ID NO: 24054
  chr17:77914922-77914953
  hypo

SEQ ID NO: 54048 - DNA, 31 bp, Homo sapiens; identical to SEQ ID NO: 24055
  chr17:77915952-77915983
  hypo

SEQ ID NO: 54049 - DNA, 82 bp, Homo sapiens; identical to SEQ ID NO: 24056
  chr17:77917678-77917760
  hypo

SEQ ID NO: 54050 - DNA, 53 bp, Homo sapiens; identical to SEQ ID NO: 24057
  chr17:77918539-77918592
  hypo

SEQ ID NO: 54051 - DNA, 67 bp, Homo sapiens; identical to SEQ ID NO: 24058
  chr17:77918597-77918664
  hypo

SEQ ID NO: 54052 - DNA, 57 bp, Homo sapiens; identical to SEQ ID NO: 24059
  chr17:77918832-77918889
  hypo

SEQ ID NO: 54053 - DNA, 31 bp, Homo sapiens; identical to SEQ ID NO: 24061
  chr17:77928736-77928767
  hypo

SEQ ID NO: 54054 - DNA, 64 bp, Homo sapiens; identical to SEQ ID NO: 24062
  chr17:77930368-77930432
  hypo

SEQ ID NO: 54055 - DNA, 31 bp, Homo sapiens; identical to SEQ ID NO: 24063
  chr17:77932289-77932320
  hypo

SEQ ID NO: 54056 - DNA, 60 bp, Homo sapiens; identical to SEQ ID NO: 24065
  chr17:77937641-77937701
  hypo

SEQ ID NO: 54057 - DNA, 50 bp, Homo sapiens; identical to SEQ ID NO: 24067
  chr17:77946311-77946361
  hypo

SEQ ID NO: 54058 - DNA, 31 bp, Homo sapiens; identical to SEQ ID NO: 24068
  chr17:77949673-77949704
  hypo

SEQ ID NO: 54059 - DNA, 34 bp, Homo sapiens; identical to SEQ ID NO: 24069
  chr17:77951520-77951554
  hypo

SEQ ID NO: 54060 - DNA, 62 bp, Homo sapiens; identical to SEQ ID NO: 24070
  chr17:77954475-77954537
  hypo

SEQ ID NO: 54061 - DNA, 62 bp, Homo sapiens; identical to SEQ ID NO: 24071
  chr17:77956293-77956355
  hypo

SEQ ID NO: 54062 - DNA, 31 bp, Homo sapiens; identical to SEQ ID NO: 24072
  chr17:77956357-77956388
  hypo

SEQ ID NO: 54063 - DNA, 38 bp, Homo sapiens; identical to SEQ ID NO: 24073
  chr17:77980959-77980997
  hypo

SEQ ID NO: 54064 - DNA, 74 bp, Homo sapiens; identical to SEQ ID NO: 24074
  chr17:77981016-77981090
  hypo

SEQ ID NO: 54065 - DNA, 31 bp, Homo sapiens; identical to SEQ ID NO: 24075
  chr17:77984226-77984257
  hypo

SEQ ID NO: 54066 - DNA, 39 bp, Homo sapiens; identical to SEQ ID NO: 24076
  chr17:77984261-77984300
  hypo

SEQ ID NO: 54067 - DNA, 94 bp, Homo sapiens; identical to SEQ ID NO: 24077
  chr17:77984329-77984423
  hypo

SEQ ID NO: 54068 - DNA, 31 bp, Homo sapiens; identical to SEQ ID NO: 24078
  chr17:77987118-77987149
  hypo

SEQ ID NO: 54069 - DNA, 68 bp, Homo sapiens; identical to SEQ ID NO: 24079
  chr17:77987435-77987503
  hypo

SEQ ID NO: 54070 - DNA, 31 bp, Homo sapiens; identical to SEQ ID NO: 24080
  chr17:77989974-77990005
  hypo

SEQ ID NO: 54071 - DNA, 32 bp, Homo sapiens; identical to SEQ ID NO: 24081
  chr17:77991172-77991204
  hypo

SEQ ID NO: 54072 - DNA, 31 bp, Homo sapiens; identical to SEQ ID NO: 24082
  chr17:78007923-78007954
  hypo

SEQ ID NO: 54073 - DNA, 31 bp, Homo sapiens; identical to SEQ ID NO: 6158
  chr17:78009417-78009448
  hypo

SEQ ID NO: 54074 - DNA, 47 bp, Homo sapiens; identical to SEQ ID NO: 6159
  chr17:78009471-78009518
  hypo

SEQ ID NO: 54075 - DNA, 31 bp, Homo sapiens; identical to SEQ ID NO: 6160
  chr17:78009923-78009954
  hypo

SEQ ID NO: 54076 - DNA, 61 bp, Homo sapiens; identical to SEQ ID NO: 6161
  chr17:78010155-78010216
  hypo

SEQ ID NO: 54077 - DNA, 268 bp, Homo sapiens; identical to SEQ ID NO: 6162
  chr17:78010235-78010503
  hypo

SEQ ID NO: 54078 - DNA, 31 bp, Homo sapiens; identical to SEQ ID NO: 24089
  chr17:78022347-78022378
  hypo

SEQ ID NO: 54079 - DNA, 31 bp, Homo sapiens; identical to SEQ ID NO: 24090
  chr17:78022384-78022415
  hypo

SEQ ID NO: 54080 - DNA, 31 bp, Homo sapiens; identical to SEQ ID NO: 24091
  chr17:78022447-78022478
  hypo

SEQ ID NO: 54081 - DNA, 43 bp, Homo sapiens; identical to SEQ ID NO: 24092
  chr17:78022480-78022523
  hypo

SEQ ID NO: 54082 - DNA, 79 bp, Homo sapiens; identical to SEQ ID NO: 24093
  chr17:78024049-78024128
  hypo

SEQ ID NO: 54083 - DNA, 47 bp, Homo sapiens; identical to SEQ ID NO: 24094
  chr17:78024750-78024797
  hypo

SEQ ID NO: 54084 - DNA, 60 bp, Homo sapiens; identical to SEQ ID NO: 24095
  chr17:78024818-78024878
  hypo

SEQ ID NO: 54085 - DNA, 59 bp, Homo sapiens; identical to SEQ ID NO: 24096
  chr17:78024879-78024938
  hypo

SEQ ID NO: 54086 - DNA, 40 bp, Homo sapiens; identical to SEQ ID NO: 24098
  chr17:78055252-78055292
  hypo

SEQ ID NO: 54087 - DNA, 31 bp, Homo sapiens; identical to SEQ ID NO: 24099
  chr17:78055312-78055343
  hypo

SEQ ID NO: 54088 - DNA, 37 bp, Homo sapiens; identical to SEQ ID NO: 24100
  chr17:78055355-78055392
  hypo

SEQ ID NO: 54089 - DNA, 56 bp, Homo sapiens; identical to SEQ ID NO: 24101
  chr17:78055409-78055465
  hypo

SEQ ID NO: 54090 - DNA, 2 bp, Homo sapiens
  chr17:78083746-78083748
  hypo
cc

SEQ ID NO: 54091 - DNA, 31 bp, Homo sapiens; identical to SEQ ID NO: 24103
  chr17:78096141-78096172
  hypo

SEQ ID NO: 54092 - DNA, 31 bp, Homo sapiens; identical to SEQ ID NO: 24105
  chr17:78135900-78135931
  hypo

SEQ ID NO: 54093 - DNA, 31 bp, Homo sapiens; identical to SEQ ID NO: 24107
  chr17:78155471-78155502
  hypo

SEQ ID NO: 54094 - DNA, 61 bp, Homo sapiens; identical to SEQ ID NO: 24108
  chr17:78158228-78158289
  hypo

SEQ ID NO: 54095 - DNA, 31 bp, Homo sapiens; identical to SEQ ID NO: 24109
  chr17:78158300-78158331
  hypo

SEQ ID NO: 54096 - DNA, 55 bp, Homo sapiens; identical to SEQ ID NO: 24110
  chr17:78158346-78158401
  hypo

SEQ ID NO: 54097 - DNA, 31 bp, Homo sapiens; identical to SEQ ID NO: 24112
  chr17:78159124-78159155
  hypo

SEQ ID NO: 54098 - DNA, 31 bp, Homo sapiens; identical to SEQ ID NO: 24113
  chr17:78165106-78165137
  hypo

SEQ ID NO: 54099 - DNA, 34 bp, Homo sapiens; identical to SEQ ID NO: 24114
  chr17:78179549-78179583
  hypo

SEQ ID NO: 54100 - DNA, 85 bp, Homo sapiens; identical to SEQ ID NO: 24115
  chr17:78182031-78182116
  hypo

SEQ ID NO: 54101 - DNA, 31 bp, Homo sapiens; identical to SEQ ID NO: 24116
  chr17:78217103-78217134
  hypo

SEQ ID NO: 54102 - DNA, 31 bp, Homo sapiens; identical to SEQ ID NO: 24117
  chr17:78222247-78222278
  hypo

SEQ ID NO: 54103 - DNA, 32 bp, Homo sapiens; identical to SEQ ID NO: 24118
  chr17:78280675-78280707
  hypo

SEQ ID NO: 54104 - DNA, 34 bp, Homo sapiens; identical to SEQ ID NO: 6166
  chr17:78388648-78388682
  hypo

SEQ ID NO: 54105 - DNA, 91 bp, Homo sapiens; identical to SEQ ID NO: 6167
  chr17:78389460-78389551
  hypo

SEQ ID NO: 54106 - DNA, 190 bp, Homo sapiens; identical to SEQ ID NO: 6168
  chr17:78428376-78428566
  hypo

SEQ ID NO: 54107 - DNA, 50 bp, Homo sapiens; identical to SEQ ID NO: 6169
  chr17:78428637-78428687
  hypo

SEQ ID NO: 54108 - DNA, 2 bp, Homo sapiens
  chr17:78517568-78517570
  hypo
gg

SEQ ID NO: 54109 - DNA, 105 bp, Homo sapiens; identical to SEQ ID NO: 24124
  chr17:78529318-78529423
  hypo

SEQ ID NO: 54110 - DNA, 31 bp, Homo sapiens; identical to SEQ ID NO: 24125
  chr17:78529443-78529474
  hypo

SEQ ID NO: 54111 - DNA, 31 bp, Homo sapiens; identical to SEQ ID NO: 24128
  chr17:78611007-78611038
  hypo

SEQ ID NO: 54112 - DNA, 31 bp, Homo sapiens; identical to SEQ ID NO: 24129
  chr17:78725780-78725811
  hypo

SEQ ID NO: 54113 - DNA, 31 bp, Homo sapiens; identical to SEQ ID NO: 24130
  chr17:78829655-78829686
  hypo

SEQ ID NO: 54114 - DNA, 31 bp, Homo sapiens; identical to SEQ ID NO: 24131
  chr17:78867125-78867156
  hypo

SEQ ID NO: 54115 - DNA, 31 bp, Homo sapiens; identical to SEQ ID NO: 24132
  chr17:78898616-78898647
  hypo

SEQ ID NO: 54116 - DNA, 23 bp, Homo sapiens
  chr17:78975916-78975939
  hypo
aagaaatgcgtgggacagaatgg

SEQ ID NO: 54117 - DNA, 23 bp, Homo sapiens
  chr17:79001012-79001035
  hypo
agggaagccatctgcgcggcgcc

SEQ ID NO: 54118 - DNA, 2 bp, Homo sapiens
  chr17:79001564-79001566
  hypo
cc

SEQ ID NO: 54119 - DNA, 37 bp, Homo sapiens
  chr17:79001617-79001654
  hypo
ggcgccacatgtgtccttcctccggccccagacccca

SEQ ID NO: 54120 - DNA, 256 bp, Homo sapiens; identical to SEQ ID NO: 6172
  chr17:79008305-79008561
  hypo

SEQ ID NO: 54121 - DNA, 266 bp, Homo sapiens; identical to SEQ ID NO: 6173
  chr17:79008840-79009106
  hypo

SEQ ID NO: 54122 - DNA, 138 bp, Homo sapiens; identical to SEQ ID NO: 6175
  chr17:79009227-79009365
  hypo

SEQ ID NO: 54123 - DNA, 101 bp, Homo sapiens; identical to SEQ ID NO: 6176
  chr17:79009389-79009490
  hypo

SEQ ID NO: 54124 - DNA, 31 bp, Homo sapiens; identical to SEQ ID NO: 24140
  chr17:79020691-79020722
  hypo

SEQ ID NO: 54125 - DNA, 42 bp, Homo sapiens; identical to SEQ ID NO: 24142
  chr17:79027536-79027578
  hypo

SEQ ID NO: 54126 - DNA, 31 bp, Homo sapiens; identical to SEQ ID NO: 24143
  chr17:79040987-79041018
  hypo

SEQ ID NO: 54127 - DNA, 31 bp, Homo sapiens; identical to SEQ ID NO: 24144
  chr17:79041934-79041965
  hypo

SEQ ID NO: 54128 - DNA, 94 bp, Homo sapiens; identical to SEQ ID NO: 24145
  chr17:79042374-79042468
  hypo

SEQ ID NO: 54129 - DNA, 31 bp, Homo sapiens; identical to SEQ ID NO: 24146
  chr17:79042494-79042525
  hypo

SEQ ID NO: 54130 - DNA, 31 bp, Homo sapiens; identical to SEQ ID NO: 24147
  chr17:79042526-79042557
  hypo

SEQ ID NO: 54131 - DNA, 31 bp, Homo sapiens; identical to SEQ ID NO: 24148
  chr17:79044176-79044207
  hypo

SEQ ID NO: 54132 - DNA, 55 bp, Homo sapiens; identical to SEQ ID NO: 24149
  chr17:79047313-79047368
  hypo

SEQ ID NO: 54133 - DNA, 175 bp, Homo sapiens; identical to SEQ ID NO: 24150
  chr17:79051452-79051627
  hypo

SEQ ID NO: 54134 - DNA, 85 bp, Homo sapiens; identical to SEQ ID NO: 24151
  chr17:79051750-79051835
  hypo

SEQ ID NO: 54135 - DNA, 43 bp, Homo sapiens; identical to SEQ ID NO: 24152
  chr17:79051876-79051919
  hypo

SEQ ID NO: 54136 - DNA, 35 bp, Homo sapiens; identical to SEQ ID NO: 24153
  chr17:79052329-79052364
  hypo

SEQ ID NO: 54137 - DNA, 31 bp, Homo sapiens; identical to SEQ ID NO: 24154
  chr17:79060230-79060261
  hypo

SEQ ID NO: 54138 - DNA, 31 bp, Homo sapiens; identical to SEQ ID NO: 24155
  chr17:79062264-79062295
  hypo

SEQ ID NO: 54139 - DNA, 106 bp, Homo sapiens; identical to SEQ ID NO: 24156
  chr17:79062368-79062474
  hypo

SEQ ID NO: 54140 - DNA, 51 bp, Homo sapiens; identical to SEQ ID NO: 24157
  chr17:79062727-79062778
  hypo

SEQ ID NO: 54141 - DNA, 70 bp, Homo sapiens; identical to SEQ ID NO: 24158
  chr17:79062814-79062884
  hypo

SEQ ID NO: 54142 - DNA, 31 bp, Homo sapiens; identical to SEQ ID NO: 24159
  chr17:79065508-79065539
  hypo

SEQ ID NO: 54143 - DNA, 62 bp, Homo sapiens; identical to SEQ ID NO: 24160
  chr17:79065544-79065606
  hypo

SEQ ID NO: 54144 - DNA, 56 bp, Homo sapiens; identical to SEQ ID NO: 24161
  chr17:79067465-79067521
  hypo

SEQ ID NO: 54145 - DNA, 31 bp, Homo sapiens; identical to SEQ ID NO: 24162
  chr17:79069908-79069939
  hypo

SEQ ID NO: 54146 - DNA, 75 bp, Homo sapiens; identical to SEQ ID NO: 24163
  chr17:79072578-79072653
  hypo

SEQ ID NO: 54147 - DNA, 187 bp, Homo sapiens; identical to SEQ ID NO: 24164
  chr17:79072975-79073162
  hypo

SEQ ID NO: 54148 - DNA, 31 bp, Homo sapiens; identical to SEQ ID NO: 24165
  chr17:79073975-79074006
  hypo

SEQ ID NO: 54149 - DNA, 181 bp, Homo sapiens; identical to SEQ ID NO: 24166
  chr17:79074738-79074919
  hypo

SEQ ID NO: 54150 - DNA, 78 bp, Homo sapiens; identical to SEQ ID NO: 24167
  chr17:79077410-79077488
  hypo

SEQ ID NO: 54151 - DNA, 60 bp, Homo sapiens; identical to SEQ ID NO: 24168
  chr17:79077902-79077962
  hypo

SEQ ID NO: 54152 - DNA, 31 bp, Homo sapiens; identical to SEQ ID NO: 24169
  chr17:79078010-79078041
  hypo

SEQ ID NO: 54153 - DNA, 37 bp, Homo sapiens; identical to SEQ ID NO: 24170
  chr17:79078511-79078548
  hypo

SEQ ID NO: 54154 - DNA, 41 bp, Homo sapiens; identical to SEQ ID NO: 24171
  chr17:79079545-79079586
  hypo

SEQ ID NO: 54155 - DNA, 31 bp, Homo sapiens; identical to SEQ ID NO: 24172
  chr17:79080045-79080076
  hypo

SEQ ID NO: 54156 - DNA, 31 bp, Homo sapiens; identical to SEQ ID NO: 24173
  chr17:79082609-79082640
  hypo

SEQ ID NO: 54157 - DNA, 95 bp, Homo sapiens; identical to SEQ ID NO: 24174
  chr17:79082649-79082744
  hypo

SEQ ID NO: 54158 - DNA, 54 bp, Homo sapiens; identical to SEQ ID NO: 24175
  chr17:79082967-79083021
  hypo

SEQ ID NO: 54159 - DNA, 46 bp, Homo sapiens; identical to SEQ ID NO: 24176
  chr17:79083051-79083097
  hypo

SEQ ID NO: 54160 - DNA, 34 bp, Homo sapiens; identical to SEQ ID NO: 24177
  chr17:79083113-79083147
  hypo

SEQ ID NO: 54161 - DNA, 91 bp, Homo sapiens; identical to SEQ ID NO: 24178
  chr17:79083369-79083460
  hypo

SEQ ID NO: 54162 - DNA, 31 bp, Homo sapiens; identical to SEQ ID NO: 24179
  chr17:79083462-79083493
  hypo

SEQ ID NO: 54163 - DNA, 31 bp, Homo sapiens; identical to SEQ ID NO: 24180
  chr17:79084534-79084565
  hypo

SEQ ID NO: 54164 - DNA, 40 bp, Homo sapiens; identical to SEQ ID NO: 24181
  chr17:79086356-79086396
  hypo

SEQ ID NO: 54165 - DNA, 31 bp, Homo sapiens; identical to SEQ ID NO: 24182
  chr17:79086874-79086905
  hypo

SEQ ID NO: 54166 - DNA, 31 bp, Homo sapiens; identical to SEQ ID NO: 24186
  chr17:79102269-79102300
  hypo

SEQ ID NO: 54167 - DNA, 31 bp, Homo sapiens; identical to SEQ ID NO: 24187
  chr17:79113512-79113543
  hypo

SEQ ID NO: 54168 - DNA, 55 bp, Homo sapiens; identical to SEQ ID NO: 24188
  chr17:79114514-79114569
  hypo

SEQ ID NO: 54169 - DNA, 31 bp, Homo sapiens; identical to SEQ ID NO: 24189
  chr17:79164758-79164789
  hypo

SEQ ID NO: 54170 - DNA, 37 bp, Homo sapiens; identical to SEQ ID NO: 24190
  chr17:79168719-79168756
  hypo

SEQ ID NO: 54171 - DNA, 31 bp, Homo sapiens; identical to SEQ ID NO: 6177
  chr17:79197096-79197127
  hypo

SEQ ID NO: 54172 - DNA, 52 bp, Homo sapiens; identical to SEQ ID NO: 6180
  chr17:79319252-79319304
  hypo

SEQ ID NO: 54173 - DNA, 31 bp, Homo sapiens; identical to SEQ ID NO: 24193
  chr17:79543262-79543293
  hypo

SEQ ID NO: 54174 - DNA, 31 bp, Homo sapiens; identical to SEQ ID NO: 24195
  chr17:79608475-79608506
  hypo

SEQ ID NO: 54175 - DNA, 56 bp, Homo sapiens; identical to SEQ ID NO: 24196
  chr17:79611881-79611937
  hypo

SEQ ID NO: 54176 - DNA, 31 bp, Homo sapiens; identical to SEQ ID NO: 24197
  chr17:79612315-79612346
  hypo

SEQ ID NO: 54177 - DNA, 70 bp, Homo sapiens; identical to SEQ ID NO: 24198
  chr17:79612549-79612619
  hypo

SEQ ID NO: 54178 - DNA, 40 bp, Homo sapiens
  chr17:79612812-79612852
  hypo
gcacgtctcgtgctcacaggtttcacgtgtgtggacacac

SEQ ID NO: 54179 - DNA, 43 bp, Homo sapiens; identical to SEQ ID NO: 24201
  chr17:79637466-79637509
  hypo

SEQ ID NO: 54180 - DNA, 43 bp, Homo sapiens; identical to SEQ ID NO: 24202
  chr17:79655903-79655946
  hypo

SEQ ID NO: 54181 - DNA, 58 bp, Homo sapiens; identical to SEQ ID NO: 24203
  chr17:79705355-79705413
  hypo

SEQ ID NO: 54182 - DNA, 31 bp, Homo sapiens; identical to SEQ ID NO: 24204
  chr17:79705427-79705458
  hypo

SEQ ID NO: 54183 - DNA, 38 bp, Homo sapiens; identical to SEQ ID NO: 24206
  chr17:79772551-79772589
  hypo

SEQ ID NO: 54184 - DNA, 31 bp, Homo sapiens; identical to SEQ ID NO: 24207
  chr17:79772623-79772654
  hypo

SEQ ID NO: 54185 - DNA, 31 bp, Homo sapiens; identical to SEQ ID NO: 24208
  chr17:79772781-79772812
  hypo

SEQ ID NO: 54186 - DNA, 31 bp, Homo sapiens; identical to SEQ ID NO: 24209
  chr17:79781434-79781465
  hypo

SEQ ID NO: 54187 - DNA, 40 bp, Homo sapiens; identical to SEQ ID NO: 24210
  chr17:79851769-79851809
  hypo

SEQ ID NO: 54188 - DNA, 44 bp, Homo sapiens; identical to SEQ ID NO: 24211
  chr17:79851846-79851890
  hypo

SEQ ID NO: 54189 - DNA, 31 bp, Homo sapiens; identical to SEQ ID NO: 24212
  chr17:79863960-79863991
  hypo

SEQ ID NO: 54190 - DNA, 37 bp, Homo sapiens; identical to SEQ ID NO: 6183
  chr17:79886040-79886077
  hypo

SEQ ID NO: 54191 - DNA, 31 bp, Homo sapiens
  chr17:79899263-79899294
  hypo
ctcgggggaacactcccgccgggcaaagtac

SEQ ID NO: 54192 - DNA, 31 bp, Homo sapiens; identical to SEQ ID NO: 24219
  chr17:79906752-79906783
  hypo

SEQ ID NO: 54193 - DNA, 107 bp, Homo sapiens; identical to SEQ ID NO: 24220
  chr17:79906816-79906923
  hypo

SEQ ID NO: 54194 - DNA, 31 bp, Homo sapiens; identical to SEQ ID NO: 24221
  chr17:79914599-79914630
  hypo

SEQ ID NO: 54195 - DNA, 31 bp, Homo sapiens; identical to SEQ ID NO: 24222
  chr17:79914638-79914669
  hypo

SEQ ID NO: 54196 - DNA, 41 bp, Homo sapiens; identical to SEQ ID NO: 24223
  chr17:79942954-79942995
  hypo

SEQ ID NO: 54197 - DNA, 43 bp, Homo sapiens; identical to SEQ ID NO: 24224
  chr17:79942996-79943039
  hypo

SEQ ID NO: 54198 - DNA, 2 bp, Homo sapiens
  chr17:79982079-79982081
  hypo
cc

SEQ ID NO: 54199 - DNA, 31 bp, Homo sapiens; identical to SEQ ID NO: 24226
  chr17:79986711-79986742
  hypo

SEQ ID NO: 54200 - DNA, 49 bp, Homo sapiens; identical to SEQ ID NO: 24227
  chr17:80005326-80005375
  hypo

SEQ ID NO: 54201 - DNA, 31 bp, Homo sapiens; identical to SEQ ID NO: 6186
  chr17:80010342-80010373
  hypo

SEQ ID NO: 54202 - DNA, 31 bp, Homo sapiens; identical to SEQ ID NO: 24229
  chr17:80077689-80077720
  hypo

SEQ ID NO: 54203 - DNA, 57 bp, Homo sapiens; identical to SEQ ID NO: 24230
  chr17:80077737-80077794
  hypo

SEQ ID NO: 54204 - DNA, 55 bp, Homo sapiens; identical to SEQ ID NO: 24231
  chr17:80085171-80085226
  hypo

SEQ ID NO: 54205 - DNA, 35 bp, Homo sapiens; identical to SEQ ID NO: 24232
  chr17:80085229-80085264
  hypo

SEQ ID NO: 54206 - DNA, 31 bp, Homo sapiens; identical to SEQ ID NO: 24235
  chr17:80085372-80085403
  hypo

SEQ ID NO: 54207 - DNA, 31 bp, Homo sapiens; identical to SEQ ID NO: 24236
  chr17:80085459-80085490
  hypo

SEQ ID NO: 54208 - DNA, 161 bp, Homo sapiens; identical to SEQ ID NO: 24237
  chr17:80144202-80144363
  hypo

SEQ ID NO: 54209 - DNA, 31 bp, Homo sapiens; identical to SEQ ID NO: 24238
  chr17:80172375-80172406
  hypo

SEQ ID NO: 54210 - DNA, 31 bp, Homo sapiens; identical to SEQ ID NO: 24239
  chr17:80176132-80176163
  hypo

SEQ ID NO: 54211 - DNA, 31 bp, Homo sapiens; identical to SEQ ID NO: 24239
  chr17:80176211-80176242
  hypo

SEQ ID NO: 54212 - DNA, 31 bp, Homo sapiens; identical to SEQ ID NO: 24241
  chr17:80201900-80201931
  hypo

SEQ ID NO: 54213 - DNA, 58 bp, Homo sapiens; identical to SEQ ID NO: 24242
  chr17:80202409-80202467
  hypo

SEQ ID NO: 54214 - DNA, 31 bp, Homo sapiens; identical to SEQ ID NO: 24243
  chr17:80222099-80222130
  hypo

SEQ ID NO: 54215 - DNA, 2 bp, Homo sapiens
  chr17:80229869-80229871
  hypo
gg

SEQ ID NO: 54216 - DNA, 2 bp, Homo sapiens
  chr17:80251904-80251906
  hypo
at

SEQ ID NO: 54217 - DNA, 69 bp, Homo sapiens; identical to SEQ ID NO: 39594
  chr17:80277697-80277766
  hypo

SEQ ID NO: 54218 - DNA, 31 bp, Homo sapiens; identical to SEQ ID NO: 24250
  chr17:80294543-80294574
  hypo

SEQ ID NO: 54219 - DNA, 31 bp, Homo sapiens; identical to SEQ ID NO: 24251
  chr17:80303789-80303820
  hypo

SEQ ID NO: 54220 - DNA, 2 bp, Homo sapiens
  chr17:80332248-80332250
  hypo
ac

SEQ ID NO: 54221 - DNA, 8 bp, Homo sapiens
  chr17:80479545-80479553
  hypo
gcctgtaa

SEQ ID NO: 54222 - DNA, 34 bp, Homo sapiens; identical to SEQ ID NO: 24261
  chr17:80571800-80571834
  hypo

SEQ ID NO: 54223 - DNA, 337 bp, Homo sapiens; identical to SEQ ID NO: 6190
  chr17:80655901-80656238
  hypo

SEQ ID NO: 54224 - DNA, 140 bp, Homo sapiens; identical to SEQ ID NO: 6191
  chr17:80656360-80656500
  hypo

SEQ ID NO: 54225 - DNA, 139 bp, Homo sapiens; identical to SEQ ID NO: 6192
  chr17:80656563-80656702
  hypo

SEQ ID NO: 54226 - DNA, 250 bp, Homo sapiens; identical to SEQ ID NO: 6193
  chr17:80656731-80656981
  hypo

SEQ ID NO: 54227 - DNA, 47 bp, Homo sapiens; identical to SEQ ID NO: 39601
  chr17:80657001-80657048
  hypo

SEQ ID NO: 54228 - DNA, 2 bp, Homo sapiens
  chr17:80673405-80673407
  hypo
ta

SEQ ID NO: 54229 - DNA, 26 bp, Homo sapiens
  chr17:80692486-80692512
  hypo
gtggtggttcacggctgtaatcccag

SEQ ID NO: 54230 - DNA, 53 bp, Homo sapiens
  chr17:80692926-80692979
  hypo
gcacggactgggctcaggtgcgcacctgctcgtgtgcacgcgtgtgtacccac

SEQ ID NO: 54231 - DNA, 36 bp, Homo sapiens; identical to SEQ ID NO: 6196
  chr17:80693227-80693263
  hypo

SEQ ID NO: 54232 - DNA, 42 bp, Homo sapiens; identical to SEQ ID NO: 39603
  chr17:80693276-80693318
  hypo

SEQ ID NO: 54233 - DNA, 46 bp, Homo sapiens; identical to SEQ ID NO: 24274
  chr17:80732635-80732681
  hypo

SEQ ID NO: 54234 - DNA, 49 bp, Homo sapiens; identical to SEQ ID NO: 24275
  chr17:80747261-80747310
  hypo

SEQ ID NO: 54235 - DNA, 31 bp, Homo sapiens; identical to SEQ ID NO: 24276
  chr17:80749613-80749644
  hypo

SEQ ID NO: 54236 - DNA, 2 bp, Homo sapiens
  chr17:80772871-80772873
  hypo
cc

SEQ ID NO: 54237 - DNA, 2 bp, Homo sapiens
  chr17:80797663-80797665
  hypo
gg

SEQ ID NO: 54238 - DNA, 31 bp, Homo sapiens; identical to SEQ ID NO: 24289
  chr17:80821581-80821612
  hypo

SEQ ID NO: 54239 - DNA, 79 bp, Homo sapiens; identical to SEQ ID NO: 24290
  chr17:80830875-80830954
  hypo

SEQ ID NO: 54240 - DNA, 31 bp, Homo sapiens; identical to SEQ ID NO: 24291
  chr17:80832118-80832149
  hypo

SEQ ID NO: 54241 - DNA, 29 bp, Homo sapiens
  chr17:80847830-80847859
  hypo
gctctgcagggtggggcgggtccctggga

SEQ ID NO: 54242 - DNA, 31 bp, Homo sapiens; identical to SEQ ID NO: 24298
  chr17:80873199-80873230
  hypo

SEQ ID NO: 54243 - DNA, 31 bp, Homo sapiens; identical to SEQ ID NO: 24299
  chr17:80879645-80879676
  hypo

SEQ ID NO: 54244 - DNA, 59 bp, Homo sapiens; identical to SEQ ID NO: 24300
  chr17:80899169-80899228
  hypo

SEQ ID NO: 54245 - DNA, 37 bp, Homo sapiens; identical to SEQ ID NO: 24301
  chr17:80918441-80918478
  hypo

SEQ ID NO: 54246 - DNA, 62 bp, Homo sapiens; identical to SEQ ID NO: 24302
  chr17:80918497-80918559
  hypo

SEQ ID NO: 54247 - DNA, 121 bp, Homo sapiens; identical to SEQ ID NO: 24303
  chr17:80918684-80918805
  hypo

SEQ ID NO: 54248 - DNA, 31 bp, Homo sapiens; identical to SEQ ID NO: 24304
  chr17:80963751-80963782
  hypo

SEQ ID NO: 54249 - DNA, 83 bp, Homo sapiens; identical to SEQ ID NO: 24305
  chr17:80982743-80982826
  hypo

SEQ ID NO: 54250 - DNA, 31 bp, Homo sapiens; identical to SEQ ID NO: 24306
  chr17:80983791-80983822
  hypo

SEQ ID NO: 54251 - DNA, 43 bp, Homo sapiens; identical to SEQ ID NO: 24307
  chr17:80995218-80995261
  hypo

SEQ ID NO: 54252 - DNA, 31 bp, Homo sapiens; identical to SEQ ID NO: 24308
  chr17:80997107-80997138
  hypo

SEQ ID NO: 54253 - DNA, 35 bp, Homo sapiens; identical to SEQ ID NO: 24309
  chr17:80997454-80997489
  hypo

SEQ ID NO: 54254 - DNA, 37 bp, Homo sapiens; identical to SEQ ID NO: 6199
  chr17:81009161-81009198
  hypo

SEQ ID NO: 54255 - DNA, 63 bp, Homo sapiens; identical to SEQ ID NO: 24314
  chr17:81014243-81014306
  hypo

SEQ ID NO: 54256 - DNA, 31 bp, Homo sapiens; identical to SEQ ID NO: 6202
  chr17:81037127-81037158
  hypo

SEQ ID NO: 54257 - DNA, 50 bp, Homo sapiens; identical to SEQ ID NO: 6203
  chr17:81038241-81038291
  hypo

SEQ ID NO: 54258 - DNA, 31 bp, Homo sapiens; identical to SEQ ID NO: 24319
  chr17:81102240-81102271
  hypo

SEQ ID NO: 54259 - DNA, 44 bp, Homo sapiens; identical to SEQ ID NO: 24320
  chr17:81102307-81102351
  hypo

SEQ ID NO: 54260 - DNA, 31 bp, Homo sapiens; identical to SEQ ID NO: 24321
  chr17:81102361-81102392
  hypo

SEQ ID NO: 54261 - DNA, 31 bp, Homo sapiens; identical to SEQ ID NO: 24322
  chr17:81102402-81102433
  hypo

SEQ ID NO: 54262 - DNA, 31 bp, Homo sapiens; identical to SEQ ID NO: 24324
  chr18:698125-698156
  hypo

SEQ ID NO: 54263 - DNA, 36 bp, Homo sapiens; identical to SEQ ID NO: 6205
  chr18:712306-712342
  hypo

SEQ ID NO: 54264 - DNA, 72 bp, Homo sapiens; identical to SEQ ID NO: 6206
  chr18:712366-712438
  hypo

SEQ ID NO: 54265 - DNA, 31 bp, Homo sapiens; identical to SEQ ID NO: 6207
  chr18:811589-811620
  hypo

SEQ ID NO: 54266 - DNA, 80 bp, Homo sapiens; identical to SEQ ID NO: 6208
  chr18:811633-811713
  hypo

SEQ ID NO: 54267 - DNA, 31 bp, Homo sapiens; identical to SEQ ID NO: 6209
  chr18:811720-811751
  hypo

SEQ ID NO: 54268 - DNA, 110 bp, Homo sapiens; identical to SEQ ID NO: 6210
  chr18:811862-811972
  hypo

SEQ ID NO: 54269 - DNA, 199 bp, Homo sapiens; identical to SEQ ID NO: 6211
  chr18:811973-812172
  hypo

SEQ ID NO: 54270 - DNA, 31 bp, Homo sapiens; identical to SEQ ID NO: 6212
  chr18:812283-812314
  hypo

SEQ ID NO: 54271 - DNA, 234 bp, Homo sapiens; identical to SEQ ID NO: 6213
  chr18:812346-812580
  hypo

SEQ ID NO: 54272 - DNA, 88 bp, Homo sapiens; identical to SEQ ID NO: 6214
  chr18:812611-812699
  hypo

SEQ ID NO: 54273 - DNA, 35 bp, Homo sapiens; identical to SEQ ID NO: 24335
  chr18:1928648-1928683
  hypo

SEQ ID NO: 54274 - DNA, 39 bp, Homo sapiens; identical to SEQ ID NO: 24336
  chr18:2565717-2565756
  hypo

SEQ ID NO: 54275 - DNA, 35 bp, Homo sapiens; identical to SEQ ID NO: 24337
  chr18:2565775-2565810
  hypo

SEQ ID NO: 54276 - DNA, 51 bp, Homo sapiens; identical to SEQ ID NO: 6215
  chr18:2571377-2571428
  hypo

SEQ ID NO: 54277 - DNA, 31 bp, Homo sapiens; identical to SEQ ID NO: 24345
  chr18:2851483-2851514
  hypo

SEQ ID NO: 54278 - DNA, 31 bp, Homo sapiens; identical to SEQ ID NO: 24346
  chr18:2851559-2851590
  hypo

SEQ ID NO: 54279 - DNA, 58 bp, Homo sapiens; identical to SEQ ID NO: 24347
  chr18:2851618-2851676
  hypo

SEQ ID NO: 54280 - DNA, 41 bp, Homo sapiens; identical to SEQ ID NO: 24348
  chr18:2910111-2910152
  hypo

SEQ ID NO: 54281 - DNA, 31 bp, Homo sapiens; identical to SEQ ID NO: 24349
  chr18:2910174-2910205
  hypo

SEQ ID NO: 54282 - DNA, 31 bp, Homo sapiens; identical to SEQ ID NO: 24350
  chr18:2910208-2910239
  hypo

SEQ ID NO: 54283 - DNA, 35 bp, Homo sapiens; identical to SEQ ID NO: 24351
  chr18:2910451-2910486
  hypo

SEQ ID NO: 54284 - DNA, 31 bp, Homo sapiens; identical to SEQ ID NO: 24352
  chr18:3061642-3061673
  hypo

SEQ ID NO: 54285 - DNA, 36 bp, Homo sapiens; identical to SEQ ID NO: 6221
  chr18:3262088-3262124
  hypo

SEQ ID NO: 54286 - DNA, 31 bp, Homo sapiens; identical to SEQ ID NO: 24354
  chr18:3330572-3330603
  hypo

SEQ ID NO: 54287 - DNA, 31 bp, Homo sapiens; identical to SEQ ID NO: 24355
  chr18:3415133-3415164
  hypo

SEQ ID NO: 54288 - DNA, 46 bp, Homo sapiens; identical to SEQ ID NO: 24356
  chr18:3415326-3415372
  hypo

SEQ ID NO: 54289 - DNA, 31 bp, Homo sapiens; identical to SEQ ID NO: 24357
  chr18:3417142-3417173
  hypo

SEQ ID NO: 54290 - DNA, 31 bp, Homo sapiens; identical to SEQ ID NO: 24358
  chr18:3421798-3421829
  hypo

SEQ ID NO: 54291 - DNA, 31 bp, Homo sapiens; identical to SEQ ID NO: 24359
  chr18:3443524-3443555
  hypo

SEQ ID NO: 54292 - DNA, 31 bp, Homo sapiens; identical to SEQ ID NO: 24361
  chr18:3445348-3445379
  hypo

SEQ ID NO: 54293 - DNA, 43 bp, Homo sapiens; identical to SEQ ID NO: 6222
  chr18:3447897-3447940
  hypo

SEQ ID NO: 54294 - DNA, 235 bp, Homo sapiens; identical to SEQ ID NO: 6223
  chr18:3448077-3448312
  hypo

SEQ ID NO: 54295 - DNA, 70 bp, Homo sapiens; identical to SEQ ID NO: 6224
  chr18:3448323-3448393
  hypo

SEQ ID NO: 54296 - DNA, 127 bp, Homo sapiens; identical to SEQ ID NO: 6225
  chr18:3448402-3448529
  hypo

SEQ ID NO: 54297 - DNA, 36 bp, Homo sapiens; identical to SEQ ID NO: 6226
  chr18:3448759-3448795
  hypo

SEQ ID NO: 54298 - DNA, 31 bp, Homo sapiens; identical to SEQ ID NO: 6227
  chr18:3449164-3449195
  hypo

SEQ ID NO: 54299 - DNA, 571 bp, Homo sapiens; identical to SEQ ID NO: 6228
  chr18:3449232-3449803
  hypo

SEQ ID NO: 54300 - DNA, 57 bp, Homo sapiens; identical to SEQ ID NO: 6229
  chr18:3449827-3449884
  hypo

SEQ ID NO: 54301 - DNA, 411 bp, Homo sapiens; identical to SEQ ID NO: 6230
  chr18:3449885-3450296
  hypo

SEQ ID NO: 54302 - DNA, 174 bp, Homo sapiens; identical to SEQ ID NO: 6231
  chr18:3450306-3450480
  hypo

SEQ ID NO: 54303 - DNA, 452 bp, Homo sapiens; identical to SEQ ID NO: 6232
  chr18:3450493-3450945
  hypo

SEQ ID NO: 54304 - DNA, 64 bp, Homo sapiens; identical to SEQ ID NO: 6233
  chr18:3450951-3451015
  hypo

SEQ ID NO: 54305 - DNA, 70 bp, Homo sapiens; identical to SEQ ID NO: 6234
  chr18:3451023-3451093
  hypo

SEQ ID NO: 54306 - DNA, 40 bp, Homo sapiens; identical to SEQ ID NO: 6237
  chr18:3451458-3451498
  hypo

SEQ ID NO: 54307 - DNA, 77 bp, Homo sapiens; identical to SEQ ID NO: 6238
  chr18:3451508-3451585
  hypo

SEQ ID NO: 54308 - DNA, 116 bp, Homo sapiens; identical to SEQ ID NO: 6239
  chr18:3451589-3451705
  hypo

SEQ ID NO: 54309 - DNA, 193 bp, Homo sapiens; identical to SEQ ID NO: 6240
  chr18:3451708-3451901
  hypo

SEQ ID NO: 54310 - DNA, 56 bp, Homo sapiens; identical to SEQ ID NO: 6241
  chr18:3451904-3451960
  hypo

SEQ ID NO: 54311 - DNA, 64 bp, Homo sapiens; identical to SEQ ID NO: 6242
  chr18:3451971-3452035
  hypo

SEQ ID NO: 54312 - DNA, 43 bp, Homo sapiens; identical to SEQ ID NO: 6243
  chr18:3452053-3452096
  hypo

SEQ ID NO: 54313 - DNA, 161 bp, Homo sapiens; identical to SEQ ID NO: 6244
  chr18:3452103-3452264
  hypo

SEQ ID NO: 54314 - DNA, 43 bp, Homo sapiens; identical to SEQ ID NO: 24384
  chr18:3534579-3534622
  hypo

SEQ ID NO: 54315 - DNA, 39 bp, Homo sapiens; identical to SEQ ID NO: 24385
  chr18:3535410-3535449
  hypo

SEQ ID NO: 54316 - DNA, 33 bp, Homo sapiens; identical to SEQ ID NO: 24388
  chr18:3570504-3570537
  hypo

SEQ ID NO: 54317 - DNA, 31 bp, Homo sapiens; identical to SEQ ID NO: 24390
  chr18:3599046-3599077
  hypo

SEQ ID NO: 54318 - DNA, 31 bp, Homo sapiens; identical to SEQ ID NO: 24391
  chr18:3600254-3600285
  hypo

SEQ ID NO: 54319 - DNA, 36 bp, Homo sapiens; identical to SEQ ID NO: 24392
  chr18:3600530-3600566
  hypo

SEQ ID NO: 54320 - DNA, 31 bp, Homo sapiens; identical to SEQ ID NO: 24393
  chr18:3608038-3608069
  hypo

SEQ ID NO: 54321 - DNA, 41 bp, Homo sapiens; identical to SEQ ID NO: 24394
  chr18:3608074-3608115
  hypo

SEQ ID NO: 54322 - DNA, 61 bp, Homo sapiens; identical to SEQ ID NO: 24395
  chr18:3610086-3610147
  hypo

SEQ ID NO: 54323 - DNA, 31 bp, Homo sapiens; identical to SEQ ID NO: 24397
  chr18:3614529-3614560
  hypo

SEQ ID NO: 54324 - DNA, 31 bp, Homo sapiens; identical to SEQ ID NO: 24399
  chr18:3637283-3637314
  hypo

SEQ ID NO: 54325 - DNA, 31 bp, Homo sapiens; identical to SEQ ID NO: 24400
  chr18:3637344-3637375
  hypo

SEQ ID NO: 54326 - DNA, 59 bp, Homo sapiens; identical to SEQ ID NO: 24401
  chr18:3637376-3637435
  hypo

SEQ ID NO: 54327 - DNA, 31 bp, Homo sapiens; identical to SEQ ID NO: 24405
  chr18:3669034-3669065
  hypo

SEQ ID NO: 54328 - DNA, 80 bp, Homo sapiens; identical to SEQ ID NO: 24406
  chr18:3669444-3669524
  hypo

SEQ ID NO: 54329 - DNA, 44 bp, Homo sapiens; identical to SEQ ID NO: 24408
  chr18:3729157-3729201
  hypo

SEQ ID NO: 54330 - DNA, 31 bp, Homo sapiens; identical to SEQ ID NO: 24409
  chr18:3986861-3986892
  hypo

SEQ ID NO: 54331 - DNA, 55 bp, Homo sapiens; identical to SEQ ID NO: 24410
  chr18:3986940-3986995
  hypo

SEQ ID NO: 54332 - DNA, 35 bp, Homo sapiens; identical to SEQ ID NO: 24411
  chr18:3987022-3987057
  hypo

SEQ ID NO: 54333 - DNA, 31 bp, Homo sapiens; identical to SEQ ID NO: 6245
  chr18:6414307-6414338
  hypo

SEQ ID NO: 54334 - DNA, 37 bp, Homo sapiens; identical to SEQ ID NO: 24413
  chr18:6929828-6929865
  hypo

SEQ ID NO: 54335 - DNA, 70 bp, Homo sapiens; identical to SEQ ID NO: 24414
  chr18:6953008-6953078
  hypo

SEQ ID NO: 54336 - DNA, 34 bp, Homo sapiens; identical to SEQ ID NO: 24415
  chr18:8400563-8400597
  hypo

SEQ ID NO: 54337 - DNA, 44 bp, Homo sapiens; identical to SEQ ID NO: 6248
  chr18:8748271-8748315
  hypo

SEQ ID NO: 54338 - DNA, 45 bp, Homo sapiens; identical to SEQ ID NO: 24419
  chr18:8783991-8784036
  hypo

SEQ ID NO: 54339 - DNA, 31 bp, Homo sapiens; identical to SEQ ID NO: 24420
  chr18:8787324-8787355
  hypo

SEQ ID NO: 54340 - DNA, 31 bp, Homo sapiens; identical to SEQ ID NO: 24421
  chr18:8787356-8787387
  hypo

SEQ ID NO: 54341 - DNA, 31 bp, Homo sapiens; identical to SEQ ID NO: 24422
  chr18:8826026-8826057
  hypo

SEQ ID NO: 54342 - DNA, 43 bp, Homo sapiens; identical to SEQ ID NO: 24423
  chr18:8829962-8830005
  hypo

SEQ ID NO: 54343 - DNA, 62 bp, Homo sapiens; identical to SEQ ID NO: 24424
  chr18:8830078-8830140
  hypo

SEQ ID NO: 54344 - DNA, 1 bp, Homo sapiens
  chr18:9333626-9333627
  hypo
a

SEQ ID NO: 54345 - DNA, 73 bp, Homo sapiens; identical to SEQ ID NO: 24426
  chr18:9417591-9417664
  hypo

SEQ ID NO: 54346 - DNA, 39 bp, Homo sapiens; identical to SEQ ID NO: 24427
  chr18:9417720-9417759
  hypo

SEQ ID NO: 54347 - DNA, 2 bp, Homo sapiens
  chr18:9615429-9615431
  hypo
at

SEQ ID NO: 54348 - DNA, 21 bp, Homo sapiens
  chr18:9615460-9615481
  hypo
atgattcgctttgtcttctaa

SEQ ID NO: 54349 - DNA, 31 bp, Homo sapiens; identical to SEQ ID NO: 24429
  chr18:9659944-9659975
  hypo

SEQ ID NO: 54350 - DNA, 59 bp, Homo sapiens; identical to SEQ ID NO: 24432
  chr18:9797442-9797501
  hypo

SEQ ID NO: 54351 - DNA, 31 bp, Homo sapiens; identical to SEQ ID NO: 24433
  chr18:9797531-9797562
  hypo

SEQ ID NO: 54352 - DNA, 94 bp, Homo sapiens; identical to SEQ ID NO: 24434
  chr18:9800801-9800895
  hypo

SEQ ID NO: 54353 - DNA, 31 bp, Homo sapiens; identical to SEQ ID NO: 24435
  chr18:9800924-9800955
  hypo

SEQ ID NO: 54354 - DNA, 31 bp, Homo sapiens; identical to SEQ ID NO: 24436
  chr18:9805773-9805804
  hypo

SEQ ID NO: 54355 - DNA, 31 bp, Homo sapiens; identical to SEQ ID NO: 24437
  chr18:9833345-9833376
  hypo

SEQ ID NO: 54356 - DNA, 31 bp, Homo sapiens; identical to SEQ ID NO: 24438
  chr18:9833443-9833474
  hypo

SEQ ID NO: 54357 - DNA, 31 bp, Homo sapiens; identical to SEQ ID NO: 24439
  chr18:9883099-9883130
  hypo

SEQ ID NO: 54358 - DNA, 31 bp, Homo sapiens; identical to SEQ ID NO: 24440
  chr18:9883158-9883189
  hypo

SEQ ID NO: 54359 - DNA, 31 bp, Homo sapiens; identical to SEQ ID NO: 24441
  chr18:9887793-9887824
  hypo

SEQ ID NO: 54360 - DNA, 2 bp, Homo sapiens
  chr18:9912766-9912768
  hypo
ac

SEQ ID NO: 54361 - DNA, 31 bp, Homo sapiens; identical to SEQ ID NO: 24443
  chr18:9962363-9962394
  hypo

SEQ ID NO: 54362 - DNA, 31 bp, Homo sapiens; identical to SEQ ID NO: 24444
  chr18:9962432-9962463
  hypo

SEQ ID NO: 54363 - DNA, 31 bp, Homo sapiens; identical to SEQ ID NO: 24445
  chr18:10460166-10460197
  hypo

SEQ ID NO: 54364 - DNA, 31 bp, Homo sapiens; identical to SEQ ID NO: 24448
  chr18:10696517-10696548
  hypo

SEQ ID NO: 54365 - DNA, 31 bp, Homo sapiens; identical to SEQ ID NO: 24449
  chr18:11971653-11971684
  hypo

SEQ ID NO: 54366 - DNA, 31 bp, Homo sapiens; identical to SEQ ID NO: 24450
  chr18:12291393-12291424
  hypo

SEQ ID NO: 54367 - DNA, 31 bp, Homo sapiens; identical to SEQ ID NO: 24451
  chr18:12380135-12380166
  hypo

SEQ ID NO: 54368 - DNA, 31 bp, Homo sapiens; identical to SEQ ID NO: 24452
  chr18:12460293-12460324
  hypo

SEQ ID NO: 54369 - DNA, 31 bp, Homo sapiens; identical to SEQ ID NO: 24453
  chr18:12460327-12460358
  hypo

SEQ ID NO: 54370 - DNA, 39 bp, Homo sapiens; identical to SEQ ID NO: 24454
  chr18:12460416-12460455
  hypo

SEQ ID NO: 54371 - DNA, 31 bp, Homo sapiens; identical to SEQ ID NO: 24455
  chr18:12749282-12749313
  hypo

SEQ ID NO: 54372 - DNA, 7 bp, Homo sapiens
  chr18:13135169-13135176
  hypo
gccgagg

SEQ ID NO: 54373 - DNA, 13 bp, Homo sapiens
  chr18:13135194-13135207
  hypo
agggctgccagca

SEQ ID NO: 54374 - DNA, 82 bp, Homo sapiens; identical to SEQ ID NO: 24459
  chr18:13135236-13135318
  hypo

SEQ ID NO: 54375 - DNA, 31 bp, Homo sapiens; identical to SEQ ID NO: 24461
  chr18:18997519-18997550
  hypo

SEQ ID NO: 54376 - DNA, 31 bp, Homo sapiens; identical to SEQ ID NO: 24462
  chr18:19079791-19079822
  hypo

SEQ ID NO: 54377 - DNA, 31 bp, Homo sapiens; identical to SEQ ID NO: 24464
  chr18:19775129-19775160
  hypo

SEQ ID NO: 54378 - DNA, 35 bp, Homo sapiens; identical to SEQ ID NO: 24465
  chr18:19778301-19778336
  hypo

SEQ ID NO: 54379 - DNA, 31 bp, Homo sapiens; identical to SEQ ID NO: 24466
  chr18:20668996-20669027
  hypo

SEQ ID NO: 54380 - DNA, 75 bp, Homo sapiens; identical to SEQ ID NO: 6260
  chr18:20715562-20715637
  hypo

SEQ ID NO: 54381 - DNA, 31 bp, Homo sapiens; identical to SEQ ID NO: 24468
  chr18:21164542-21164573
  hypo

SEQ ID NO: 54382 - DNA, 7 bp, Homo sapiens
  chr18:21164580-21164587
  hypo
ccccaaa

SEQ ID NO: 54383 - DNA, 6 bp, Homo sapiens
  chr18:21164610-21164616
  hypo
tcagga

SEQ ID NO: 54384 - DNA, 88 bp, Homo sapiens; identical to SEQ ID NO: 6264
  chr18:21242502-21242590
  hypo

SEQ ID NO: 54385 - DNA, 89 bp, Homo sapiens; identical to SEQ ID NO: 6265
  chr18:21242592-21242681
  hypo

SEQ ID NO: 54386 - DNA, 31 bp, Homo sapiens; identical to SEQ ID NO: 24472
  chr18:21314132-21314163
  hypo

SEQ ID NO: 54387 - DNA, 31 bp, Homo sapiens; identical to SEQ ID NO: 24473
  chr18:21338239-21338270
  hypo

SEQ ID NO: 54388 - DNA, 31 bp, Homo sapiens; identical to SEQ ID NO: 24474
  chr18:21388619-21388650
  hypo

SEQ ID NO: 54389 - DNA, 62 bp, Homo sapiens; identical to SEQ ID NO: 24475
  chr18:21388652-21388714
  hypo

SEQ ID NO: 54390 - DNA, 52 bp, Homo sapiens; identical to SEQ ID NO: 24476
  chr18:21388771-21388823
  hypo

SEQ ID NO: 54391 - DNA, 31 bp, Homo sapiens; identical to SEQ ID NO: 6272
  chr18:21393784-21393815
  hypo

SEQ ID NO: 54392 - DNA, 31 bp, Homo sapiens; identical to SEQ ID NO: 24478
  chr18:21422658-21422689
  hypo

SEQ ID NO: 54393 - DNA, 31 bp, Homo sapiens; identical to SEQ ID NO: 24479
  chr18:21422701-21422732
  hypo

SEQ ID NO: 54394 - DNA, 43 bp, Homo sapiens; identical to SEQ ID NO: 24480
  chr18:21426404-21426447
  hypo

SEQ ID NO: 54395 - DNA, 31 bp, Homo sapiens; identical to SEQ ID NO: 24481
  chr18:21441717-21441748
  hypo

SEQ ID NO: 54396 - DNA, 31 bp, Homo sapiens; identical to SEQ ID NO: 24482
  chr18:21459202-21459233
  hypo

SEQ ID NO: 54397 - DNA, 31 bp, Homo sapiens; identical to SEQ ID NO: 24483
  chr18:21520175-21520206
  hypo

SEQ ID NO: 54398 - DNA, 31 bp, Homo sapiens; identical to SEQ ID NO: 24484
  chr18:21536808-21536839
  hypo

SEQ ID NO: 54399 - DNA, 248 bp, Homo sapiens; identical to SEQ ID NO: 6273
  chr18:21594466-21594714
  hypo

SEQ ID NO: 54400 - DNA, 31 bp, Homo sapiens; identical to SEQ ID NO: 24487
  chr18:21702094-21702125
  hypo

SEQ ID NO: 54401 - DNA, 37 bp, Homo sapiens; identical to SEQ ID NO: 24488
  chr18:21702131-21702168
  hypo

SEQ ID NO: 54402 - DNA, 31 bp, Homo sapiens; identical to SEQ ID NO: 24489
  chr18:21702171-21702202
  hypo

SEQ ID NO: 54403 - DNA, 31 bp, Homo sapiens; identical to SEQ ID NO: 24490
  chr18:21730971-21731002
  hypo

SEQ ID NO: 54404 - DNA, 31 bp, Homo sapiens; identical to SEQ ID NO: 24491
  chr18:21779334-21779365
  hypo

SEQ ID NO: 54405 - DNA, 30 bp, Homo sapiens; identical to SEQ ID NO: 24492
  chr18:21839134-21839164
  hypo

SEQ ID NO: 54406 - DNA, 31 bp, Homo sapiens; identical to SEQ ID NO: 24493
  chr18:22596097-22596128
  hypo

SEQ ID NO: 54407 - DNA, 31 bp, Homo sapiens; identical to SEQ ID NO: 6282
  chr18:22653838-22653869
  hypo

SEQ ID NO: 54408 - DNA, 31 bp, Homo sapiens; identical to SEQ ID NO: 24495
  chr18:23652340-23652371
  hypo

SEQ ID NO: 54409 - DNA, 31 bp, Homo sapiens; identical to SEQ ID NO: 24497
  chr18:24409813-24409844
  hypo

SEQ ID NO: 54410 - DNA, 31 bp, Homo sapiens; identical to SEQ ID NO: 24498
  chr18:27426191-27426222
  hypo

SEQ ID NO: 54411 - DNA, 61 bp, Homo sapiens; identical to SEQ ID NO: 24499
  chr18:28934935-28934996
  hypo

SEQ ID NO: 54412 - DNA, 31 bp, Homo sapiens; identical to SEQ ID NO: 24500
  chr18:28935022-28935053
  hypo

SEQ ID NO: 54413 - DNA, 31 bp, Homo sapiens; identical to SEQ ID NO: 24501
  chr18:28935055-28935086
  hypo

SEQ ID NO: 54414 - DNA, 31 bp, Homo sapiens; identical to SEQ ID NO: 24502
  chr18:29114802-29114833
  hypo

SEQ ID NO: 54415 - DNA, 31 bp, Homo sapiens; identical to SEQ ID NO: 24503
  chr18:29199776-29199807
  hypo

SEQ ID NO: 54416 - DNA, 31 bp, Homo sapiens; identical to SEQ ID NO: 24504
  chr18:29200393-29200424
  hypo

SEQ ID NO: 54417 - DNA, 37 bp, Homo sapiens; identical to SEQ ID NO: 6292
  chr18:29265159-29265196
  hypo

SEQ ID NO: 54418 - DNA, 35 bp, Homo sapiens; identical to SEQ ID NO: 24507
  chr18:29269412-29269447
  hypo

SEQ ID NO: 54419 - DNA, 53 bp, Homo sapiens; identical to SEQ ID NO: 24508
  chr18:29325110-29325163
  hypo

SEQ ID NO: 54420 - DNA, 62 bp, Homo sapiens; identical to SEQ ID NO: 24509
  chr18:29366853-29366915
  hypo

SEQ ID NO: 54421 - DNA, 31 bp, Homo sapiens; identical to SEQ ID NO: 24510
  chr18:29391614-29391645
  hypo

SEQ ID NO: 54422 - DNA, 31 bp, Homo sapiens; identical to SEQ ID NO: 24512
  chr18:29593107-29593138
  hypo

SEQ ID NO: 54423 - DNA, 43 bp, Homo sapiens; identical to SEQ ID NO: 24513
  chr18:29610272-29610315
  hypo

SEQ ID NO: 54424 - DNA, 31 bp, Homo sapiens; identical to SEQ ID NO: 24514
  chr18:29610366-29610397
  hypo

SEQ ID NO: 54425 - DNA, 31 bp, Homo sapiens; identical to SEQ ID NO: 24515
  chr18:29610399-29610430
  hypo

SEQ ID NO: 54426 - DNA, 31 bp, Homo sapiens; identical to SEQ ID NO: 24517
  chr18:29670903-29670934
  hypo

SEQ ID NO: 54427 - DNA, 132 bp, Homo sapiens; identical to SEQ ID NO: 6293
  chr18:30050220-30050352
  hypo

SEQ ID NO: 54428 - DNA, 357 bp, Homo sapiens; identical to SEQ ID NO: 6294
  chr18:30050357-30050714
  hypo

SEQ ID NO: 54429 - DNA, 46 bp, Homo sapiens; identical to SEQ ID NO: 6295
  chr18:30050715-30050761
  hypo

SEQ ID NO: 54430 - DNA, 40 bp, Homo sapiens; identical to SEQ ID NO: 6296
  chr18:30050762-30050802
  hypo

SEQ ID NO: 54431 - DNA, 99 bp, Homo sapiens; identical to SEQ ID NO: 6297
  chr18:30050987-30051086
  hypo

SEQ ID NO: 54432 - DNA, 31 bp, Homo sapiens; identical to SEQ ID NO: 6298
  chr18:30051112-30051143
  hypo

SEQ ID NO: 54433 - DNA, 35 bp, Homo sapiens; identical to SEQ ID NO: 6299
  chr18:30051166-30051201
  hypo

SEQ ID NO: 54434 - DNA, 31 bp, Homo sapiens; identical to SEQ ID NO: 24527
  chr18:33036599-33036630
  hypo

SEQ ID NO: 54435 - DNA, 31 bp, Homo sapiens; identical to SEQ ID NO: 24528
  chr18:33041504-33041535
  hypo

SEQ ID NO: 54436 - DNA, 40 bp, Homo sapiens; identical to SEQ ID NO: 24529
  chr18:33041583-33041623
  hypo

SEQ ID NO: 54437 - DNA, 31 bp, Homo sapiens; identical to SEQ ID NO: 6305
  chr18:33077969-33078000
  hypo

SEQ ID NO: 54438 - DNA, 35 bp, Homo sapiens; identical to SEQ ID NO: 6306
  chr18:33078013-33078048
  hypo

SEQ ID NO: 54439 - DNA, 31 bp, Homo sapiens; identical to SEQ ID NO: 6310
  chr18:33766964-33766995
  hypo

SEQ ID NO: 54440 - DNA, 183 bp, Homo sapiens; identical to SEQ ID NO: 6311
  chr18:33767006-33767189
  hypo

SEQ ID NO: 54441 - DNA, 31 bp, Homo sapiens; identical to SEQ ID NO: 24535
  chr18:33793348-33793379
  hypo

SEQ ID NO: 54442 - DNA, 31 bp, Homo sapiens; identical to SEQ ID NO: 24536
  chr18:34297788-34297819
  hypo

SEQ ID NO: 54443 - DNA, 50 bp, Homo sapiens; identical to SEQ ID NO: 24537
  chr18:34297827-34297877
  hypo

SEQ ID NO: 54444 - DNA, 31 bp, Homo sapiens; identical to SEQ ID NO: 24538
  chr18:34297889-34297920
  hypo

SEQ ID NO: 54445 - DNA, 31 bp, Homo sapiens; identical to SEQ ID NO: 24539
  chr18:34889651-34889682
  hypo

SEQ ID NO: 54446 - DNA, 70 bp, Homo sapiens; identical to SEQ ID NO: 24540
  chr18:36889401-36889471
  hypo

SEQ ID NO: 54447 - DNA, 37 bp, Homo sapiens; identical to SEQ ID NO: 24541
  chr18:37198432-37198469
  hypo

SEQ ID NO: 54448 - DNA, 31 bp, Homo sapiens; identical to SEQ ID NO: 24542
  chr18:37382687-37382718
  hypo

SEQ ID NO: 54449 - DNA, 54 bp, Homo sapiens; identical to SEQ ID NO: 6314
  chr18:42258997-42259051
  hypo

SEQ ID NO: 54450 - DNA, 58 bp, Homo sapiens; identical to SEQ ID NO: 6315
  chr18:42259072-42259130
  hypo

SEQ ID NO: 54451 - DNA, 106 bp, Homo sapiens; identical to SEQ ID NO: 6317
  chr18:42260145-42260251
  hypo

SEQ ID NO: 54452 - DNA, 31 bp, Homo sapiens; identical to SEQ ID NO: 6318
  chr18:42260319-42260350
  hypo

SEQ ID NO: 54453 - DNA, 40 bp, Homo sapiens; identical to SEQ ID NO: 6319
  chr18:42260531-42260571
  hypo

SEQ ID NO: 54454 - DNA, 31 bp, Homo sapiens; identical to SEQ ID NO: 24551
  chr18:43599471-43599502
  hypo

SEQ ID NO: 54455 - DNA, 31 bp, Homo sapiens; identical to SEQ ID NO: 24552
  chr18:43605713-43605744
  hypo

SEQ ID NO: 54456 - DNA, 30 bp, Homo sapiens; identical to SEQ ID NO: 24553
  chr18:43606965-43606995
  hypo

SEQ ID NO: 54457 - DNA, 31 bp, Homo sapiens; identical to SEQ ID NO: 24554
  chr18:43613982-43614013
  hypo

SEQ ID NO: 54458 - DNA, 49 bp, Homo sapiens; identical to SEQ ID NO: 24555
  chr18:43614046-43614095
  hypo

SEQ ID NO: 54459 - DNA, 31 bp, Homo sapiens; identical to SEQ ID NO: 24556
  chr18:43614103-43614134
  hypo

SEQ ID NO: 54460 - DNA, 31 bp, Homo sapiens; identical to SEQ ID NO: 24557
  chr18:43614145-43614176
  hypo

SEQ ID NO: 54461 - DNA, 31 bp, Homo sapiens; identical to SEQ ID NO: 24558
  chr18:43627251-43627282
  hypo

SEQ ID NO: 54462 - DNA, 31 bp, Homo sapiens; identical to SEQ ID NO: 24559
  chr18:43637142-43637173
  hypo

SEQ ID NO: 54463 - DNA, 34 bp, Homo sapiens; identical to SEQ ID NO: 6323
  chr18:43924113-43924147
  hypo

SEQ ID NO: 54464 - DNA, 31 bp, Homo sapiens; identical to SEQ ID NO: 24563
  chr18:44700790-44700821
  hypo

SEQ ID NO: 54465 - DNA, 34 bp, Homo sapiens; identical to SEQ ID NO: 24564
  chr18:44701014-44701048
  hypo

SEQ ID NO: 54466 - DNA, 31 bp, Homo sapiens; identical to SEQ ID NO: 24565
  chr18:44701081-44701112
  hypo

SEQ ID NO: 54467 - DNA, 31 bp, Homo sapiens; identical to SEQ ID NO: 24567
  chr18:45443477-45443508
  hypo

SEQ ID NO: 54468 - DNA, 31 bp, Homo sapiens; identical to SEQ ID NO: 24568
  chr18:45536044-45536075
  hypo

SEQ ID NO: 54469 - DNA, 31 bp, Homo sapiens; identical to SEQ ID NO: 24569
  chr18:45554568-45554599
  hypo

SEQ ID NO: 54470 - DNA, 58 bp, Homo sapiens; identical to SEQ ID NO: 24570
  chr18:45554645-45554703
  hypo

SEQ ID NO: 54471 - DNA, 62 bp, Homo sapiens; identical to SEQ ID NO: 24571
  chr18:45554707-45554769
  hypo

SEQ ID NO: 54472 - DNA, 31 bp, Homo sapiens; identical to SEQ ID NO: 24572
  chr18:45567065-45567096
  hypo

SEQ ID NO: 54473 - DNA, 40 bp, Homo sapiens; identical to SEQ ID NO: 24573
  chr18:45579500-45579540
  hypo

SEQ ID NO: 54474 - DNA, 31 bp, Homo sapiens; identical to SEQ ID NO: 24574
  chr18:45579561-45579592
  hypo

SEQ ID NO: 54475 - DNA, 35 bp, Homo sapiens; identical to SEQ ID NO: 24575
  chr18:45579600-45579635
  hypo

SEQ ID NO: 54476 - DNA, 31 bp, Homo sapiens; identical to SEQ ID NO: 24576
  chr18:45579659-45579690
  hypo

SEQ ID NO: 54477 - DNA, 31 bp, Homo sapiens; identical to SEQ ID NO: 24577
  chr18:45594042-45594073
  hypo

SEQ ID NO: 54478 - DNA, 107 bp, Homo sapiens; identical to SEQ ID NO: 6327
  chr18:45687996-45688103
  hypo

SEQ ID NO: 54479 - DNA, 83 bp, Homo sapiens; identical to SEQ ID NO: 6328
  chr18:45688153-45688236
  hypo

SEQ ID NO: 54480 - DNA, 31 bp, Homo sapiens; identical to SEQ ID NO: 24581
  chr18:45822972-45823003
  hypo

SEQ ID NO: 54481 - DNA, 31 bp, Homo sapiens; identical to SEQ ID NO: 24582
  chr18:45854284-45854315
  hypo

SEQ ID NO: 54482 - DNA, 67 bp, Homo sapiens; identical to SEQ ID NO: 24583
  chr18:45917049-45917116
  hypo

SEQ ID NO: 54483 - DNA, 36 bp, Homo sapiens; identical to SEQ ID NO: 24584
  chr18:45917168-45917204
  hypo

SEQ ID NO: 54484 - DNA, 103 bp, Homo sapiens; identical to SEQ ID NO: 6331
  chr18:45935847-45935950
  hypo

SEQ ID NO: 54485 - DNA, 141 bp, Homo sapiens; identical to SEQ ID NO: 6332
  chr18:45936025-45936166
  hypo

SEQ ID NO: 54486 - DNA, 471 bp, Homo sapiens; identical to SEQ ID NO: 6333
  chr18:45936197-45936668
  hypo

SEQ ID NO: 54487 - DNA, 31 bp, Homo sapiens; identical to SEQ ID NO: 6334
  chr18:45936826-45936857
  hypo

SEQ ID NO: 54488 - DNA, 44 bp, Homo sapiens; identical to SEQ ID NO: 6335
  chr18:45936897-45936941
  hypo

SEQ ID NO: 54489 - DNA, 52 bp, Homo sapiens; identical to SEQ ID NO: 6336
  chr18:45936946-45936998
  hypo

SEQ ID NO: 54490 - DNA, 41 bp, Homo sapiens; identical to SEQ ID NO: 6337
  chr18:45937002-45937043
  hypo

SEQ ID NO: 54491 - DNA, 87 bp, Homo sapiens; identical to SEQ ID NO: 6342
  chr18:46065840-46065927
  hypo

SEQ ID NO: 54492 - DNA, 55 bp, Homo sapiens; identical to SEQ ID NO: 6343
  chr18:46065928-46065983
  hypo

SEQ ID NO: 54493 - DNA, 131 bp, Homo sapiens; identical to SEQ ID NO: 6344
  chr18:46066028-46066159
  hypo

SEQ ID NO: 54494 - DNA, 234 bp, Homo sapiens; identical to SEQ ID NO: 6345
  chr18:46066173-46066407
  hypo

SEQ ID NO: 54495 - DNA, 70 bp, Homo sapiens; identical to SEQ ID NO: 6346
  chr18:46066469-46066539
  hypo

SEQ ID NO: 54496 - DNA, 36 bp, Homo sapiens; identical to SEQ ID NO: 6352
  chr18:46067208-46067244
  hypo

SEQ ID NO: 54497 - DNA, 124 bp, Homo sapiens; identical to SEQ ID NO: 6353
  chr18:46067437-46067561
  hypo

SEQ ID NO: 54498 - DNA, 153 bp, Homo sapiens; identical to SEQ ID NO: 6354
  chr18:46067570-46067723
  hypo

SEQ ID NO: 54499 - DNA, 31 bp, Homo sapiens; identical to SEQ ID NO: 24600
  chr18:46142221-46142252
  hypo

SEQ ID NO: 54500 - DNA, 2 bp, Homo sapiens
  chr18:46142661-46142663
  hypo
tt

SEQ ID NO: 54501 - DNA, 31 bp, Homo sapiens; identical to SEQ ID NO: 6357
  chr18:46476386-46476417
  hypo

SEQ ID NO: 54502 - DNA, 37 bp, Homo sapiens; identical to SEQ ID NO: 24604
  chr18:46501831-46501868
  hypo

SEQ ID NO: 54503 - DNA, 2 bp, Homo sapiens
  chr18:47019806-47019808
  hypo
tc

SEQ ID NO: 54504 - DNA, 6 bp, Homo sapiens
  chr18:47019893-47019899
  hypo
taatcc

SEQ ID NO: 54505 - DNA, 45 bp, Homo sapiens; identical to SEQ ID NO: 24609
  chr18:47285354-47285399
  hypo

SEQ ID NO: 54506 - DNA, 39 bp, Homo sapiens; identical to SEQ ID NO: 24610
  chr18:47285409-47285448
  hypo

SEQ ID NO: 54507 - DNA, 31 bp, Homo sapiens; identical to SEQ ID NO: 24611
  chr18:47500682-47500713
  hypo

SEQ ID NO: 54508 - DNA, 398 bp, Homo sapiens; identical to SEQ ID NO: 6363
  chr18:47720984-47721382
  hypo

SEQ ID NO: 54509 - DNA, 61 bp, Homo sapiens; identical to SEQ ID NO: 6364
  chr18:47721459-47721520
  hypo

SEQ ID NO: 54510 - DNA, 31 bp, Homo sapiens; identical to SEQ ID NO: 24617
  chr18:48135893-48135924
  hypo

SEQ ID NO: 54511 - DNA, 31 bp, Homo sapiens; identical to SEQ ID NO: 24618
  chr18:48256054-48256085
  hypo

SEQ ID NO: 54512 - DNA, 31 bp, Homo sapiens; identical to SEQ ID NO: 24624
  chr18:55138397-55138428
  hypo

SEQ ID NO: 54513 - DNA, 31 bp, Homo sapiens; identical to SEQ ID NO: 24625
  chr18:55373610-55373641
  hypo

SEQ ID NO: 54514 - DNA, 31 bp, Homo sapiens; identical to SEQ ID NO: 24626
  chr18:55423988-55424019
  hypo

SEQ ID NO: 54515 - DNA, 31 bp, Homo sapiens; identical to SEQ ID NO: 24627
  chr18:55425542-55425573
  hypo

SEQ ID NO: 54516 - DNA, 31 bp, Homo sapiens; identical to SEQ ID NO: 24630
  chr18:55894720-55894751
  hypo

SEQ ID NO: 54517 - DNA, 31 bp, Homo sapiens; identical to SEQ ID NO: 24631
  chr18:55945679-55945710
  hypo

SEQ ID NO: 54518 - DNA, 75 bp, Homo sapiens; identical to SEQ ID NO: 24632
  chr18:55945750-55945825
  hypo

SEQ ID NO: 54519 - DNA, 31 bp, Homo sapiens; identical to SEQ ID NO: 24633
  chr18:55945833-55945864
  hypo

SEQ ID NO: 54520 - DNA, 31 bp, Homo sapiens; identical to SEQ ID NO: 24634
  chr18:55976208-55976239
  hypo

SEQ ID NO: 54521 - DNA, 39 bp, Homo sapiens; identical to SEQ ID NO: 24635
  chr18:56036806-56036845
  hypo

SEQ ID NO: 54522 - DNA, 2 bp, Homo sapiens
  chr18:56483561-56483563
  hypo
ga

SEQ ID NO: 54523 - DNA, 2 bp, Homo sapiens
  chr18:56483917-56483919
  hypo
ta

SEQ ID NO: 54524 - DNA, 19 bp, Homo sapiens
  chr18:56483943-56483962
  hypo
cggtggctcacgcctgtaa

SEQ ID NO: 54525 - DNA, 31 bp, Homo sapiens; identical to SEQ ID NO: 24639
  chr18:59483671-59483702
  hypo

SEQ ID NO: 54526 - DNA, 49 bp, Homo sapiens; identical to SEQ ID NO: 24640
  chr18:59533472-59533521
  hypo

SEQ ID NO: 54527 - DNA, 39 bp, Homo sapiens; identical to SEQ ID NO: 24641
  chr18:59533523-59533562
  hypo

SEQ ID NO: 54528 - DNA, 31 bp, Homo sapiens; identical to SEQ ID NO: 24642
  chr18:59533644-59533675
  hypo

SEQ ID NO: 54529 - DNA, 40 bp, Homo sapiens; identical to SEQ ID NO: 6387
  chr18:59992690-59992730
  hypo

SEQ ID NO: 54530 - DNA, 31 bp, Homo sapiens; identical to SEQ ID NO: 24644
  chr18:60010358-60010389
  hypo

SEQ ID NO: 54531 - DNA, 31 bp, Homo sapiens; identical to SEQ ID NO: 24645
  chr18:60010760-60010791
  hypo

SEQ ID NO: 54532 - DNA, 51 bp, Homo sapiens; identical to SEQ ID NO: 24646
  chr18:60077429-60077480
  hypo

SEQ ID NO: 54533 - DNA, 31 bp, Homo sapiens; identical to SEQ ID NO: 24647
  chr18:60077489-60077520
  hypo

SEQ ID NO: 54534 - DNA, 31 bp, Homo sapiens; identical to SEQ ID NO: 24648
  chr18:60077549-60077580
  hypo

SEQ ID NO: 54535 - DNA, 31 bp, Homo sapiens; identical to SEQ ID NO: 24649
  chr18:60077587-60077618
  hypo

SEQ ID NO: 54536 - DNA, 31 bp, Homo sapiens; identical to SEQ ID NO: 24650
  chr18:60117013-60117044
  hypo

SEQ ID NO: 54537 - DNA, 53 bp, Homo sapiens; identical to SEQ ID NO: 24651
  chr18:60117059-60117112
  hypo

SEQ ID NO: 54538 - DNA, 31 bp, Homo sapiens; identical to SEQ ID NO: 24652
  chr18:60117147-60117178
  hypo

SEQ ID NO: 54539 - DNA, 104 bp, Homo sapiens; identical to SEQ ID NO: 24653
  chr18:60120641-60120745
  hypo

SEQ ID NO: 54540 - DNA, 31 bp, Homo sapiens; identical to SEQ ID NO: 24654
  chr18:60120804-60120835
  hypo

SEQ ID NO: 54541 - DNA, 32 bp, Homo sapiens; identical to SEQ ID NO: 24655
  chr18:60127357-60127389
  hypo

SEQ ID NO: 54542 - DNA, 31 bp, Homo sapiens; identical to SEQ ID NO: 24656
  chr18:60129833-60129864
  hypo

SEQ ID NO: 54543 - DNA, 31 bp, Homo sapiens; identical to SEQ ID NO: 24657
  chr18:60154517-60154548
  hypo

SEQ ID NO: 54544 - DNA, 31 bp, Homo sapiens; identical to SEQ ID NO: 24658
  chr18:60154556-60154587
  hypo

SEQ ID NO: 54545 - DNA, 43 bp, Homo sapiens; identical to SEQ ID NO: 24659
  chr18:60154596-60154639
  hypo

SEQ ID NO: 54546 - DNA, 69 bp, Homo sapiens; identical to SEQ ID NO: 6389
  chr18:60189546-60189615
  hypo

SEQ ID NO: 54547 - DNA, 79 bp, Homo sapiens; identical to SEQ ID NO: 6390
  chr18:60189626-60189705
  hypo

SEQ ID NO: 54548 - DNA, 88 bp, Homo sapiens; identical to SEQ ID NO: 6391
  chr18:60189824-60189912
  hypo

SEQ ID NO: 54549 - DNA, 79 bp, Homo sapiens; identical to SEQ ID NO: 6392
  chr18:60190084-60190163
  hypo

SEQ ID NO: 54550 - DNA, 188 bp, Homo sapiens; identical to SEQ ID NO: 6393
  chr18:60190165-60190353
  hypo

SEQ ID NO: 54551 - DNA, 57 bp, Homo sapiens; identical to SEQ ID NO: 6394
  chr18:60190443-60190500
  hypo

SEQ ID NO: 54552 - DNA, 204 bp, Homo sapiens; identical to SEQ ID NO: 6395
  chr18:60190610-60190814
  hypo

SEQ ID NO: 54553 - DNA, 518 bp, Homo sapiens; identical to SEQ ID NO: 6396
  chr18:60190846-60191364
  hypo

SEQ ID NO: 54554 - DNA, 60 bp, Homo sapiens; identical to SEQ ID NO: 6397
  chr18:60191440-60191500
  hypo

SEQ ID NO: 54555 - DNA, 193 bp, Homo sapiens; identical to SEQ ID NO: 6398
  chr18:60191503-60191696
  hypo

SEQ ID NO: 54556 - DNA, 96 bp, Homo sapiens; identical to SEQ ID NO: 6399
  chr18:60191978-60192074
  hypo

SEQ ID NO: 54557 - DNA, 31 bp, Homo sapiens; identical to SEQ ID NO: 6400
  chr18:60193831-60193862
  hypo

SEQ ID NO: 54558 - DNA, 92 bp, Homo sapiens; identical to SEQ ID NO: 6401
  chr18:60194121-60194213
  hypo

SEQ ID NO: 54559 - DNA, 43 bp, Homo sapiens; identical to SEQ ID NO: 24673
  chr18:60210293-60210336
  hypo

SEQ ID NO: 54560 - DNA, 88 bp, Homo sapiens; identical to SEQ ID NO: 24674
  chr18:60210352-60210440
  hypo

SEQ ID NO: 54561 - DNA, 31 bp, Homo sapiens; identical to SEQ ID NO: 24675
  chr18:60210719-60210750
  hypo

SEQ ID NO: 54562 - DNA, 47 bp, Homo sapiens; identical to SEQ ID NO: 24677
  chr18:60216495-60216542
  hypo

SEQ ID NO: 54563 - DNA, 34 bp, Homo sapiens; identical to SEQ ID NO: 24678
  chr18:60217645-60217679
  hypo

SEQ ID NO: 54564 - DNA, 31 bp, Homo sapiens; identical to SEQ ID NO: 24679
  chr18:60217693-60217724
  hypo

SEQ ID NO: 54565 - DNA, 31 bp, Homo sapiens; identical to SEQ ID NO: 24680
  chr18:60217729-60217760
  hypo

SEQ ID NO: 54566 - DNA, 31 bp, Homo sapiens; identical to SEQ ID NO: 24681
  chr18:60217780-60217811
  hypo

SEQ ID NO: 54567 - DNA, 47 bp, Homo sapiens; identical to SEQ ID NO: 24682
  chr18:60229134-60229181
  hypo

SEQ ID NO: 54568 - DNA, 43 bp, Homo sapiens; identical to SEQ ID NO: 24685
  chr18:60234751-60234794
  hypo

SEQ ID NO: 54569 - DNA, 35 bp, Homo sapiens; identical to SEQ ID NO: 24687
  chr18:60242134-60242169
  hypo

SEQ ID NO: 54570 - DNA, 31 bp, Homo sapiens; identical to SEQ ID NO: 24688
  chr18:60254709-60254740
  hypo

SEQ ID NO: 54571 - DNA, 31 bp, Homo sapiens; identical to SEQ ID NO: 24689
  chr18:60273153-60273184
  hypo

SEQ ID NO: 54572 - DNA, 31 bp, Homo sapiens; identical to SEQ ID NO: 24690
  chr18:60273193-60273224
  hypo

SEQ ID NO: 54573 - DNA, 117 bp, Homo sapiens; identical to SEQ ID NO: 6402
  chr18:60382938-60383055
  hypo

SEQ ID NO: 54574 - DNA, 55 bp, Homo sapiens; identical to SEQ ID NO: 6403
  chr18:60383085-60383140
  hypo

SEQ ID NO: 54575 - DNA, 464 bp, Homo sapiens; identical to SEQ ID NO: 6404
  chr18:60383150-60383614
  hypo

SEQ ID NO: 54576 - DNA, 57 bp, Homo sapiens; identical to SEQ ID NO: 6405
  chr18:60383661-60383718
  hypo

SEQ ID NO: 54577 - DNA, 159 bp, Homo sapiens; identical to SEQ ID NO: 6406
  chr18:60384006-60384165
  hypo

SEQ ID NO: 54578 - DNA, 82 bp, Homo sapiens; identical to SEQ ID NO: 24699
  chr18:60523277-60523359
  hypo

SEQ ID NO: 54579 - DNA, 31 bp, Homo sapiens; identical to SEQ ID NO: 24700
  chr18:60523376-60523407
  hypo

SEQ ID NO: 54580 - DNA, 34 bp, Homo sapiens; identical to SEQ ID NO: 24701
  chr18:60523430-60523464
  hypo

SEQ ID NO: 54581 - DNA, 34 bp, Homo sapiens; identical to SEQ ID NO: 24702
  chr18:60534963-60534997
  hypo

SEQ ID NO: 54582 - DNA, 36 bp, Homo sapiens; identical to SEQ ID NO: 24703
  chr18:60549765-60549801
  hypo

SEQ ID NO: 54583 - DNA, 31 bp, Homo sapiens; identical to SEQ ID NO: 24704
  chr18:60614350-60614381
  hypo

SEQ ID NO: 54584 - DNA, 71 bp, Homo sapiens; identical to SEQ ID NO: 24705
  chr18:60645389-60645460
  hypo

SEQ ID NO: 54585 - DNA, 49 bp, Homo sapiens; identical to SEQ ID NO: 24706
  chr18:60645492-60645541
  hypo

SEQ ID NO: 54586 - DNA, 39 bp, Homo sapiens; identical to SEQ ID NO: 24707
  chr18:60645553-60645592
  hypo

SEQ ID NO: 54587 - DNA, 89 bp, Homo sapiens; identical to SEQ ID NO: 24708
  chr18:60645978-60646067
  hypo

SEQ ID NO: 54588 - DNA, 111 bp, Homo sapiens; identical to SEQ ID NO: 24709
  chr18:60646078-60646189
  hypo

SEQ ID NO: 54589 - DNA, 44 bp, Homo sapiens; identical to SEQ ID NO: 24710
  chr18:60654358-60654402
  hypo

SEQ ID NO: 54590 - DNA, 31 bp, Homo sapiens; identical to SEQ ID NO: 24711
  chr18:60675741-60675772
  hypo

SEQ ID NO: 54591 - DNA, 31 bp, Homo sapiens; identical to SEQ ID NO: 24712
  chr18:61164471-61164502
  hypo

SEQ ID NO: 54592 - DNA, 80 bp, Homo sapiens; identical to SEQ ID NO: 6411
  chr18:67955796-67955876
  hypo

SEQ ID NO: 54593 - DNA, 31 bp, Homo sapiens; identical to SEQ ID NO: 6412
  chr18:67955915-67955946
  hypo

SEQ ID NO: 54594 - DNA, 60 bp, Homo sapiens; identical to SEQ ID NO: 6413
  chr18:67956753-67956813
  hypo

SEQ ID NO: 54595 - DNA, 93 bp, Homo sapiens; identical to SEQ ID NO: 6414
  chr18:67956838-67956931
  hypo

SEQ ID NO: 54596 - DNA, 31 bp, Homo sapiens; identical to SEQ ID NO: 24720
  chr18:67985433-67985464
  hypo

SEQ ID NO: 54597 - DNA, 31 bp, Homo sapiens; identical to SEQ ID NO: 24721
  chr18:67991163-67991194
  hypo

SEQ ID NO: 54598 - DNA, 35 bp, Homo sapiens; identical to SEQ ID NO: 24722
  chr18:67991239-67991274
  hypo

SEQ ID NO: 54599 - DNA, 31 bp, Homo sapiens; identical to SEQ ID NO: 24723
  chr18:67991979-67992010
  hypo

SEQ ID NO: 54600 - DNA, 40 bp, Homo sapiens; identical to SEQ ID NO: 24724
  chr18:67992049-67992089
  hypo

SEQ ID NO: 54601 - DNA, 118 bp, Homo sapiens; identical to SEQ ID NO: 24725
  chr18:67992232-67992350
  hypo

SEQ ID NO: 54602 - DNA, 31 bp, Homo sapiens; identical to SEQ ID NO: 24726
  chr18:67992599-67992630
  hypo

SEQ ID NO: 54603 - DNA, 65 bp, Homo sapiens; identical to SEQ ID NO: 24727
  chr18:67992642-67992707
  hypo

SEQ ID NO: 54604 - DNA, 31 bp, Homo sapiens; identical to SEQ ID NO: 24728
  chr18:67992930-67992961
  hypo

SEQ ID NO: 54605 - DNA, 31 bp, Homo sapiens; identical to SEQ ID NO: 24729
  chr18:68042721-68042752
  hypo

SEQ ID NO: 54606 - DNA, 31 bp, Homo sapiens; identical to SEQ ID NO: 24730
  chr18:68053093-68053124
  hypo

SEQ ID NO: 54607 - DNA, 31 bp, Homo sapiens; identical to SEQ ID NO: 24731
  chr18:68059453-68059484
  hypo

SEQ ID NO: 54608 - DNA, 31 bp, Homo sapiens; identical to SEQ ID NO: 24732
  chr18:68088585-68088616
  hypo

SEQ ID NO: 54609 - DNA, 31 bp, Homo sapiens; identical to SEQ ID NO: 24735
  chr18:71003886-71003917
  hypo

SEQ ID NO: 54610 - DNA, 31 bp, Homo sapiens; identical to SEQ ID NO: 24736
  chr18:71745556-71745587
  hypo

SEQ ID NO: 54611 - DNA, 42 bp, Homo sapiens; identical to SEQ ID NO: 24737
  chr18:71847877-71847919
  hypo

SEQ ID NO: 54612 - DNA, 41 bp, Homo sapiens; identical to SEQ ID NO: 24738
  chr18:71847920-71847961
  hypo

SEQ ID NO: 54613 - DNA, 50 bp, Homo sapiens; identical to SEQ ID NO: 24739
  chr18:71867253-71867303
  hypo

SEQ ID NO: 54614 - DNA, 57 bp, Homo sapiens; identical to SEQ ID NO: 24740
  chr18:71867335-71867392
  hypo

SEQ ID NO: 54615 - DNA, 31 bp, Homo sapiens; identical to SEQ ID NO: 24741
  chr18:71867395-71867426
  hypo

SEQ ID NO: 54616 - DNA, 31 bp, Homo sapiens; identical to SEQ ID NO: 24742
  chr18:71872660-71872691
  hypo

SEQ ID NO: 54617 - DNA, 31 bp, Homo sapiens; identical to SEQ ID NO: 24743
  chr18:71879692-71879723
  hypo

SEQ ID NO: 54618 - DNA, 44 bp, Homo sapiens; identical to SEQ ID NO: 24744
  chr18:71879748-71879792
  hypo

SEQ ID NO: 54619 - DNA, 43 bp, Homo sapiens; identical to SEQ ID NO: 24745
  chr18:71889076-71889119
  hypo

SEQ ID NO: 54620 - DNA, 65 bp, Homo sapiens; identical to SEQ ID NO: 24746
  chr18:71889143-71889208
  hypo

SEQ ID NO: 54621 - DNA, 31 bp, Homo sapiens; identical to SEQ ID NO: 24747
  chr18:71889217-71889248
  hypo

SEQ ID NO: 54622 - DNA, 49 bp, Homo sapiens; identical to SEQ ID NO: 24748
  chr18:71904649-71904698
  hypo

SEQ ID NO: 54623 - DNA, 42 bp, Homo sapiens; identical to SEQ ID NO: 6416
  chr18:71958660-71958702
  hypo

SEQ ID NO: 54624 - DNA, 31 bp, Homo sapiens; identical to SEQ ID NO: 24750
  chr18:71982746-71982777
  hypo

SEQ ID NO: 54625 - DNA, 62 bp, Homo sapiens; identical to SEQ ID NO: 24751
  chr18:71983205-71983267
  hypo

SEQ ID NO: 54626 - DNA, 31 bp, Homo sapiens; identical to SEQ ID NO: 24752
  chr18:72035257-72035288
  hypo

SEQ ID NO: 54627 - DNA, 31 bp, Homo sapiens; identical to SEQ ID NO: 24753
  chr18:72213717-72213748
  hypo

SEQ ID NO: 54628 - DNA, 31 bp, Homo sapiens; identical to SEQ ID NO: 24754
  chr18:72344371-72344402
  hypo

SEQ ID NO: 54629 - DNA, 31 bp, Homo sapiens; identical to SEQ ID NO: 24755
  chr18:72344403-72344434
  hypo

SEQ ID NO: 54630 - DNA, 48 bp, Homo sapiens; identical to SEQ ID NO: 24756
  chr18:72741504-72741552
  hypo

SEQ ID NO: 54631 - DNA, 31 bp, Homo sapiens; identical to SEQ ID NO: 24757
  chr18:72741600-72741631
  hypo

SEQ ID NO: 54632 - DNA, 31 bp, Homo sapiens; identical to SEQ ID NO: 24758
  chr18:72801127-72801158
  hypo

SEQ ID NO: 54633 - DNA, 31 bp, Homo sapiens; identical to SEQ ID NO: 24759
  chr18:72823620-72823651
  hypo

SEQ ID NO: 54634 - DNA, 2 bp, Homo sapiens
  chr18:72896218-72896220
  hypo
ca

SEQ ID NO: 54635 - DNA, 31 bp, Homo sapiens; identical to SEQ ID NO: 24761
  chr18:72997866-72997897
  hypo

SEQ ID NO: 54636 - DNA, 31 bp, Homo sapiens; identical to SEQ ID NO: 24762
  chr18:74058618-74058649
  hypo

SEQ ID NO: 54637 - DNA, 31 bp, Homo sapiens; identical to SEQ ID NO: 24763
  chr18:74060163-74060194
  hypo

SEQ ID NO: 54638 - DNA, 50 bp, Homo sapiens; identical to SEQ ID NO: 24764
  chr18:74069271-74069321
  hypo

SEQ ID NO: 54639 - DNA, 31 bp, Homo sapiens; identical to SEQ ID NO: 24765
  chr18:74069366-74069397
  hypo

SEQ ID NO: 54640 - DNA, 31 bp, Homo sapiens; identical to SEQ ID NO: 24766
  chr18:74069544-74069575
  hypo

SEQ ID NO: 54641 - DNA, 71 bp, Homo sapiens; identical to SEQ ID NO: 24767
  chr18:74089170-74089241
  hypo

SEQ ID NO: 54642 - DNA, 31 bp, Homo sapiens; identical to SEQ ID NO: 24768
  chr18:74090940-74090971
  hypo

SEQ ID NO: 54643 - DNA, 43 bp, Homo sapiens; identical to SEQ ID NO: 24769
  chr18:74091041-74091084
  hypo

SEQ ID NO: 54644 - DNA, 31 bp, Homo sapiens; identical to SEQ ID NO: 24770
  chr18:74092348-74092379
  hypo

SEQ ID NO: 54645 - DNA, 31 bp, Homo sapiens; identical to SEQ ID NO: 24771
  chr18:74094300-74094331
  hypo

SEQ ID NO: 54646 - DNA, 31 bp, Homo sapiens; identical to SEQ ID NO: 24772
  chr18:74096611-74096642
  hypo

SEQ ID NO: 54647 - DNA, 65 bp, Homo sapiens; identical to SEQ ID NO: 24773
  chr18:74097032-74097097
  hypo

SEQ ID NO: 54648 - DNA, 31 bp, Homo sapiens; identical to SEQ ID NO: 24774
  chr18:74100531-74100562
  hypo

SEQ ID NO: 54649 - DNA, 31 bp, Homo sapiens; identical to SEQ ID NO: 24775
  chr18:74113766-74113797
  hypo

SEQ ID NO: 54650 - DNA, 31 bp, Homo sapiens; identical to SEQ ID NO: 24776
  chr18:74115004-74115035
  hypo

SEQ ID NO: 54651 - DNA, 46 bp, Homo sapiens; identical to SEQ ID NO: 24777
  chr18:74116223-74116269
  hypo

SEQ ID NO: 54652 - DNA, 31 bp, Homo sapiens; identical to SEQ ID NO: 24778
  chr18:74117535-74117566
  hypo

SEQ ID NO: 54653 - DNA, 31 bp, Homo sapiens; identical to SEQ ID NO: 24779
  chr18:74120420-74120451
  hypo

SEQ ID NO: 54654 - DNA, 31 bp, Homo sapiens; identical to SEQ ID NO: 24781
  chr18:74145002-74145033
  hypo

SEQ ID NO: 54655 - DNA, 45 bp, Homo sapiens; identical to SEQ ID NO: 24782
  chr18:74145079-74145124
  hypo

SEQ ID NO: 54656 - DNA, 31 bp, Homo sapiens; identical to SEQ ID NO: 24783
  chr18:74148371-74148402
  hypo

SEQ ID NO: 54657 - DNA, 31 bp, Homo sapiens; identical to SEQ ID NO: 24784
  chr18:74149886-74149917
  hypo

SEQ ID NO: 54658 - DNA, 51 bp, Homo sapiens; identical to SEQ ID NO: 24785
  chr18:74149959-74150010
  hypo

SEQ ID NO: 54659 - DNA, 61 bp, Homo sapiens; identical to SEQ ID NO: 24786
  chr18:74153448-74153509
  hypo

SEQ ID NO: 54660 - DNA, 87 bp, Homo sapiens; identical to SEQ ID NO: 24787
  chr18:74154493-74154580
  hypo

SEQ ID NO: 54661 - DNA, 63 bp, Homo sapiens; identical to SEQ ID NO: 24788
  chr18:74154585-74154648
  hypo

SEQ ID NO: 54662 - DNA, 31 bp, Homo sapiens; identical to SEQ ID NO: 24789
  chr18:74154972-74155003
  hypo

SEQ ID NO: 54663 - DNA, 31 bp, Homo sapiens; identical to SEQ ID NO: 24790
  chr18:74155961-74155992
  hypo

SEQ ID NO: 54664 - DNA, 31 bp, Homo sapiens; identical to SEQ ID NO: 24791
  chr18:74156515-74156546
  hypo

SEQ ID NO: 54665 - DNA, 31 bp, Homo sapiens; identical to SEQ ID NO: 24792
  chr18:74156550-74156581
  hypo

SEQ ID NO: 54666 - DNA, 31 bp, Homo sapiens; identical to SEQ ID NO: 24793
  chr18:74170657-74170688
  hypo

SEQ ID NO: 54667 - DNA, 31 bp, Homo sapiens; identical to SEQ ID NO: 6425
  chr18:74204793-74204824
  hypo

SEQ ID NO: 54668 - DNA, 31 bp, Homo sapiens; identical to SEQ ID NO: 24797
  chr18:74273198-74273229
  hypo

SEQ ID NO: 54669 - DNA, 31 bp, Homo sapiens; identical to SEQ ID NO: 24798
  chr18:74274870-74274901
  hypo

SEQ ID NO: 54670 - DNA, 57 bp, Homo sapiens; identical to SEQ ID NO: 24799
  chr18:74275322-74275379
  hypo

SEQ ID NO: 54671 - DNA, 35 bp, Homo sapiens; identical to SEQ ID NO: 24800
  chr18:74299117-74299152
  hypo

SEQ ID NO: 54672 - DNA, 31 bp, Homo sapiens; identical to SEQ ID NO: 24801
  chr18:74299794-74299825
  hypo

SEQ ID NO: 54673 - DNA, 31 bp, Homo sapiens; identical to SEQ ID NO: 24802
  chr18:74324131-74324162
  hypo

SEQ ID NO: 54674 - DNA, 36 bp, Homo sapiens; identical to SEQ ID NO: 24804
  chr18:74420788-74420824
  hypo

SEQ ID NO: 54675 - DNA, 36 bp, Homo sapiens; identical to SEQ ID NO: 24805
  chr18:74426496-74426532
  hypo

SEQ ID NO: 54676 - DNA, 31 bp, Homo sapiens; identical to SEQ ID NO: 24806
  chr18:74426590-74426621
  hypo

SEQ ID NO: 54677 - DNA, 31 bp, Homo sapiens; identical to SEQ ID NO: 24807
  chr18:74426671-74426702
  hypo

SEQ ID NO: 54678 - DNA, 40 bp, Homo sapiens; identical to SEQ ID NO: 24808
  chr18:74443756-74443796
  hypo

SEQ ID NO: 54679 - DNA, 31 bp, Homo sapiens; identical to SEQ ID NO: 24809
  chr18:74451537-74451568
  hypo

SEQ ID NO: 54680 - DNA, 31 bp, Homo sapiens; identical to SEQ ID NO: 24810
  chr18:74451803-74451834
  hypo

SEQ ID NO: 54681 - DNA, 39 bp, Homo sapiens; identical to SEQ ID NO: 24811
  chr18:74471097-74471136
  hypo

SEQ ID NO: 54682 - DNA, 31 bp, Homo sapiens; identical to SEQ ID NO: 24812
  chr18:74592527-74592558
  hypo

SEQ ID NO: 54683 - DNA, 31 bp, Homo sapiens; identical to SEQ ID NO: 24813
  chr18:74592566-74592597
  hypo

SEQ ID NO: 54684 - DNA, 31 bp, Homo sapiens; identical to SEQ ID NO: 24814
  chr18:74631682-74631713
  hypo

SEQ ID NO: 54685 - DNA, 31 bp, Homo sapiens; identical to SEQ ID NO: 24815
  chr18:74633614-74633645
  hypo

SEQ ID NO: 54686 - DNA, 35 bp, Homo sapiens; identical to SEQ ID NO: 24816
  chr18:74697570-74697605
  hypo

SEQ ID NO: 54687 - DNA, 31 bp, Homo sapiens; identical to SEQ ID NO: 24817
  chr18:74734079-74734110
  hypo

SEQ ID NO: 54688 - DNA, 31 bp, Homo sapiens; identical to SEQ ID NO: 24818
  chr18:74738359-74738390
  hypo

SEQ ID NO: 54689 - DNA, 31 bp, Homo sapiens; identical to SEQ ID NO: 24819
  chr18:74743579-74743610
  hypo

SEQ ID NO: 54690 - DNA, 31 bp, Homo sapiens; identical to SEQ ID NO: 24820
  chr18:74759388-74759419
  hypo

SEQ ID NO: 54691 - DNA, 31 bp, Homo sapiens; identical to SEQ ID NO: 24822
  chr18:74763858-74763889
  hypo

SEQ ID NO: 54692 - DNA, 35 bp, Homo sapiens; identical to SEQ ID NO: 24823
  chr18:74764263-74764298
  hypo

SEQ ID NO: 54693 - DNA, 48 bp, Homo sapiens; identical to SEQ ID NO: 24824
  chr18:74770084-74770132
  hypo

SEQ ID NO: 54694 - DNA, 48 bp, Homo sapiens; identical to SEQ ID NO: 24825
  chr18:74794098-74794146
  hypo

SEQ ID NO: 54695 - DNA, 31 bp, Homo sapiens; identical to SEQ ID NO: 24826
  chr18:74794227-74794258
  hypo

SEQ ID NO: 54696 - DNA, 31 bp, Homo sapiens; identical to SEQ ID NO: 24827
  chr18:74806855-74806886
  hypo

SEQ ID NO: 54697 - DNA, 31 bp, Homo sapiens; identical to SEQ ID NO: 24828
  chr18:74823086-74823117
  hypo

SEQ ID NO: 54698 - DNA, 31 bp, Homo sapiens; identical to SEQ ID NO: 24829
  chr18:74832263-74832294
  hypo

SEQ ID NO: 54699 - DNA, 31 bp, Homo sapiens; identical to SEQ ID NO: 24830
  chr18:74841695-74841726
  hypo

SEQ ID NO: 54700 - DNA, 35 bp, Homo sapiens; identical to SEQ ID NO: 24831
  chr18:74847366-74847401
  hypo

SEQ ID NO: 54701 - DNA, 31 bp, Homo sapiens; identical to SEQ ID NO: 24836
  chr18:76435960-76435991
  hypo

SEQ ID NO: 54702 - DNA, 31 bp, Homo sapiens; identical to SEQ ID NO: 24837
  chr18:76435997-76436028
  hypo

SEQ ID NO: 54703 - DNA, 31 bp, Homo sapiens; identical to SEQ ID NO: 24838
  chr18:76436051-76436082
  hypo

SEQ ID NO: 54704 - DNA, 31 bp, Homo sapiens; identical to SEQ ID NO: 24839
  chr18:76543110-76543141
  hypo

SEQ ID NO: 54705 - DNA, 12 bp, Homo sapiens
  chr18:76653431-76653443
  hypo
accgaaggctac

SEQ ID NO: 54706 - DNA, 31 bp, Homo sapiens; identical to SEQ ID NO: 24841
  chr18:77126099-77126130
  hypo

SEQ ID NO: 54707 - DNA, 46 bp, Homo sapiens; identical to SEQ ID NO: 24842
  chr18:77143640-77143686
  hypo

SEQ ID NO: 54708 - DNA, 57 bp, Homo sapiens; identical to SEQ ID NO: 39816
  chr18:77160022-77160079
  hypo

SEQ ID NO: 54709 - DNA, 31 bp, Homo sapiens; identical to SEQ ID NO: 24846
  chr18:77212961-77212992
  hypo

SEQ ID NO: 54710 - DNA, 31 bp, Homo sapiens; identical to SEQ ID NO: 24849
  chr18:77372905-77372936
  hypo

SEQ ID NO: 54711 - DNA, 40 bp, Homo sapiens; identical to SEQ ID NO: 24850
  chr18:77493026-77493066
  hypo

SEQ ID NO: 54712 - DNA, 2 bp, Homo sapiens
  chr18:77508898-77508900
  hypo
gt

SEQ ID NO: 54713 - DNA, 61 bp, Homo sapiens
  chr18:77508946-77509007
  hypo
gcacagggctctccagcgggagctgaggtggtcccttccgtgggctcggttcaggtcctgt

SEQ ID NO: 54714 - DNA, 31 bp, Homo sapiens; identical to SEQ ID NO: 24852
  chr18:77509014-77509045
  hypo

SEQ ID NO: 54715 - DNA, 31 bp, Homo sapiens; identical to SEQ ID NO: 24853
  chr18:77509176-77509207
  hypo

SEQ ID NO: 54716 - DNA, 2 bp, Homo sapiens
  chr18:77509343-77509345
  hypo
ct

SEQ ID NO: 54717 - DNA, 70 bp, Homo sapiens; identical to SEQ ID NO: 24858
  chr18:77511470-77511540
  hypo

SEQ ID NO: 54718 - DNA, 51 bp, Homo sapiens; identical to SEQ ID NO: 24859
  chr18:77512013-77512064
  hypo

SEQ ID NO: 54719 - DNA, 31 bp, Homo sapiens; identical to SEQ ID NO: 24861
  chr18:77555363-77555394
  hypo

SEQ ID NO: 54720 - DNA, 31 bp, Homo sapiens; identical to SEQ ID NO: 24862
  chr18:77630315-77630346
  hypo

SEQ ID NO: 54721 - DNA, 43 bp, Homo sapiens; identical to SEQ ID NO: 24863
  chr18:77664460-77664503
  hypo

SEQ ID NO: 54722 - DNA, 31 bp, Homo sapiens; identical to SEQ ID NO: 24864
  chr18:77677978-77678009
  hypo

SEQ ID NO: 54723 - DNA, 31 bp, Homo sapiens; identical to SEQ ID NO: 6433
  chr18:77710900-77710931
  hypo

SEQ ID NO: 54724 - DNA, 36 bp, Homo sapiens; identical to SEQ ID NO: 6434
  chr18:77712072-77712108
  hypo

SEQ ID NO: 54725 - DNA, 1 bp, Homo sapiens
  chr18:77713122-77713123
  hypo
c

SEQ ID NO: 54726 - DNA, 31 bp, Homo sapiens; identical to SEQ ID NO: 24868
  chr18:77753636-77753667
  hypo

SEQ ID NO: 54727 - DNA, 58 bp, Homo sapiens; identical to SEQ ID NO: 24869
  chr18:77753720-77753778
  hypo

SEQ ID NO: 54728 - DNA, 31 bp, Homo sapiens; identical to SEQ ID NO: 24870
  chr18:77753781-77753812
  hypo

SEQ ID NO: 54729 - DNA, 136 bp, Homo sapiens; identical to SEQ ID NO: 6436
  chr18:77794467-77794603
  hypo

SEQ ID NO: 54730 - DNA, 31 bp, Homo sapiens; identical to SEQ ID NO: 24873
  chr18:77805634-77805665
  hypo

SEQ ID NO: 54731 - DNA, 34 bp, Homo sapiens; identical to SEQ ID NO: 24874
  chr18:77805694-77805728
  hypo

SEQ ID NO: 54732 - DNA, 31 bp, Homo sapiens; identical to SEQ ID NO: 24875
  chr18:77835956-77835987
  hypo

SEQ ID NO: 54733 - DNA, 31 bp, Homo sapiens; identical to SEQ ID NO: 6437
  chr18:77867027-77867058
  hypo

SEQ ID NO: 54734 - DNA, 39 bp, Homo sapiens; identical to SEQ ID NO: 24877
  chr18:77913922-77913961
  hypo

SEQ ID NO: 54735 - DNA, 42 bp, Homo sapiens; identical to SEQ ID NO: 24879
  chr18:77939057-77939099
  hypo

SEQ ID NO: 54736 - DNA, 31 bp, Homo sapiens; identical to SEQ ID NO: 24880
  chr18:77939114-77939145
  hypo

SEQ ID NO: 54737 - DNA, 55 bp, Homo sapiens; identical to SEQ ID NO: 24881
  chr18:77939171-77939226
  hypo

SEQ ID NO: 54738 - DNA, 31 bp, Homo sapiens; identical to SEQ ID NO: 24882
  chr18:77939507-77939538
  hypo

SEQ ID NO: 54739 - DNA, 36 bp, Homo sapiens; identical to SEQ ID NO: 24883
  chr18:77942204-77942240
  hypo

SEQ ID NO: 54740 - DNA, 57 bp, Homo sapiens; identical to SEQ ID NO: 24884
  chr18:77942247-77942304
  hypo

SEQ ID NO: 54741 - DNA, 66 bp, Homo sapiens; identical to SEQ ID NO: 24885
  chr18:77942332-77942398
  hypo

SEQ ID NO: 54742 - DNA, 133 bp, Homo sapiens; identical to SEQ ID NO: 24886
  chr18:77943847-77943980
  hypo

SEQ ID NO: 54743 - DNA, 31 bp, Homo sapiens; identical to SEQ ID NO: 24887
  chr18:77943985-77944016
  hypo

SEQ ID NO: 54744 - DNA, 31 bp, Homo sapiens; identical to SEQ ID NO: 24888
  chr18:77944230-77944261
  hypo

SEQ ID NO: 54745 - DNA, 39 bp, Homo sapiens; identical to SEQ ID NO: 24890
  chr19:327874-327913
  hypo

SEQ ID NO: 54746 - DNA, 31 bp, Homo sapiens; identical to SEQ ID NO: 24891
  chr19:328011-328042
  hypo

SEQ ID NO: 54747 - DNA, 35 bp, Homo sapiens; identical to SEQ ID NO: 24892
  chr19:369327-369362
  hypo

SEQ ID NO: 54748 - DNA, 2 bp, Homo sapiens
  chr19:403366-403368
  hypo
aa

SEQ ID NO: 54749 - DNA, 38 bp, Homo sapiens; identical to SEQ ID NO: 24896
  chr19:434175-434213
  hypo

SEQ ID NO: 54750 - DNA, 221 bp, Homo sapiens; identical to SEQ ID NO: 24897
  chr19:450885-451106
  hypo

SEQ ID NO: 54751 - DNA, 31 bp, Homo sapiens; identical to SEQ ID NO: 6440
  chr19:452244-452275
  hypo

SEQ ID NO: 54752 - DNA, 2 bp, Homo sapiens
  chr19:485118-485120
  hypo
tg

SEQ ID NO: 54753 - DNA, 41 bp, Homo sapiens; identical to SEQ ID NO: 6450
  chr19:507105-507146
  hypo

SEQ ID NO: 54754 - DNA, 3 bp, Homo sapiens
  chr19:530217-530220
  hypo
atc

SEQ ID NO: 54755 - DNA, 81 bp, Homo sapiens; identical to SEQ ID NO: 24911
  chr19:541845-541926
  hypo

SEQ ID NO: 54756 - DNA, 60 bp, Homo sapiens; identical to SEQ ID NO: 24914
  chr19:562308-562368
  hypo

SEQ ID NO: 54757 - DNA, 34 bp, Homo sapiens; identical to SEQ ID NO: 24915
  chr19:585309-585343
  hypo

SEQ ID NO: 54758 - DNA, 65 bp, Homo sapiens; identical to SEQ ID NO: 24916
  chr19:585371-585436
  hypo

SEQ ID NO: 54759 - DNA, 2 bp, Homo sapiens
  chr19:599191-599193
  hypo
tc

SEQ ID NO: 54760 - DNA, 48 bp, Homo sapiens; identical to SEQ ID NO: 6451
  chr19:603684-603732
  hypo

SEQ ID NO: 54761 - DNA, 2 bp, Homo sapiens
  chr19:603815-603817
  hypo
ac

SEQ ID NO: 54762 - DNA, 99 bp, Homo sapiens; identical to SEQ ID NO: 6453
  chr19:603850-603949
  hypo

SEQ ID NO: 54763 - DNA, 43 bp, Homo sapiens; identical to SEQ ID NO: 24921
  chr19:617958-618001
  hypo

SEQ ID NO: 54764 - DNA, 31 bp, Homo sapiens; identical to SEQ ID NO: 24922
  chr19:618307-618338
  hypo

SEQ ID NO: 54765 - DNA, 217 bp, Homo sapiens; identical to SEQ ID NO: 24923
  chr19:618515-618732
  hypo

SEQ ID NO: 54766 - DNA, 57 bp, Homo sapiens; identical to SEQ ID NO: 24924
  chr19:618762-618819
  hypo

SEQ ID NO: 54767 - DNA, 31 bp, Homo sapiens; identical to SEQ ID NO: 24925
  chr19:618831-618862
  hypo

SEQ ID NO: 54768 - DNA, 31 bp, Homo sapiens; identical to SEQ ID NO: 24926
  chr19:619168-619199
  hypo

SEQ ID NO: 54769 - DNA, 39 bp, Homo sapiens; identical to SEQ ID NO: 24927
  chr19:619203-619242
  hypo

SEQ ID NO: 54770 - DNA, 76 bp, Homo sapiens; identical to SEQ ID NO: 24928
  chr19:619245-619321
  hypo

SEQ ID NO: 54771 - DNA, 37 bp, Homo sapiens; identical to SEQ ID NO: 24929
  chr19:619323-619360
  hypo

SEQ ID NO: 54772 - DNA, 72 bp, Homo sapiens; identical to SEQ ID NO: 24930
  chr19:619615-619687
  hypo

SEQ ID NO: 54773 - DNA, 2 bp, Homo sapiens
  chr19:634303-634305
  hypo
gg

SEQ ID NO: 54774 - DNA, 64 bp, Homo sapiens; identical to SEQ ID NO: 24932
  chr19:634400-634464
  hypo

SEQ ID NO: 54775 - DNA, 2 bp, Homo sapiens
  chr19:635349-635351
  hypo
gc

SEQ ID NO: 54776 - DNA, 31 bp, Homo sapiens; identical to SEQ ID NO: 24934
  chr19:640828-640859
  hypo

SEQ ID NO: 54777 - DNA, 36 bp, Homo sapiens
  chr19:640878-640914
  hypo
cccctgtccttcccaccgctttcatctgggcgccaa

SEQ ID NO: 54778 - DNA, 35 bp, Homo sapiens
  chr19:641007-641042
  hypo
ccggggcagaggcctggctccgctgcctgacctgg

SEQ ID NO: 54779 - DNA, 31 bp, Homo sapiens; identical to SEQ ID NO: 24936
  chr19:641052-641083
  hypo

SEQ ID NO: 54780 - DNA, 31 bp, Homo sapiens; identical to SEQ ID NO: 24937
  chr19:647152-647183
  hypo

SEQ ID NO: 54781 - DNA, 31 bp, Homo sapiens; identical to SEQ ID NO: 24938
  chr19:647356-647387
  hypo

SEQ ID NO: 54782 - DNA, 53 bp, Homo sapiens; identical to SEQ ID NO: 24939
  chr19:647727-647780
  hypo

SEQ ID NO: 54783 - DNA, 132 bp, Homo sapiens; identical to SEQ ID NO: 6461
  chr19:680399-680531
  hypo

SEQ ID NO: 54784 - DNA, 46 bp, Homo sapiens; identical to SEQ ID NO: 24943
  chr19:746554-746600
  hypo

SEQ ID NO: 54785 - DNA, 57 bp, Homo sapiens; identical to SEQ ID NO: 24944
  chr19:746607-746664
  hypo

SEQ ID NO: 54786 - DNA, 31 bp, Homo sapiens; identical to SEQ ID NO: 24945
  chr19:746665-746696
  hypo

SEQ ID NO: 54787 - DNA, 38 bp, Homo sapiens; identical to SEQ ID NO: 24947
  chr19:758090-758128
  hypo

SEQ ID NO: 54788 - DNA, 57 bp, Homo sapiens; identical to SEQ ID NO: 24948
  chr19:762947-763004
  hypo

SEQ ID NO: 54789 - DNA, 31 bp, Homo sapiens; identical to SEQ ID NO: 24949
  chr19:784935-784966
  hypo

SEQ ID NO: 54790 - DNA, 31 bp, Homo sapiens; identical to SEQ ID NO: 24950
  chr19:805033-805064
  hypo

SEQ ID NO: 54791 - DNA, 182 bp, Homo sapiens; identical to SEQ ID NO: 6463
  chr19:813431-813613
  hypo

SEQ ID NO: 54792 - DNA, 71 bp, Homo sapiens; identical to SEQ ID NO: 39846
  chr19:813626-813697
  hypo

SEQ ID NO: 54793 - DNA, 30 bp, Homo sapiens; identical to SEQ ID NO: 39847
  chr19:813830-813860
  hypo

SEQ ID NO: 54794 - DNA, 31 bp, Homo sapiens; identical to SEQ ID NO: 24953
  chr19:814135-814166
  hypo

SEQ ID NO: 54795 - DNA, 31 bp, Homo sapiens; identical to SEQ ID NO: 6465
  chr19:814390-814421
  hypo

SEQ ID NO: 54796 - DNA, 2 bp, Homo sapiens
  chr19:814428-814430
  hypo
ct

SEQ ID NO: 54797 - DNA, 49 bp, Homo sapiens
  chr19:814741-814790
  hypo
aggtcttcctgtaagaggcgtccagcgtgagccccgcccacctggggac

SEQ ID NO: 54798 - DNA, 120 bp, Homo sapiens; identical to SEQ ID NO: 24957
  chr19:871024-871144
  hypo

SEQ ID NO: 54799 - DNA, 93 bp, Homo sapiens; identical to SEQ ID NO: 24958
  chr19:882614-882707
  hypo

SEQ ID NO: 54800 - DNA, 58 bp, Homo sapiens
  chr19:884995-885053
  hypo
cgcacaaaagcacctgcgggggaggtgggggtgagggctgacccggcactgctgtggt

SEQ ID NO: 54801 - DNA, 28 bp, Homo sapiens
  chr19:885112-885140
  hypo
gtctcttcagccacgcctgcccctcggg

SEQ ID NO: 54802 - DNA, 36 bp, Homo sapiens; identical to SEQ ID NO: 24965
  chr19:891446-891482
  hypo

SEQ ID NO: 54803 - DNA, 2 bp, Homo sapiens
  chr19:891515-891517
  hypo
ga

SEQ ID NO: 54804 - DNA, 31 bp, Homo sapiens; identical to SEQ ID NO: 24967
  chr19:899787-899818
  hypo

SEQ ID NO: 54805 - DNA, 31 bp, Homo sapiens; identical to SEQ ID NO: 24971
  chr19:901068-901099
  hypo

SEQ ID NO: 54806 - DNA, 60 bp, Homo sapiens; identical to SEQ ID NO: 24972
  chr19:932326-932386
  hypo

SEQ ID NO: 54807 - DNA, 77 bp, Homo sapiens; identical to SEQ ID NO: 24973
  chr19:932541-932618
  hypo

SEQ ID NO: 54808 - DNA, 63 bp, Homo sapiens; identical to SEQ ID NO: 24974
  chr19:942141-942204
  hypo

SEQ ID NO: 54809 - DNA, 47 bp, Homo sapiens; identical to SEQ ID NO: 6467
  chr19:942339-942386
  hypo

SEQ ID NO: 54810 - DNA, 90 bp, Homo sapiens; identical to SEQ ID NO: 24976
  chr19:945744-945834
  hypo

SEQ ID NO: 54811 - DNA, 31 bp, Homo sapiens; identical to SEQ ID NO: 24977
  chr19:945842-945873
  hypo

SEQ ID NO: 54812 - DNA, 2 bp, Homo sapiens
  chr19:955718-955720
  hypo
ca

SEQ ID NO: 54813 - DNA, 31 bp, Homo sapiens; identical to SEQ ID NO: 24984
  chr19:956641-956672
  hypo

SEQ ID NO: 54814 - DNA, 2 bp, Homo sapiens
  chr19:957165-957167
  hypo
tt

SEQ ID NO: 54815 - DNA, 31 bp, Homo sapiens; identical to SEQ ID NO: 24986
  chr19:959192-959223
  hypo

SEQ ID NO: 54816 - DNA, 31 bp, Homo sapiens; identical to SEQ ID NO: 24988
  chr19:995015-995046
  hypo

SEQ ID NO: 54817 - DNA, 77 bp, Homo sapiens; identical to SEQ ID NO: 24991
  chr19:1004489-1004566
  hypo

SEQ ID NO: 54818 - DNA, 18 bp, Homo sapiens
  chr19:1007587-1007605
  hypo
gaggggcaggcagaggcg

SEQ ID NO: 54819 - DNA, 56 bp, Homo sapiens
  chr19:1007665-1007721
  hypo
tgggagagcagcgccgaggcgtacatcaagaagagcttccccgacatgcacgcaca

SEQ ID NO: 54820 - DNA, 68 bp, Homo sapiens
  chr19:1007841-1007909
  hypo
ccggccccagcaggagcgacccccccaagctcaacgccttcatcatggacaagtcgctcctggactac

SEQ ID NO: 54821 - DNA, 73 bp, Homo sapiens
  chr19:1007941-1008014
  hypo
gaccgtgggaaagcccttcgccattgagggtgagaggcacctgggcgaggcggggcgccggggtctctgggga

SEQ ID NO: 54822 - DNA, 31 bp, Homo sapiens; identical to SEQ ID NO: 24998
  chr19:1008207-1008238
  hypo

SEQ ID NO: 54823 - DNA, 31 bp, Homo sapiens; identical to SEQ ID NO: 25001
  chr19:1033553-1033584
  hypo

SEQ ID NO: 54824 - DNA, 36 bp, Homo sapiens
  chr19:1047801-1047837
  hypo
ggctgcattggaggggcggggcctgaggcaggtggg

SEQ ID NO: 54825 - DNA, 130 bp, Homo sapiens; identical to SEQ ID NO: 25004
  chr19:1050981-1051111
  hypo

SEQ ID NO: 54826 - DNA, 28 bp, Homo sapiens
  chr19:1051593-1051621
  hypo
tggggattctgctcgaggggccagaaaa

SEQ ID NO: 54827 - DNA, 37 bp, Homo sapiens; identical to SEQ ID NO: 25006
  chr19:1080479-1080516
  hypo

SEQ ID NO: 54828 - DNA, 2 bp, Homo sapiens
  chr19:1080709-1080711
  hypo
tc

SEQ ID NO: 54829 - DNA, 31 bp, Homo sapiens
  chr19:1080746-1080777
  hypo
acccagacggtggagccggggcttcagcctt

SEQ ID NO: 54830 - DNA, 37 bp, Homo sapiens
  chr19:1082937-1082974
  hypo
ggccggcaggacggctcggagagcgaggcagtggcgg

SEQ ID NO: 54831 - DNA, 33 bp, Homo sapiens
  chr19:1083009-1083042
  hypo
gacctgccgcctgagaaccgggcctcgctgcag

SEQ ID NO: 54832 - DNA, 44 bp, Homo sapiens; identical to SEQ ID NO: 25009
  chr19:1089504-1089548
  hypo

SEQ ID NO: 54833 - DNA, 2 bp, Homo sapiens
  chr19:1105540-1105542
  hypo
gc

SEQ ID NO: 54834 - DNA, 31 bp, Homo sapiens; identical to SEQ ID NO: 25012
  chr19:1111948-1111979
  hypo

SEQ ID NO: 54835 - DNA, 70 bp, Homo sapiens
  chr19:1112184-1112254
  hypo
caccagactctccaggcgcttggccacgatggaggcgaaccggcgctccccggccagctccgagatgagg

SEQ ID NO: 54836 - DNA, 12 bp, Homo sapiens
  chr19:1156203-1156215
  hypo
gtctctgagccc

SEQ ID NO: 54837 - DNA, 31 bp, Homo sapiens; identical to SEQ ID NO: 25018
  chr19:1170969-1171000
  hypo

SEQ ID NO: 54838 - DNA, 31 bp, Homo sapiens; identical to SEQ ID NO: 25019
  chr19:1171424-1171455
  hypo

SEQ ID NO: 54839 - DNA, 80 bp, Homo sapiens; identical to SEQ ID NO: 6469
  chr19:1173280-1173360
  hypo

SEQ ID NO: 54840 - DNA, 39 bp, Homo sapiens; identical to SEQ ID NO: 6470
  chr19:1173362-1173401
  hypo

SEQ ID NO: 54841 - DNA, 214 bp, Homo sapiens
  chr19:1226474-1226688
  hypo
cagtcacaatggacagcgccggggcctccccaaggccgtgtgtatgaacggcacagaggcggcgcagctgagcaccaaatccagggcggagggccgggcccccaaccctgcccgcaaggcctgctccgccagcagcaagatccgccggctgtcggcctgcaagcagcagtgaggctggccgcctgcaggtggggcgcggcggggcccgggtggg

SEQ ID NO: 54842 - DNA, 172 bp, Homo sapiens
  chr19:1227659-1227831
  hypo
tcccggagaggtggccgccatgcttctgtgccgaccacgccccaggacctccggagcgccctgcagggccgggcagggggacagcagggaccgggcgcagccctcccccctcggccgcccggcagtgcacgcggcttgttgacttcgcagccccgggcggagccttcccggg

SEQ ID NO: 54843 - DNA, 7 bp, Homo sapiens
  chr19:1274635-1274642
  hypo
tcctcct

SEQ ID NO: 54844 - DNA, 37 bp, Homo sapiens; identical to SEQ ID NO: 25029
  chr19:1277514-1277551
  hypo

SEQ ID NO: 54845 - DNA, 31 bp, Homo sapiens; identical to SEQ ID NO: 25030
  chr19:1293374-1293405
  hypo

SEQ ID NO: 54846 - DNA, 31 bp, Homo sapiens; identical to SEQ ID NO: 25032
  chr19:1329362-1329393
  hypo

SEQ ID NO: 54847 - DNA, 117 bp, Homo sapiens; identical to SEQ ID NO: 25033
  chr19:1333896-1334013
  hypo

SEQ ID NO: 54848 - DNA, 31 bp, Homo sapiens; identical to SEQ ID NO: 25035
  chr19:1394238-1394269
  hypo

SEQ ID NO: 54849 - DNA, 31 bp, Homo sapiens; identical to SEQ ID NO: 6472
  chr19:1401652-1401683
  hypo

SEQ ID NO: 54850 - DNA, 14 bp, Homo sapiens
  chr19:1401687-1401701
  hypo
ctcggtgccccctc

SEQ ID NO: 54851 - DNA, 67 bp, Homo sapiens; identical to SEQ ID NO: 25038
  chr19:1424904-1424971
  hypo

SEQ ID NO: 54852 - DNA, 45 bp, Homo sapiens; identical to SEQ ID NO: 25039
  chr19:1425595-1425640
  hypo

SEQ ID NO: 54853 - DNA, 78 bp, Homo sapiens; identical to SEQ ID NO: 25040
  chr19:1425642-1425720
  hypo

SEQ ID NO: 54854 - DNA, 31 bp, Homo sapiens; identical to SEQ ID NO: 25041
  chr19:1432759-1432790
  hypo

SEQ ID NO: 54855 - DNA, 187 bp, Homo sapiens; identical to SEQ ID NO: 6475
  chr19:1491115-1491302
  hypo

SEQ ID NO: 54856 - DNA, 73 bp, Homo sapiens; identical to SEQ ID NO: 39859
  chr19:1491308-1491381
  hypo

SEQ ID NO: 54857 - DNA, 20 bp, Homo sapiens
  chr19:1496674-1496694
  hypo
gtaaccgctgtggggagata

SEQ ID NO: 54858 - DNA, 26 bp, Homo sapiens
  chr19:1496884-1496910
  hypo
gtgtgtgcccacgtgtgcatgtgagt

SEQ ID NO: 54859 - DNA, 72 bp, Homo sapiens; identical to SEQ ID NO: 25048
  chr19:1506118-1506190
  hypo

SEQ ID NO: 54860 - DNA, 2 bp, Homo sapiens
  chr19:1533725-1533727
  hypo
gc

SEQ ID NO: 54861 - DNA, 2 bp, Homo sapiens
  chr19:1565890-1565892
  hypo
ca

SEQ ID NO: 54862 - DNA, 117 bp, Homo sapiens; identical to SEQ ID NO: 25051
  chr19:1565971-1566088
  hypo

SEQ ID NO: 54863 - DNA, 31 bp, Homo sapiens; identical to SEQ ID NO: 25052
  chr19:1579337-1579368
  hypo

SEQ ID NO: 54864 - DNA, 31 bp, Homo sapiens; identical to SEQ ID NO: 25053
  chr19:1579375-1579406
  hypo

SEQ ID NO: 54865 - DNA, 52 bp, Homo sapiens; identical to SEQ ID NO: 25054
  chr19:1579658-1579710
  hypo

SEQ ID NO: 54866 - DNA, 31 bp, Homo sapiens; identical to SEQ ID NO: 25056
  chr19:1612623-1612654
  hypo

SEQ ID NO: 54867 - DNA, 31 bp, Homo sapiens; identical to SEQ ID NO: 25056
  chr19:1612763-1612794
  hypo

SEQ ID NO: 54868 - DNA, 79 bp, Homo sapiens; identical to SEQ ID NO: 6481
  chr19:1748598-1748677
  hypo

SEQ ID NO: 54869 - DNA, 49 bp, Homo sapiens; identical to SEQ ID NO: 6482
  chr19:1748798-1748847
  hypo

SEQ ID NO: 54870 - DNA, 58 bp, Homo sapiens; identical to SEQ ID NO: 25065
  chr19:1882111-1882169
  hypo

SEQ ID NO: 54871 - DNA, 55 bp, Homo sapiens; identical to SEQ ID NO: 25066
  chr19:1907660-1907715
  hypo

SEQ ID NO: 54872 - DNA, 35 bp, Homo sapiens; identical to SEQ ID NO: 25067
  chr19:1907742-1907777
  hypo

SEQ ID NO: 54873 - DNA, 55 bp, Homo sapiens; identical to SEQ ID NO: 25068
  chr19:1907811-1907866
  hypo

SEQ ID NO: 54874 - DNA, 49 bp, Homo sapiens
  chr19:1912446-1912495
  hypo
gcggcctggggcaacccttcctggtgcccgtgcccgcccggccgcctct

SEQ ID NO: 54875 - DNA, 31 bp, Homo sapiens; identical to SEQ ID NO: 25071
  chr19:1912530-1912561
  hypo

SEQ ID NO: 54876 - DNA, 46 bp, Homo sapiens; identical to SEQ ID NO: 25072
  chr19:1920168-1920214
  hypo

SEQ ID NO: 54877 - DNA, 135 bp, Homo sapiens; identical to SEQ ID NO: 25073
  chr19:1921078-1921213
  hypo

SEQ ID NO: 54878 - DNA, 31 bp, Homo sapiens; identical to SEQ ID NO: 25074
  chr19:1955468-1955499
  hypo

SEQ ID NO: 54879 - DNA, 19 bp, Homo sapiens
  chr19:1969893-1969912
  hypo
ggtgggccccaacttccgc

SEQ ID NO: 54880 - DNA, 2 bp, Homo sapiens
  chr19:1970424-1970426
  hypo
tc

SEQ ID NO: 54881 - DNA, 31 bp, Homo sapiens; identical to SEQ ID NO: 25079
  chr19:1977041-1977072
  hypo

SEQ ID NO: 54882 - DNA, 41 bp, Homo sapiens
  chr19:1978215-1978256
  hypo
ctcctgcctcctgcctcgggggtgggctggggaggtcgggg

SEQ ID NO: 54883 - DNA, 26 bp, Homo sapiens
  chr19:1979018-1979044
  hypo
catcccgtaccgcgagcacaagagcc

SEQ ID NO: 54884 - DNA, 31 bp, Homo sapiens; identical to SEQ ID NO: 6490
  chr19:1979061-1979092
  hypo

SEQ ID NO: 54885 - DNA, 56 bp, Homo sapiens; identical to SEQ ID NO: 25084
  chr19:1979735-1979791
  hypo

SEQ ID NO: 54886 - DNA, 83 bp, Homo sapiens; identical to SEQ ID NO: 25085
  chr19:1979936-1980019
  hypo

SEQ ID NO: 54887 - DNA, 153 bp, Homo sapiens; identical to SEQ ID NO: 25086
  chr19:1980882-1981035
  hypo

SEQ ID NO: 54888 - DNA, 31 bp, Homo sapiens; identical to SEQ ID NO: 25089
  chr19:2000542-2000573
  hypo

SEQ ID NO: 54889 - DNA, 31 bp, Homo sapiens; identical to SEQ ID NO: 25090
  chr19:2000619-2000650
  hypo

SEQ ID NO: 54890 - DNA, 85 bp, Homo sapiens; identical to SEQ ID NO: 25091
  chr19:2000742-2000827
  hypo

SEQ ID NO: 54891 - DNA, 31 bp, Homo sapiens; identical to SEQ ID NO: 25093
  chr19:2026536-2026567
  hypo

SEQ ID NO: 54892 - DNA, 31 bp, Homo sapiens; identical to SEQ ID NO: 25094
  chr19:2039356-2039387
  hypo

SEQ ID NO: 54893 - DNA, 31 bp, Homo sapiens; identical to SEQ ID NO: 25095
  chr19:2088264-2088295
  hypo

SEQ ID NO: 54894 - DNA, 48 bp, Homo sapiens; identical to SEQ ID NO: 25096
  chr19:2122385-2122433
  hypo

SEQ ID NO: 54895 - DNA, 39 bp, Homo sapiens; identical to SEQ ID NO: 25097
  chr19:2148549-2148588
  hypo

SEQ ID NO: 54896 - DNA, 31 bp, Homo sapiens; identical to SEQ ID NO: 25098
  chr19:2160535-2160566
  hypo

SEQ ID NO: 54897 - DNA, 58 bp, Homo sapiens; identical to SEQ ID NO: 6491
  chr19:2168976-2169034
  hypo

SEQ ID NO: 54898 - DNA, 53 bp, Homo sapiens; identical to SEQ ID NO: 6492
  chr19:2169048-2169101
  hypo

SEQ ID NO: 54899 - DNA, 31 bp, Homo sapiens; identical to SEQ ID NO: 25101
  chr19:2177162-2177193
  hypo

SEQ ID NO: 54900 - DNA, 31 bp, Homo sapiens; identical to SEQ ID NO: 25102
  chr19:2182655-2182686
  hypo

SEQ ID NO: 54901 - DNA, 93 bp, Homo sapiens; identical to SEQ ID NO: 25103
  chr19:2182761-2182854
  hypo

SEQ ID NO: 54902 - DNA, 31 bp, Homo sapiens; identical to SEQ ID NO: 25104
  chr19:2188503-2188534
  hypo

SEQ ID NO: 54903 - DNA, 90 bp, Homo sapiens; identical to SEQ ID NO: 25106
  chr19:2216068-2216158
  hypo

SEQ ID NO: 54904 - DNA, 52 bp, Homo sapiens; identical to SEQ ID NO: 25107
  chr19:2216161-2216213
  hypo

SEQ ID NO: 54905 - DNA, 31 bp, Homo sapiens; identical to SEQ ID NO: 25108
  chr19:2216465-2216496
  hypo

SEQ ID NO: 54906 - DNA, 85 bp, Homo sapiens; identical to SEQ ID NO: 25109
  chr19:2219929-2220014
  hypo

SEQ ID NO: 54907 - DNA, 45 bp, Homo sapiens; identical to SEQ ID NO: 25110
  chr19:2222842-2222887
  hypo

SEQ ID NO: 54908 - DNA, 35 bp, Homo sapiens; identical to SEQ ID NO: 25111
  chr19:2244065-2244100
  hypo

SEQ ID NO: 54909 - DNA, 31 bp, Homo sapiens; identical to SEQ ID NO: 25112
  chr19:2266363-2266394
  hypo

SEQ ID NO: 54910 - DNA, 40 bp, Homo sapiens; identical to SEQ ID NO: 6497
  chr19:2273805-2273845
  hypo

SEQ ID NO: 54911 - DNA, 84 bp, Homo sapiens; identical to SEQ ID NO: 6498
  chr19:2273846-2273930
  hypo

SEQ ID NO: 54912 - DNA, 22 bp, Homo sapiens
  chr19:2273960-2273982
  hypo
gaggaaaggaggaactcgaaaa

SEQ ID NO: 54913 - DNA, 31 bp, Homo sapiens; identical to SEQ ID NO: 25116
  chr19:2275594-2275625
  hypo

SEQ ID NO: 54914 - DNA, 32 bp, Homo sapiens
  chr19:2275647-2275679
  hypo
ctggaccaggtgtgttcgccctgggttggggt

SEQ ID NO: 54915 - DNA, 27 bp, Homo sapiens
  chr19:2275940-2275967
  hypo
gagggccgcaagcgggtcagctgtgct

SEQ ID NO: 54916 - DNA, 61 bp, Homo sapiens; identical to SEQ ID NO: 25119
  chr19:2276265-2276326
  hypo

SEQ ID NO: 54917 - DNA, 31 bp, Homo sapiens; identical to SEQ ID NO: 6505
  chr19:2329160-2329191
  hypo

SEQ ID NO: 54918 - DNA, 2 bp, Homo sapiens
  chr19:2363008-2363010
  hypo
gg

SEQ ID NO: 54919 - DNA, 10 bp, Homo sapiens
  chr19:2376998-2377008
  hypo
gaaactggag

SEQ ID NO: 54920 - DNA, 51 bp, Homo sapiens; identical to SEQ ID NO: 25129
  chr19:2399105-2399156
  hypo

SEQ ID NO: 54921 - DNA, 31 bp, Homo sapiens; identical to SEQ ID NO: 25130
  chr19:2399160-2399191
  hypo

SEQ ID NO: 54922 - DNA, 31 bp, Homo sapiens; identical to SEQ ID NO: 6508
  chr19:2488866-2488897
  hypo

SEQ ID NO: 54923 - DNA, 2 bp, Homo sapiens
  chr19:2518479-2518481
  hypo
cc

SEQ ID NO: 54924 - DNA, 31 bp, Homo sapiens; identical to SEQ ID NO: 25138
  chr19:2672825-2672856
  hypo

SEQ ID NO: 54925 - DNA, 31 bp, Homo sapiens; identical to SEQ ID NO: 25140
  chr19:2733993-2734024
  hypo

SEQ ID NO: 54926 - DNA, 31 bp, Homo sapiens; identical to SEQ ID NO: 25141
  chr19:2753327-2753358
  hypo

SEQ ID NO: 54927 - DNA, 42 bp, Homo sapiens; identical to SEQ ID NO: 25142
  chr19:2795358-2795400
  hypo

SEQ ID NO: 54928 - DNA, 31 bp, Homo sapiens; identical to SEQ ID NO: 25143
  chr19:2795455-2795486
  hypo

SEQ ID NO: 54929 - DNA, 31 bp, Homo sapiens; identical to SEQ ID NO: 25144
  chr19:2804071-2804102
  hypo

SEQ ID NO: 54930 - DNA, 31 bp, Homo sapiens; identical to SEQ ID NO: 25145
  chr19:2917297-2917328
  hypo

SEQ ID NO: 54931 - DNA, 31 bp, Homo sapiens; identical to SEQ ID NO: 25146
  chr19:2920046-2920077
  hypo

SEQ ID NO: 54932 - DNA, 34 bp, Homo sapiens; identical to SEQ ID NO: 25147
  chr19:2927483-2927517
  hypo

SEQ ID NO: 54933 - DNA, 31 bp, Homo sapiens; identical to SEQ ID NO: 25148
  chr19:2934501-2934532
  hypo

SEQ ID NO: 54934 - DNA, 31 bp, Homo sapiens; identical to SEQ ID NO: 25149
  chr19:2934559-2934590
  hypo

SEQ ID NO: 54935 - DNA, 38 bp, Homo sapiens; identical to SEQ ID NO: 25151
  chr19:2938053-2938091
  hypo

SEQ ID NO: 54936 - DNA, 31 bp, Homo sapiens; identical to SEQ ID NO: 25153
  chr19:2939040-2939071
  hypo

SEQ ID NO: 54937 - DNA, 31 bp, Homo sapiens; identical to SEQ ID NO: 25154
  chr19:2941877-2941908
  hypo

SEQ ID NO: 54938 - DNA, 38 bp, Homo sapiens; identical to SEQ ID NO: 25155
  chr19:2941909-2941947
  hypo

SEQ ID NO: 54939 - DNA, 126 bp, Homo sapiens; identical to SEQ ID NO: 6515
  chr19:2944666-2944792
  hypo

SEQ ID NO: 54940 - DNA, 194 bp, Homo sapiens; identical to SEQ ID NO: 6516
  chr19:2944798-2944992
  hypo

SEQ ID NO: 54941 - DNA, 62 bp, Homo sapiens; identical to SEQ ID NO: 6520
  chr19:2950417-2950479
  hypo

SEQ ID NO: 54942 - DNA, 39 bp, Homo sapiens; identical to SEQ ID NO: 6521
  chr19:2950537-2950576
  hypo

SEQ ID NO: 54943 - DNA, 75 bp, Homo sapiens; identical to SEQ ID NO: 6522
  chr19:2950579-2950654
  hypo

SEQ ID NO: 54944 - DNA, 31 bp, Homo sapiens; identical to SEQ ID NO: 6523
  chr19:2950849-2950880
  hypo

SEQ ID NO: 54945 - DNA, 95 bp, Homo sapiens; identical to SEQ ID NO: 6524
  chr19:2950907-2951002
  hypo

SEQ ID NO: 54946 - DNA, 31 bp, Homo sapiens; identical to SEQ ID NO: 6526
  chr19:2977420-2977451
  hypo

SEQ ID NO: 54947 - DNA, 60 bp, Homo sapiens; identical to SEQ ID NO: 6527
  chr19:2977453-2977513
  hypo

SEQ ID NO: 54948 - DNA, 62 bp, Homo sapiens; identical to SEQ ID NO: 25165
  chr19:2996847-2996909
  hypo

SEQ ID NO: 54949 - DNA, 31 bp, Homo sapiens; identical to SEQ ID NO: 25166
  chr19:3055603-3055634
  hypo

SEQ ID NO: 54950 - DNA, 43 bp, Homo sapiens; identical to SEQ ID NO: 25167
  chr19:3055855-3055898
  hypo

SEQ ID NO: 54951 - DNA, 31 bp, Homo sapiens; identical to SEQ ID NO: 25168
  chr19:3056363-3056394
  hypo

SEQ ID NO: 54952 - DNA, 88 bp, Homo sapiens; identical to SEQ ID NO: 6528
  chr19:3094303-3094391
  hypo

SEQ ID NO: 54953 - DNA, 53 bp, Homo sapiens; identical to SEQ ID NO: 6529
  chr19:3094776-3094829
  hypo

SEQ ID NO: 54954 - DNA, 31 bp, Homo sapiens; identical to SEQ ID NO: 25171
  chr19:3102679-3102710
  hypo

SEQ ID NO: 54955 - DNA, 47 bp, Homo sapiens; identical to SEQ ID NO: 25172
  chr19:3105563-3105610
  hypo

SEQ ID NO: 54956 - DNA, 31 bp, Homo sapiens; identical to SEQ ID NO: 25173
  chr19:3105757-3105788
  hypo

SEQ ID NO: 54957 - DNA, 44 bp, Homo sapiens; identical to SEQ ID NO: 25174
  chr19:3105804-3105848
  hypo

SEQ ID NO: 54958 - DNA, 31 bp, Homo sapiens; identical to SEQ ID NO: 25175
  chr19:3108247-3108278
  hypo

SEQ ID NO: 54959 - DNA, 64 bp, Homo sapiens; identical to SEQ ID NO: 25176
  chr19:3109615-3109679
  hypo

SEQ ID NO: 54960 - DNA, 45 bp, Homo sapiens; identical to SEQ ID NO: 25177
  chr19:3109682-3109727
  hypo

SEQ ID NO: 54961 - DNA, 104 bp, Homo sapiens; identical to SEQ ID NO: 25178
  chr19:3113300-3113404
  hypo

SEQ ID NO: 54962 - DNA, 125 bp, Homo sapiens; identical to SEQ ID NO: 25179
  chr19:3113405-3113530
  hypo

SEQ ID NO: 54963 - DNA, 31 bp, Homo sapiens; identical to SEQ ID NO: 25180
  chr19:3113610-3113641
  hypo

SEQ ID NO: 54964 - DNA, 83 bp, Homo sapiens; identical to SEQ ID NO: 25181
  chr19:3114795-3114878
  hypo

SEQ ID NO: 54965 - DNA, 35 bp, Homo sapiens; identical to SEQ ID NO: 25182
  chr19:3115058-3115093
  hypo

SEQ ID NO: 54966 - DNA, 31 bp, Homo sapiens; identical to SEQ ID NO: 25183
  chr19:3117183-3117214
  hypo

SEQ ID NO: 54967 - DNA, 31 bp, Homo sapiens; identical to SEQ ID NO: 25184
  chr19:3117233-3117264
  hypo

SEQ ID NO: 54968 - DNA, 31 bp, Homo sapiens; identical to SEQ ID NO: 25185
  chr19:3118889-3118920
  hypo

SEQ ID NO: 54969 - DNA, 137 bp, Homo sapiens; identical to SEQ ID NO: 25186
  chr19:3118965-3119102
  hypo

SEQ ID NO: 54970 - DNA, 16 bp, Homo sapiens
  chr19:3219524-3219540
  hypo
agtcgccgcgccctgc

SEQ ID NO: 54971 - DNA, 55 bp, Homo sapiens; identical to SEQ ID NO: 6533
  chr19:3367361-3367416
  hypo

SEQ ID NO: 54972 - DNA, 31 bp, Homo sapiens; identical to SEQ ID NO: 25191
  chr19:3381002-3381033
  hypo

SEQ ID NO: 54973 - DNA, 54 bp, Homo sapiens; identical to SEQ ID NO: 25192
  chr19:3410577-3410631
  hypo

SEQ ID NO: 54974 - DNA, 61 bp, Homo sapiens; identical to SEQ ID NO: 25194
  chr19:3424702-3424763
  hypo

SEQ ID NO: 54975 - DNA, 40 bp, Homo sapiens; identical to SEQ ID NO: 25195
  chr19:3424793-3424833
  hypo

SEQ ID NO: 54976 - DNA, 31 bp, Homo sapiens; identical to SEQ ID NO: 25196
  chr19:3449069-3449100
  hypo

SEQ ID NO: 54977 - DNA, 31 bp, Homo sapiens; identical to SEQ ID NO: 25197
  chr19:3453420-3453451
  hypo

SEQ ID NO: 54978 - DNA, 87 bp, Homo sapiens; identical to SEQ ID NO: 25198
  chr19:3453991-3454078
  hypo

SEQ ID NO: 54979 - DNA, 58 bp, Homo sapiens; identical to SEQ ID NO: 6535
  chr19:3573236-3573294
  hypo

SEQ ID NO: 54980 - DNA, 2 bp, Homo sapiens
  chr19:3577704-3577706
  hypo
cc

SEQ ID NO: 54981 - DNA, 6 bp, Homo sapiens
  chr19:3577811-3577817
  hypo
cctgcc

SEQ ID NO: 54982 - DNA, 31 bp, Homo sapiens; identical to SEQ ID NO: 25202
  chr19:3577948-3577979
  hypo

SEQ ID NO: 54983 - DNA, 24 bp, Homo sapiens
  chr19:3578223-3578247
  hypo
atcacctcccggaggggcctacct

SEQ ID NO: 54984 - DNA, 31 bp, Homo sapiens; identical to SEQ ID NO: 25204
  chr19:3589345-3589376
  hypo

SEQ ID NO: 54985 - DNA, 31 bp, Homo sapiens; identical to SEQ ID NO: 25206
  chr19:3638706-3638737
  hypo

SEQ ID NO: 54986 - DNA, 125 bp, Homo sapiens; identical to SEQ ID NO: 25207
  chr19:3638745-3638870
  hypo

SEQ ID NO: 54987 - DNA, 35 bp, Homo sapiens; identical to SEQ ID NO: 25208
  chr19:3680258-3680293
  hypo

SEQ ID NO: 54988 - DNA, 45 bp, Homo sapiens; identical to SEQ ID NO: 25209
  chr19:3691223-3691268
  hypo

SEQ ID NO: 54989 - DNA, 31 bp, Homo sapiens; identical to SEQ ID NO: 25210
  chr19:3709473-3709504
  hypo

SEQ ID NO: 54990 - DNA, 31 bp, Homo sapiens; identical to SEQ ID NO: 25211
  chr19:3730409-3730440
  hypo

SEQ ID NO: 54991 - DNA, 67 bp, Homo sapiens; identical to SEQ ID NO: 25212
  chr19:3730456-3730523
  hypo

SEQ ID NO: 54992 - DNA, 31 bp, Homo sapiens; identical to SEQ ID NO: 25213
  chr19:3731830-3731861
  hypo

SEQ ID NO: 54993 - DNA, 96 bp, Homo sapiens; identical to SEQ ID NO: 25214
  chr19:3739004-3739100
  hypo

SEQ ID NO: 54994 - DNA, 49 bp, Homo sapiens; identical to SEQ ID NO: 25215
  chr19:3740454-3740503
  hypo

SEQ ID NO: 54995 - DNA, 151 bp, Homo sapiens; identical to SEQ ID NO: 25216
  chr19:3740633-3740784
  hypo

SEQ ID NO: 54996 - DNA, 44 bp, Homo sapiens
  chr19:3747849-3747893
  hypo
ccgctgacctcagctgcgacagccgcgttaacagcgactacgag

SEQ ID NO: 54997 - DNA, 43 bp, Homo sapiens; identical to SEQ ID NO: 25219
  chr19:3754227-3754270
  hypo

SEQ ID NO: 54998 - DNA, 77 bp, Homo sapiens; identical to SEQ ID NO: 25220
  chr19:3770863-3770940
  hypo

SEQ ID NO: 54999 - DNA, 2 bp, Homo sapiens
  chr19:3778990-3778992
  hypo
cc

SEQ ID NO: 55000 - DNA, 40 bp, Homo sapiens; identical to SEQ ID NO: 25227
  chr19:3807697-3807737
  hypo

SEQ ID NO: 55001 - DNA, 95 bp, Homo sapiens; identical to SEQ ID NO: 25228
  chr19:3816806-3816901
  hypo

SEQ ID NO: 55002 - DNA, 31 bp, Homo sapiens; identical to SEQ ID NO: 25229
  chr19:3830871-3830902
  hypo

SEQ ID NO: 55003 - DNA, 2 bp, Homo sapiens
  chr19:3855406-3855408
  hypo
aa

SEQ ID NO: 55004 - DNA, 72 bp, Homo sapiens; identical to SEQ ID NO: 25231
  chr19:3978024-3978096
  hypo

SEQ ID NO: 55005 - DNA, 31 bp, Homo sapiens; identical to SEQ ID NO: 25232
  chr19:3979327-3979358
  hypo

SEQ ID NO: 55006 - DNA, 31 bp, Homo sapiens; identical to SEQ ID NO: 25233
  chr19:3979372-3979403
  hypo

SEQ ID NO: 55007 - DNA, 46 bp, Homo sapiens; identical to SEQ ID NO: 25234
  chr19:4037905-4037951
  hypo

SEQ ID NO: 55008 - DNA, 35 bp, Homo sapiens; identical to SEQ ID NO: 25235
  chr19:4037959-4037994
  hypo

SEQ ID NO: 55009 - DNA, 31 bp, Homo sapiens; identical to SEQ ID NO: 25236
  chr19:4042779-4042810
  hypo

SEQ ID NO: 55010 - DNA, 39 bp, Homo sapiens; identical to SEQ ID NO: 25238
  chr19:4043526-4043565
  hypo

SEQ ID NO: 55011 - DNA, 31 bp, Homo sapiens; identical to SEQ ID NO: 25239
  chr19:4044507-4044538
  hypo

SEQ ID NO: 55012 - DNA, 2 bp, Homo sapiens
  chr19:4050406-4050408
  hypo
at

SEQ ID NO: 55013 - DNA, 2 bp, Homo sapiens
  chr19:4054304-4054306
  hypo
gg

SEQ ID NO: 55014 - DNA, 7 bp, Homo sapiens
  chr19:4054380-4054387
  hypo
acagcga

SEQ ID NO: 55015 - DNA, 18 bp, Homo sapiens
  chr19:4054418-4054436
  hypo
tggccgttctgcgtggcg

SEQ ID NO: 55016 - DNA, 41 bp, Homo sapiens
  chr19:4054601-4054642
  hypo
gccacggcggccacagcggcggccacggcctccttggtggc

SEQ ID NO: 55017 - DNA, 136 bp, Homo sapiens; identical to SEQ ID NO: 39912
  chr19:4054917-4055053
  hypo

SEQ ID NO: 55018 - DNA, 59 bp, Homo sapiens; identical to SEQ ID NO: 6541
  chr19:4064871-4064930
  hypo

SEQ ID NO: 55019 - DNA, 31 bp, Homo sapiens; identical to SEQ ID NO: 6542
  chr19:4064938-4064969
  hypo

SEQ ID NO: 55020 - DNA, 31 bp, Homo sapiens; identical to SEQ ID NO: 25250
  chr19:4094940-4094971
  hypo

SEQ ID NO: 55021 - DNA, 60 bp, Homo sapiens; identical to SEQ ID NO: 25251
  chr19:4095013-4095073
  hypo

SEQ ID NO: 55022 - DNA, 2 bp, Homo sapiens
  chr19:4096415-4096417
  hypo
gc

SEQ ID NO: 55023 - DNA, 31 bp, Homo sapiens; identical to SEQ ID NO: 25253
  chr19:4111004-4111035
  hypo

SEQ ID NO: 55024 - DNA, 31 bp, Homo sapiens; identical to SEQ ID NO: 25255
  chr19:4144137-4144168
  hypo

SEQ ID NO: 55025 - DNA, 31 bp, Homo sapiens; identical to SEQ ID NO: 25256
  chr19:4295628-4295659
  hypo

SEQ ID NO: 55026 - DNA, 115 bp, Homo sapiens; identical to SEQ ID NO: 25257
  chr19:4322985-4323100
  hypo

SEQ ID NO: 55027 - DNA, 2 bp, Homo sapiens
  chr19:4361538-4361540
  hypo
ac

SEQ ID NO: 55028 - DNA, 27 bp, Homo sapiens
  chr19:4361700-4361727
  hypo
gcgtgatgacgtcgccctcatggaagc

SEQ ID NO: 55029 - DNA, 137 bp, Homo sapiens; identical to SEQ ID NO: 6543
  chr19:4432849-4432986
  hypo

SEQ ID NO: 55030 - DNA, 31 bp, Homo sapiens; identical to SEQ ID NO: 25260
  chr19:4443067-4443098
  hypo

SEQ ID NO: 55031 - DNA, 38 bp, Homo sapiens; identical to SEQ ID NO: 25261
  chr19:4544027-4544065
  hypo

SEQ ID NO: 55032 - DNA, 2 bp, Homo sapiens
  chr19:4554998-4555000
  hypo
tt

SEQ ID NO: 55033 - DNA, 11 bp, Homo sapiens
  chr19:4556912-4556923
  hypo
aatgccagggc

SEQ ID NO: 55034 - DNA, 2 bp, Homo sapiens
  chr19:4679561-4679563
  hypo
ct

SEQ ID NO: 55035 - DNA, 30 bp, Homo sapiens
  chr19:4679619-4679649
  hypo
agcaccgaaggcaggcggaaccctgagctg

SEQ ID NO: 55036 - DNA, 2 bp, Homo sapiens
  chr19:4714198-4714200
  hypo
gc

SEQ ID NO: 55037 - DNA, 80 bp, Homo sapiens
  chr19:4714229-4714309
  hypo
gagtgcttctgcacctggaagcgggcggccgggtcatctgtggcggctgcgtcgcctcggtcggccgttggggtcccggt

SEQ ID NO: 55038 - DNA, 31 bp, Homo sapiens; identical to SEQ ID NO: 25278
  chr19:4794012-4794043
  hypo

SEQ ID NO: 55039 - DNA, 88 bp, Homo sapiens; identical to SEQ ID NO: 25280
  chr19:4816812-4816900
  hypo

SEQ ID NO: 55040 - DNA, 30 bp, Homo sapiens; identical to SEQ ID NO: 25281
  chr19:4885981-4886011
  hypo

SEQ ID NO: 55041 - DNA, 35 bp, Homo sapiens; identical to SEQ ID NO: 25282
  chr19:4902799-4902834
  hypo

SEQ ID NO: 55042 - DNA, 69 bp, Homo sapiens; identical to SEQ ID NO: 25283
  chr19:4930782-4930851
  hypo

SEQ ID NO: 55043 - DNA, 31 bp, Homo sapiens; identical to SEQ ID NO: 25284
  chr19:4985733-4985764
  hypo

SEQ ID NO: 55044 - DNA, 31 bp, Homo sapiens; identical to SEQ ID NO: 25285
  chr19:5023577-5023608
  hypo

SEQ ID NO: 55045 - DNA, 31 bp, Homo sapiens; identical to SEQ ID NO: 25286
  chr19:5030563-5030594
  hypo

SEQ ID NO: 55046 - DNA, 74 bp, Homo sapiens; identical to SEQ ID NO: 25287
  chr19:5031055-5031129
  hypo

SEQ ID NO: 55047 - DNA, 48 bp, Homo sapiens; identical to SEQ ID NO: 25288
  chr19:5031142-5031190
  hypo

SEQ ID NO: 55048 - DNA, 31 bp, Homo sapiens; identical to SEQ ID NO: 25289
  chr19:5047927-5047958
  hypo

SEQ ID NO: 55049 - DNA, 41 bp, Homo sapiens; identical to SEQ ID NO: 25290
  chr19:5049195-5049236
  hypo

SEQ ID NO: 55050 - DNA, 31 bp, Homo sapiens; identical to SEQ ID NO: 25291
  chr19:5070999-5071030
  hypo

SEQ ID NO: 55051 - DNA, 31 bp, Homo sapiens; identical to SEQ ID NO: 25292
  chr19:5073396-5073427
  hypo

SEQ ID NO: 55052 - DNA, 53 bp, Homo sapiens; identical to SEQ ID NO: 25293
  chr19:5218521-5218574
  hypo

SEQ ID NO: 55053 - DNA, 31 bp, Homo sapiens; identical to SEQ ID NO: 25294
  chr19:5218631-5218662
  hypo

SEQ ID NO: 55054 - DNA, 31 bp, Homo sapiens; identical to SEQ ID NO: 25295
  chr19:5218666-5218697
  hypo

SEQ ID NO: 55055 - DNA, 78 bp, Homo sapiens; identical to SEQ ID NO: 25296
  chr19:5231442-5231520
  hypo

SEQ ID NO: 55056 - DNA, 52 bp, Homo sapiens; identical to SEQ ID NO: 25297
  chr19:5245974-5246026
  hypo

SEQ ID NO: 55057 - DNA, 31 bp, Homo sapiens; identical to SEQ ID NO: 25298
  chr19:5274367-5274398
  hypo

SEQ ID NO: 55058 - DNA, 59 bp, Homo sapiens; identical to SEQ ID NO: 25299
  chr19:5274409-5274468
  hypo

SEQ ID NO: 55059 - DNA, 31 bp, Homo sapiens; identical to SEQ ID NO: 25300
  chr19:5312164-5312195
  hypo

SEQ ID NO: 55060 - DNA, 31 bp, Homo sapiens; identical to SEQ ID NO: 25301
  chr19:5312226-5312257
  hypo

SEQ ID NO: 55061 - DNA, 31 bp, Homo sapiens; identical to SEQ ID NO: 25302
  chr19:5312259-5312290
  hypo

SEQ ID NO: 55062 - DNA, 51 bp, Homo sapiens; identical to SEQ ID NO: 25303
  chr19:5312298-5312349
  hypo

SEQ ID NO: 55063 - DNA, 31 bp, Homo sapiens; identical to SEQ ID NO: 25304
  chr19:5582380-5582411
  hypo

SEQ ID NO: 55064 - DNA, 31 bp, Homo sapiens; identical to SEQ ID NO: 25307
  chr19:5608412-5608443
  hypo

SEQ ID NO: 55065 - DNA, 121 bp, Homo sapiens; identical to SEQ ID NO: 25308
  chr19:5695909-5696030
  hypo

SEQ ID NO: 55066 - DNA, 92 bp, Homo sapiens; identical to SEQ ID NO: 25309
  chr19:5696051-5696143
  hypo

SEQ ID NO: 55067 - DNA, 59 bp, Homo sapiens; identical to SEQ ID NO: 25310
  chr19:5696147-5696206
  hypo

SEQ ID NO: 55068 - DNA, 31 bp, Homo sapiens; identical to SEQ ID NO: 25311
  chr19:5698922-5698953
  hypo

SEQ ID NO: 55069 - DNA, 31 bp, Homo sapiens; identical to SEQ ID NO: 25312
  chr19:5785479-5785510
  hypo

SEQ ID NO: 55070 - DNA, 43 bp, Homo sapiens; identical to SEQ ID NO: 6547
  chr19:5804851-5804894
  hypo

SEQ ID NO: 55071 - DNA, 49 bp, Homo sapiens; identical to SEQ ID NO: 25314
  chr19:5805004-5805053
  hypo

SEQ ID NO: 55072 - DNA, 43 bp, Homo sapiens; identical to SEQ ID NO: 25315
  chr19:5844273-5844316
  hypo

SEQ ID NO: 55073 - DNA, 31 bp, Homo sapiens; identical to SEQ ID NO: 25316
  chr19:5858549-5858580
  hypo

SEQ ID NO: 55074 - DNA, 31 bp, Homo sapiens; identical to SEQ ID NO: 25317
  chr19:5858594-5858625
  hypo

SEQ ID NO: 55075 - DNA, 31 bp, Homo sapiens; identical to SEQ ID NO: 25318
  chr19:5859463-5859494
  hypo

SEQ ID NO: 55076 - DNA, 42 bp, Homo sapiens; identical to SEQ ID NO: 25319
  chr19:5867191-5867233
  hypo

SEQ ID NO: 55077 - DNA, 31 bp, Homo sapiens; identical to SEQ ID NO: 25320
  chr19:5885338-5885369
  hypo

SEQ ID NO: 55078 - DNA, 2 bp, Homo sapiens
  chr19:5896951-5896953
  hypo
ct

SEQ ID NO: 55079 - DNA, 31 bp, Homo sapiens; identical to SEQ ID NO: 25322
  chr19:5897475-5897506
  hypo

SEQ ID NO: 55080 - DNA, 2 bp, Homo sapiens
  chr19:5910338-5910340
  hypo
ca

SEQ ID NO: 55081 - DNA, 17 bp, Homo sapiens
  chr19:5915130-5915147
  hypo
ttcgactcctctgagaa

SEQ ID NO: 55082 - DNA, 31 bp, Homo sapiens; identical to SEQ ID NO: 25327
  chr19:5915367-5915398
  hypo

SEQ ID NO: 55083 - DNA, 2 bp, Homo sapiens
  chr19:5915420-5915422
  hypo
ca

SEQ ID NO: 55084 - DNA, 31 bp, Homo sapiens; identical to SEQ ID NO: 25329
  chr19:5915656-5915687
  hypo

SEQ ID NO: 55085 - DNA, 31 bp, Homo sapiens; identical to SEQ ID NO: 25330
  chr19:5915746-5915777
  hypo

SEQ ID NO: 55086 - DNA, 53 bp, Homo sapiens
  chr19:5915873-5915926
  hypo
caggtaacatgtccagcgggcccagtatctacattctggtgagcggcccgagg

SEQ ID NO: 55087 - DNA, 31 bp, Homo sapiens; identical to SEQ ID NO: 25332
  chr19:5915970-5916001
  hypo

SEQ ID NO: 55088 - DNA, 40 bp, Homo sapiens; identical to SEQ ID NO: 25333
  chr19:5938153-5938193
  hypo

SEQ ID NO: 55089 - DNA, 31 bp, Homo sapiens; identical to SEQ ID NO: 25334
  chr19:5938199-5938230
  hypo

SEQ ID NO: 55090 - DNA, 31 bp, Homo sapiens; identical to SEQ ID NO: 25335
  chr19:5938253-5938284
  hypo

SEQ ID NO: 55091 - DNA, 31 bp, Homo sapiens; identical to SEQ ID NO: 25336
  chr19:5938287-5938318
  hypo

SEQ ID NO: 55092 - DNA, 31 bp, Homo sapiens; identical to SEQ ID NO: 25337
  chr19:5957315-5957346
  hypo

SEQ ID NO: 55093 - DNA, 31 bp, Homo sapiens; identical to SEQ ID NO: 25338
  chr19:5957769-5957800
  hypo

SEQ ID NO: 55094 - DNA, 31 bp, Homo sapiens; identical to SEQ ID NO: 25339
  chr19:5957803-5957834
  hypo

SEQ ID NO: 55095 - DNA, 31 bp, Homo sapiens; identical to SEQ ID NO: 25340
  chr19:5994933-5994964
  hypo

SEQ ID NO: 55096 - DNA, 91 bp, Homo sapiens; identical to SEQ ID NO: 25341
  chr19:5994989-5995080
  hypo

SEQ ID NO: 55097 - DNA, 31 bp, Homo sapiens; identical to SEQ ID NO: 25342
  chr19:5995152-5995183
  hypo

SEQ ID NO: 55098 - DNA, 37 bp, Homo sapiens; identical to SEQ ID NO: 25343
  chr19:5995187-5995224
  hypo

SEQ ID NO: 55099 - DNA, 53 bp, Homo sapiens; identical to SEQ ID NO: 25344
  chr19:5995245-5995298
  hypo

SEQ ID NO: 55100 - DNA, 37 bp, Homo sapiens; identical to SEQ ID NO: 25345
  chr19:5995308-5995345
  hypo

SEQ ID NO: 55101 - DNA, 61 bp, Homo sapiens; identical to SEQ ID NO: 25346
  chr19:5996022-5996083
  hypo

SEQ ID NO: 55102 - DNA, 54 bp, Homo sapiens; identical to SEQ ID NO: 25347
  chr19:5996648-5996702
  hypo

SEQ ID NO: 55103 - DNA, 64 bp, Homo sapiens; identical to SEQ ID NO: 25348
  chr19:5997128-5997192
  hypo

SEQ ID NO: 55104 - DNA, 31 bp, Homo sapiens; identical to SEQ ID NO: 25349
  chr19:5998650-5998681
  hypo

SEQ ID NO: 55105 - DNA, 31 bp, Homo sapiens; identical to SEQ ID NO: 25350
  chr19:5998707-5998738
  hypo

SEQ ID NO: 55106 - DNA, 31 bp, Homo sapiens; identical to SEQ ID NO: 25351
  chr19:5998911-5998942
  hypo

SEQ ID NO: 55107 - DNA, 31 bp, Homo sapiens; identical to SEQ ID NO: 25352
  chr19:5999289-5999320
  hypo

SEQ ID NO: 55108 - DNA, 31 bp, Homo sapiens; identical to SEQ ID NO: 25353
  chr19:5999417-5999448
  hypo

SEQ ID NO: 55109 - DNA, 31 bp, Homo sapiens; identical to SEQ ID NO: 25354
  chr19:6001971-6002002
  hypo

SEQ ID NO: 55110 - DNA, 31 bp, Homo sapiens; identical to SEQ ID NO: 25355
  chr19:6002065-6002096
  hypo

SEQ ID NO: 55111 - DNA, 60 bp, Homo sapiens; identical to SEQ ID NO: 25356
  chr19:6002099-6002159
  hypo

SEQ ID NO: 55112 - DNA, 31 bp, Homo sapiens; identical to SEQ ID NO: 25357
  chr19:6002170-6002201
  hypo

SEQ ID NO: 55113 - DNA, 44 bp, Homo sapiens; identical to SEQ ID NO: 25358
  chr19:6002204-6002248
  hypo

SEQ ID NO: 55114 - DNA, 31 bp, Homo sapiens; identical to SEQ ID NO: 25359
  chr19:6003432-6003463
  hypo

SEQ ID NO: 55115 - DNA, 31 bp, Homo sapiens; identical to SEQ ID NO: 25360
  chr19:6003849-6003880
  hypo

SEQ ID NO: 55116 - DNA, 59 bp, Homo sapiens; identical to SEQ ID NO: 25363
  chr19:6004162-6004221
  hypo

SEQ ID NO: 55117 - DNA, 31 bp, Homo sapiens; identical to SEQ ID NO: 25364
  chr19:6004271-6004302
  hypo

SEQ ID NO: 55118 - DNA, 46 bp, Homo sapiens; identical to SEQ ID NO: 25365
  chr19:6004499-6004545
  hypo

SEQ ID NO: 55119 - DNA, 31 bp, Homo sapiens; identical to SEQ ID NO: 25366
  chr19:6004552-6004583
  hypo

SEQ ID NO: 55120 - DNA, 31 bp, Homo sapiens; identical to SEQ ID NO: 25367
  chr19:6005507-6005538
  hypo

SEQ ID NO: 55121 - DNA, 31 bp, Homo sapiens; identical to SEQ ID NO: 25368
  chr19:6005977-6006008
  hypo

SEQ ID NO: 55122 - DNA, 31 bp, Homo sapiens; identical to SEQ ID NO: 25369
  chr19:6006014-6006045
  hypo

SEQ ID NO: 55123 - DNA, 31 bp, Homo sapiens; identical to SEQ ID NO: 25370
  chr19:6007013-6007044
  hypo

SEQ ID NO: 55124 - DNA, 31 bp, Homo sapiens; identical to SEQ ID NO: 25371
  chr19:6008233-6008264
  hypo

SEQ ID NO: 55125 - DNA, 31 bp, Homo sapiens; identical to SEQ ID NO: 25372
  chr19:6010176-6010207
  hypo

SEQ ID NO: 55126 - DNA, 57 bp, Homo sapiens; identical to SEQ ID NO: 25373
  chr19:6010214-6010271
  hypo

SEQ ID NO: 55127 - DNA, 31 bp, Homo sapiens; identical to SEQ ID NO: 25374
  chr19:6020513-6020544
  hypo

SEQ ID NO: 55128 - DNA, 31 bp, Homo sapiens; identical to SEQ ID NO: 25375
  chr19:6026068-6026099
  hypo

SEQ ID NO: 55129 - DNA, 105 bp, Homo sapiens; identical to SEQ ID NO: 25376
  chr19:6026146-6026251
  hypo

SEQ ID NO: 55130 - DNA, 75 bp, Homo sapiens; identical to SEQ ID NO: 25377
  chr19:6027063-6027138
  hypo

SEQ ID NO: 55131 - DNA, 31 bp, Homo sapiens; identical to SEQ ID NO: 25378
  chr19:6027415-6027446
  hypo

SEQ ID NO: 55132 - DNA, 31 bp, Homo sapiens; identical to SEQ ID NO: 25379
  chr19:6033195-6033226
  hypo

SEQ ID NO: 55133 - DNA, 55 bp, Homo sapiens; identical to SEQ ID NO: 25380
  chr19:6040233-6040288
  hypo

SEQ ID NO: 55134 - DNA, 37 bp, Homo sapiens; identical to SEQ ID NO: 25381
  chr19:6044406-6044443
  hypo

SEQ ID NO: 55135 - DNA, 31 bp, Homo sapiens; identical to SEQ ID NO: 25382
  chr19:6044607-6044638
  hypo

SEQ ID NO: 55136 - DNA, 31 bp, Homo sapiens; identical to SEQ ID NO: 25383
  chr19:6044662-6044693
  hypo

SEQ ID NO: 55137 - DNA, 41 bp, Homo sapiens; identical to SEQ ID NO: 25384
  chr19:6044708-6044749
  hypo

SEQ ID NO: 55138 - DNA, 31 bp, Homo sapiens; identical to SEQ ID NO: 25385
  chr19:6045211-6045242
  hypo

SEQ ID NO: 55139 - DNA, 34 bp, Homo sapiens; identical to SEQ ID NO: 25386
  chr19:6045243-6045277
  hypo

SEQ ID NO: 55140 - DNA, 31 bp, Homo sapiens; identical to SEQ ID NO: 25387
  chr19:6045328-6045359
  hypo

SEQ ID NO: 55141 - DNA, 31 bp, Homo sapiens; identical to SEQ ID NO: 25388
  chr19:6045465-6045496
  hypo

SEQ ID NO: 55142 - DNA, 31 bp, Homo sapiens; identical to SEQ ID NO: 25389
  chr19:6062945-6062976
  hypo

SEQ ID NO: 55143 - DNA, 73 bp, Homo sapiens; identical to SEQ ID NO: 25390
  chr19:6063034-6063107
  hypo

SEQ ID NO: 55144 - DNA, 62 bp, Homo sapiens; identical to SEQ ID NO: 25391
  chr19:6064107-6064169
  hypo

SEQ ID NO: 55145 - DNA, 40 bp, Homo sapiens; identical to SEQ ID NO: 25392
  chr19:6064171-6064211
  hypo

SEQ ID NO: 55146 - DNA, 31 bp, Homo sapiens; identical to SEQ ID NO: 25393
  chr19:6064230-6064261
  hypo

SEQ ID NO: 55147 - DNA, 31 bp, Homo sapiens; identical to SEQ ID NO: 25394
  chr19:6083196-6083227
  hypo

SEQ ID NO: 55148 - DNA, 31 bp, Homo sapiens; identical to SEQ ID NO: 25395
  chr19:6095199-6095230
  hypo

SEQ ID NO: 55149 - DNA, 60 bp, Homo sapiens; identical to SEQ ID NO: 25397
  chr19:6105443-6105503
  hypo

SEQ ID NO: 55150 - DNA, 54 bp, Homo sapiens; identical to SEQ ID NO: 25398
  chr19:6105627-6105681
  hypo

SEQ ID NO: 55151 - DNA, 31 bp, Homo sapiens; identical to SEQ ID NO: 25399
  chr19:6105699-6105730
  hypo

SEQ ID NO: 55152 - DNA, 567 bp, Homo sapiens; identical to SEQ ID NO: 6548
  chr19:6110323-6110890
  hypo

SEQ ID NO: 55153 - DNA, 31 bp, Homo sapiens; identical to SEQ ID NO: 6549
  chr19:6110900-6110931
  hypo

SEQ ID NO: 55154 - DNA, 31 bp, Homo sapiens; identical to SEQ ID NO: 25403
  chr19:6345240-6345271
  hypo

SEQ ID NO: 55155 - DNA, 31 bp, Homo sapiens; identical to SEQ ID NO: 25404
  chr19:6345351-6345382
  hypo

SEQ ID NO: 55156 - DNA, 31 bp, Homo sapiens; identical to SEQ ID NO: 25405
  chr19:6425393-6425424
  hypo

SEQ ID NO: 55157 - DNA, 31 bp, Homo sapiens; identical to SEQ ID NO: 6551
  chr19:6459633-6459664
  hypo

SEQ ID NO: 55158 - DNA, 204 bp, Homo sapiens; identical to SEQ ID NO: 39929
  chr19:6590881-6591085
  hypo

SEQ ID NO: 55159 - DNA, 44 bp, Homo sapiens; identical to SEQ ID NO: 6561
  chr19:6591087-6591131
  hypo

SEQ ID NO: 55160 - DNA, 31 bp, Homo sapiens; identical to SEQ ID NO: 6562
  chr19:6591154-6591185
  hypo

SEQ ID NO: 55161 - DNA, 31 bp, Homo sapiens; identical to SEQ ID NO: 25414
  chr19:6829820-6829851
  hypo

SEQ ID NO: 55162 - DNA, 193 bp, Homo sapiens; identical to SEQ ID NO: 6567
  chr19:7293748-7293941
  hypo

SEQ ID NO: 55163 - DNA, 31 bp, Homo sapiens; identical to SEQ ID NO: 6568
  chr19:7294068-7294099
  hypo

SEQ ID NO: 55164 - DNA, 54 bp, Homo sapiens; identical to SEQ ID NO: 6569
  chr19:7294178-7294232
  hypo

SEQ ID NO: 55165 - DNA, 31 bp, Homo sapiens; identical to SEQ ID NO: 6570
  chr19:7294289-7294320
  hypo

SEQ ID NO: 55166 - DNA, 185 bp, Homo sapiens; identical to SEQ ID NO: 6571
  chr19:7294496-7294681
  hypo

SEQ ID NO: 55167 - DNA, 81 bp, Homo sapiens; identical to SEQ ID NO: 6575
  chr19:7459680-7459761
  hypo

SEQ ID NO: 55168 - DNA, 137 bp, Homo sapiens; identical to SEQ ID NO: 6576
  chr19:7459763-7459900
  hypo

SEQ ID NO: 55169 - DNA, 90 bp, Homo sapiens; identical to SEQ ID NO: 6577
  chr19:7460065-7460155
  hypo

SEQ ID NO: 55170 - DNA, 123 bp, Homo sapiens; identical to SEQ ID NO: 6578
  chr19:7460171-7460294
  hypo

SEQ ID NO: 55171 - DNA, 66 bp, Homo sapiens; identical to SEQ ID NO: 6579
  chr19:7460310-7460376
  hypo

SEQ ID NO: 55172 - DNA, 31 bp, Homo sapiens; identical to SEQ ID NO: 6580
  chr19:7460385-7460416
  hypo

SEQ ID NO: 55173 - DNA, 45 bp, Homo sapiens; identical to SEQ ID NO: 6581
  chr19:7460445-7460490
  hypo

SEQ ID NO: 55174 - DNA, 50 bp, Homo sapiens; identical to SEQ ID NO: 6582
  chr19:7460506-7460556
  hypo

SEQ ID NO: 55175 - DNA, 31 bp, Homo sapiens; identical to SEQ ID NO: 25429
  chr19:7484063-7484094
  hypo

SEQ ID NO: 55176 - DNA, 31 bp, Homo sapiens; identical to SEQ ID NO: 25430
  chr19:7484128-7484159
  hypo

SEQ ID NO: 55177 - DNA, 31 bp, Homo sapiens; identical to SEQ ID NO: 25431
  chr19:7484795-7484826
  hypo

SEQ ID NO: 55178 - DNA, 31 bp, Homo sapiens; identical to SEQ ID NO: 25433
  chr19:7535318-7535349
  hypo

SEQ ID NO: 55179 - DNA, 40 bp, Homo sapiens; identical to SEQ ID NO: 25434
  chr19:7535356-7535396
  hypo

SEQ ID NO: 55180 - DNA, 31 bp, Homo sapiens; identical to SEQ ID NO: 6583
  chr19:7553841-7553872
  hypo

SEQ ID NO: 55181 - DNA, 35 bp, Homo sapiens; identical to SEQ ID NO: 25437
  chr19:7660555-7660590
  hypo

SEQ ID NO: 55182 - DNA, 130 bp, Homo sapiens; identical to SEQ ID NO: 6587
  chr19:7660714-7660844
  hypo

SEQ ID NO: 55183 - DNA, 52 bp, Homo sapiens; identical to SEQ ID NO: 6588
  chr19:7660882-7660934
  hypo

SEQ ID NO: 55184 - DNA, 37 bp, Homo sapiens; identical to SEQ ID NO: 25440
  chr19:7685313-7685350
  hypo

SEQ ID NO: 55185 - DNA, 73 bp, Homo sapiens; identical to SEQ ID NO: 25441
  chr19:7685353-7685426
  hypo

SEQ ID NO: 55186 - DNA, 31 bp, Homo sapiens; identical to SEQ ID NO: 25442
  chr19:7685530-7685561
  hypo

SEQ ID NO: 55187 - DNA, 52 bp, Homo sapiens; identical to SEQ ID NO: 25443
  chr19:7711961-7712013
  hypo

SEQ ID NO: 55188 - DNA, 188 bp, Homo sapiens; identical to SEQ ID NO: 25444
  chr19:7712021-7712209
  hypo

SEQ ID NO: 55189 - DNA, 31 bp, Homo sapiens; identical to SEQ ID NO: 6590
  chr19:7762517-7762548
  hypo

SEQ ID NO: 55190 - DNA, 31 bp, Homo sapiens; identical to SEQ ID NO: 25446
  chr19:7946856-7946887
  hypo

SEQ ID NO: 55191 - DNA, 51 bp, Homo sapiens; identical to SEQ ID NO: 25448
  chr19:7989495-7989546
  hypo

SEQ ID NO: 55192 - DNA, 81 bp, Homo sapiens; identical to SEQ ID NO: 6591
  chr19:7990125-7990206
  hypo

SEQ ID NO: 55193 - DNA, 115 bp, Homo sapiens; identical to SEQ ID NO: 6592
  chr19:7990893-7991008
  hypo

SEQ ID NO: 55194 - DNA, 82 bp, Homo sapiens; identical to SEQ ID NO: 6593
  chr19:7991079-7991161
  hypo

SEQ ID NO: 55195 - DNA, 50 bp, Homo sapiens; identical to SEQ ID NO: 25452
  chr19:7992142-7992192
  hypo

SEQ ID NO: 55196 - DNA, 31 bp, Homo sapiens; identical to SEQ ID NO: 25453
  chr19:8053914-8053945
  hypo

SEQ ID NO: 55197 - DNA, 2 bp, Homo sapiens
  chr19:8057696-8057698
  hypo
ct

SEQ ID NO: 55198 - DNA, 31 bp, Homo sapiens; identical to SEQ ID NO: 25457
  chr19:8176033-8176064
  hypo

SEQ ID NO: 55199 - DNA, 31 bp, Homo sapiens; identical to SEQ ID NO: 25458
  chr19:8183831-8183862
  hypo

SEQ ID NO: 55200 - DNA, 38 bp, Homo sapiens; identical to SEQ ID NO: 25459
  chr19:8203389-8203427
  hypo

SEQ ID NO: 55201 - DNA, 190 bp, Homo sapiens; identical to SEQ ID NO: 6597
  chr19:8274531-8274721
  hypo

SEQ ID NO: 55202 - DNA, 11 bp, Homo sapiens
  chr19:8528371-8528382
  hypo
cctccaaaggg

SEQ ID NO: 55203 - DNA, 36 bp, Homo sapiens; identical to SEQ ID NO: 25463
  chr19:8528434-8528470
  hypo

SEQ ID NO: 55204 - DNA, 59 bp, Homo sapiens; identical to SEQ ID NO: 25464
  chr19:8528501-8528560
  hypo

SEQ ID NO: 55205 - DNA, 31 bp, Homo sapiens; identical to SEQ ID NO: 25465
  chr19:8554604-8554635
  hypo

SEQ ID NO: 55206 - DNA, 41 bp, Homo sapiens; identical to SEQ ID NO: 25466
  chr19:8554690-8554731
  hypo

SEQ ID NO: 55207 - DNA, 31 bp, Homo sapiens; identical to SEQ ID NO: 25467
  chr19:8554738-8554769
  hypo

SEQ ID NO: 55208 - DNA, 31 bp, Homo sapiens; identical to SEQ ID NO: 25468
  chr19:8555044-8555075
  hypo

SEQ ID NO: 55209 - DNA, 39 bp, Homo sapiens; identical to SEQ ID NO: 25469
  chr19:8555098-8555137
  hypo

SEQ ID NO: 55210 - DNA, 41 bp, Homo sapiens; identical to SEQ ID NO: 25470
  chr19:8575699-8575740
  hypo

SEQ ID NO: 55211 - DNA, 31 bp, Homo sapiens; identical to SEQ ID NO: 25471
  chr19:8576371-8576402
  hypo

SEQ ID NO: 55212 - DNA, 168 bp, Homo sapiens
  chr19:8576622-8576790
  hypo
ccggtgggggcaggggcgggggtcgtgaagggttccagcagcgggaacggcaggcccggcgctgatgcggggtcaacctccggggggcgctccggcgcgggcggctctcggtccagggccgggggtggcggcggggctgggctctgcgcatgctccgcgcaaacatgc

SEQ ID NO: 55213 - DNA, 31 bp, Homo sapiens; identical to SEQ ID NO: 6598
  chr19:8579004-8579035
  hypo

SEQ ID NO: 55214 - DNA, 74 bp, Homo sapiens; identical to SEQ ID NO: 6599
  chr19:8579158-8579232
  hypo

SEQ ID NO: 55215 - DNA, 46 bp, Homo sapiens; identical to SEQ ID NO: 25475
  chr19:8587384-8587430
  hypo

SEQ ID NO: 55216 - DNA, 35 bp, Homo sapiens; identical to SEQ ID NO: 25476
  chr19:8587554-8587589
  hypo

SEQ ID NO: 55217 - DNA, 31 bp, Homo sapiens; identical to SEQ ID NO: 25477
  chr19:8606744-8606775
  hypo

SEQ ID NO: 55218 - DNA, 31 bp, Homo sapiens; identical to SEQ ID NO: 25479
  chr19:8934835-8934866
  hypo

SEQ ID NO: 55219 - DNA, 31 bp, Homo sapiens; identical to SEQ ID NO: 25480
  chr19:8934890-8934921
  hypo

SEQ ID NO: 55220 - DNA, 31 bp, Homo sapiens; identical to SEQ ID NO: 25481
  chr19:9099750-9099781
  hypo

SEQ ID NO: 55221 - DNA, 31 bp, Homo sapiens; identical to SEQ ID NO: 6600
  chr19:9267730-9267761
  hypo

SEQ ID NO: 55222 - DNA, 31 bp, Homo sapiens; identical to SEQ ID NO: 6602
  chr19:9896567-9896598
  hypo

SEQ ID NO: 55223 - DNA, 39 bp, Homo sapiens; identical to SEQ ID NO: 25484
  chr19:9921965-9922004
  hypo

SEQ ID NO: 55224 - DNA, 20 bp, Homo sapiens
  chr19:9937511-9937531
  hypo
ggaggcggctctcaagcaca

SEQ ID NO: 55225 - DNA, 60 bp, Homo sapiens; identical to SEQ ID NO: 25489
  chr19:9960943-9961003
  hypo

SEQ ID NO: 55226 - DNA, 31 bp, Homo sapiens; identical to SEQ ID NO: 25490
  chr19:9981318-9981349
  hypo

SEQ ID NO: 55227 - DNA, 62 bp, Homo sapiens; identical to SEQ ID NO: 6604
  chr19:10197476-10197538
  hypo

SEQ ID NO: 55228 - DNA, 49 bp, Homo sapiens; identical to SEQ ID NO: 6605
  chr19:10197545-10197594
  hypo

SEQ ID NO: 55229 - DNA, 31 bp, Homo sapiens; identical to SEQ ID NO: 25494
  chr19:10287834-10287865
  hypo

SEQ ID NO: 55230 - DNA, 34 bp, Homo sapiens; identical to SEQ ID NO: 25495
  chr19:10295673-10295707
  hypo

SEQ ID NO: 55231 - DNA, 38 bp, Homo sapiens; identical to SEQ ID NO: 6609
  chr19:10363216-10363254
  hypo

SEQ ID NO: 55232 - DNA, 76 bp, Homo sapiens; identical to SEQ ID NO: 6611
  chr19:10381114-10381190
  hypo

SEQ ID NO: 55233 - DNA, 31 bp, Homo sapiens; identical to SEQ ID NO: 25498
  chr19:10433903-10433934
  hypo

SEQ ID NO: 55234 - DNA, 50 bp, Homo sapiens; identical to SEQ ID NO: 6621
  chr19:10529657-10529707
  hypo

SEQ ID NO: 55235 - DNA, 45 bp, Homo sapiens; identical to SEQ ID NO: 6622
  chr19:10529915-10529960
  hypo

SEQ ID NO: 55236 - DNA, 31 bp, Homo sapiens; identical to SEQ ID NO: 6623
  chr19:10529970-10530001
  hypo

SEQ ID NO: 55237 - DNA, 68 bp, Homo sapiens; identical to SEQ ID NO: 6624
  chr19:10530026-10530094
  hypo

SEQ ID NO: 55238 - DNA, 17 bp, Homo sapiens
  chr19:10530117-10530134
  hypo
ggctcgcctgtttactc

SEQ ID NO: 55239 - DNA, 41 bp, Homo sapiens; identical to SEQ ID NO: 25504
  chr19:10665923-10665964
  hypo

SEQ ID NO: 55240 - DNA, 31 bp, Homo sapiens; identical to SEQ ID NO: 25505
  chr19:10685491-10685522
  hypo

SEQ ID NO: 55241 - DNA, 31 bp, Homo sapiens; identical to SEQ ID NO: 25506
  chr19:10685523-10685554
  hypo

SEQ ID NO: 55242 - DNA, 31 bp, Homo sapiens; identical to SEQ ID NO: 25507
  chr19:10685577-10685608
  hypo

SEQ ID NO: 55243 - DNA, 43 bp, Homo sapiens; identical to SEQ ID NO: 25508
  chr19:10689001-10689044
  hypo

SEQ ID NO: 55244 - DNA, 31 bp, Homo sapiens; identical to SEQ ID NO: 6626
  chr19:10691748-10691779
  hypo

SEQ ID NO: 55245 - DNA, 81 bp, Homo sapiens; identical to SEQ ID NO: 39989
  chr19:10691799-10691880
  hypo

SEQ ID NO: 55246 - DNA, 31 bp, Homo sapiens; identical to SEQ ID NO: 25513
  chr19:10726540-10726571
  hypo

SEQ ID NO: 55247 - DNA, 31 bp, Homo sapiens; identical to SEQ ID NO: 25515
  chr19:10732753-10732784
  hypo

SEQ ID NO: 55248 - DNA, 31 bp, Homo sapiens; identical to SEQ ID NO: 25516
  chr19:10732800-10732831
  hypo

SEQ ID NO: 55249 - DNA, 38 bp, Homo sapiens; identical to SEQ ID NO: 25517
  chr19:10732846-10732884
  hypo

SEQ ID NO: 55250 - DNA, 31 bp, Homo sapiens; identical to SEQ ID NO: 25518
  chr19:10742230-10742261
  hypo

SEQ ID NO: 55251 - DNA, 45 bp, Homo sapiens; identical to SEQ ID NO: 25519
  chr19:10742290-10742335
  hypo

SEQ ID NO: 55252 - DNA, 31 bp, Homo sapiens; identical to SEQ ID NO: 6631
  chr19:10762250-10762281
  hypo

SEQ ID NO: 55253 - DNA, 63 bp, Homo sapiens; identical to SEQ ID NO: 25522
  chr19:10823485-10823548
  hypo

SEQ ID NO: 55254 - DNA, 2 bp, Homo sapiens
  chr19:10859212-10859214
  hypo
ag

SEQ ID NO: 55255 - DNA, 31 bp, Homo sapiens; identical to SEQ ID NO: 25525
  chr19:10872494-10872525
  hypo

SEQ ID NO: 55256 - DNA, 30 bp, Homo sapiens; identical to SEQ ID NO: 25526
  chr19:10881731-10881761
  hypo

SEQ ID NO: 55257 - DNA, 31 bp, Homo sapiens; identical to SEQ ID NO: 25527
  chr19:10940832-10940863
  hypo

SEQ ID NO: 55258 - DNA, 31 bp, Homo sapiens; identical to SEQ ID NO: 25528
  chr19:11003116-11003147
  hypo

SEQ ID NO: 55259 - DNA, 31 bp, Homo sapiens; identical to SEQ ID NO: 25529
  chr19:11003214-11003245
  hypo

SEQ ID NO: 55260 - DNA, 31 bp, Homo sapiens; identical to SEQ ID NO: 25530
  chr19:11003247-11003278
  hypo

SEQ ID NO: 55261 - DNA, 53 bp, Homo sapiens; identical to SEQ ID NO: 25531
  chr19:11008200-11008253
  hypo

SEQ ID NO: 55262 - DNA, 69 bp, Homo sapiens; identical to SEQ ID NO: 25532
  chr19:11008258-11008327
  hypo

SEQ ID NO: 55263 - DNA, 47 bp, Homo sapiens; identical to SEQ ID NO: 25534
  chr19:11026630-11026677
  hypo

SEQ ID NO: 55264 - DNA, 2 bp, Homo sapiens
  chr19:11129718-11129720
  hypo
gt

SEQ ID NO: 55265 - DNA, 31 bp, Homo sapiens; identical to SEQ ID NO: 25538
  chr19:11129840-11129871
  hypo

SEQ ID NO: 55266 - DNA, 31 bp, Homo sapiens; identical to SEQ ID NO: 25539
  chr19:11159058-11159089
  hypo

SEQ ID NO: 55267 - DNA, 31 bp, Homo sapiens; identical to SEQ ID NO: 25540
  chr19:11159327-11159358
  hypo

SEQ ID NO: 55268 - DNA, 31 bp, Homo sapiens; identical to SEQ ID NO: 25541
  chr19:11160309-11160340
  hypo

SEQ ID NO: 55269 - DNA, 201 bp, Homo sapiens; identical to SEQ ID NO: 6634
  chr19:11200921-11201122
  hypo

SEQ ID NO: 55270 - DNA, 89 bp, Homo sapiens; identical to SEQ ID NO: 6635
  chr19:11201126-11201215
  hypo

SEQ ID NO: 55271 - DNA, 31 bp, Homo sapiens; identical to SEQ ID NO: 6636
  chr19:11201271-11201302
  hypo

SEQ ID NO: 55272 - DNA, 31 bp, Homo sapiens; identical to SEQ ID NO: 25545
  chr19:11285561-11285592
  hypo

SEQ ID NO: 55273 - DNA, 40 bp, Homo sapiens; identical to SEQ ID NO: 25546
  chr19:11304533-11304573
  hypo

SEQ ID NO: 55274 - DNA, 172 bp, Homo sapiens; identical to SEQ ID NO: 6639
  chr19:11308101-11308273
  hypo

SEQ ID NO: 55275 - DNA, 31 bp, Homo sapiens; identical to SEQ ID NO: 25548
  chr19:11327509-11327540
  hypo

SEQ ID NO: 55276 - DNA, 31 bp, Homo sapiens; identical to SEQ ID NO: 25549
  chr19:11327562-11327593
  hypo

SEQ ID NO: 55277 - DNA, 31 bp, Homo sapiens; identical to SEQ ID NO: 25550
  chr19:11327619-11327650
  hypo

SEQ ID NO: 55278 - DNA, 31 bp, Homo sapiens; identical to SEQ ID NO: 25551
  chr19:11327655-11327686
  hypo

SEQ ID NO: 55279 - DNA, 31 bp, Homo sapiens; identical to SEQ ID NO: 25552
  chr19:11333606-11333637
  hypo

SEQ ID NO: 55280 - DNA, 31 bp, Homo sapiens; identical to SEQ ID NO: 25553
  chr19:11333639-11333670
  hypo

SEQ ID NO: 55281 - DNA, 55 bp, Homo sapiens; identical to SEQ ID NO: 25554
  chr19:11339622-11339677
  hypo

SEQ ID NO: 55282 - DNA, 31 bp, Homo sapiens; identical to SEQ ID NO: 25555
  chr19:11339685-11339716
  hypo

SEQ ID NO: 55283 - DNA, 49 bp, Homo sapiens; identical to SEQ ID NO: 25556
  chr19:11339724-11339773
  hypo

SEQ ID NO: 55284 - DNA, 31 bp, Homo sapiens; identical to SEQ ID NO: 25557
  chr19:11361414-11361445
  hypo

SEQ ID NO: 55285 - DNA, 43 bp, Homo sapiens; identical to SEQ ID NO: 6640
  chr19:11373071-11373114
  hypo

SEQ ID NO: 55286 - DNA, 31 bp, Homo sapiens; identical to SEQ ID NO: 6641
  chr19:11399747-11399778
  hypo

SEQ ID NO: 55287 - DNA, 175 bp, Homo sapiens; identical to SEQ ID NO: 6642
  chr19:11465992-11466167
  hypo

SEQ ID NO: 55288 - DNA, 31 bp, Homo sapiens; identical to SEQ ID NO: 6643
  chr19:11466333-11466364
  hypo

SEQ ID NO: 55289 - DNA, 31 bp, Homo sapiens; identical to SEQ ID NO: 6644
  chr19:11466379-11466410
  hypo

SEQ ID NO: 55290 - DNA, 31 bp, Homo sapiens; identical to SEQ ID NO: 25564
  chr19:11515224-11515255
  hypo

SEQ ID NO: 55291 - DNA, 31 bp, Homo sapiens; identical to SEQ ID NO: 25565
  chr19:11527679-11527710
  hypo

SEQ ID NO: 55292 - DNA, 31 bp, Homo sapiens; identical to SEQ ID NO: 25566
  chr19:11549271-11549302
  hypo

SEQ ID NO: 55293 - DNA, 2 bp, Homo sapiens
  chr19:11594588-11594590
  hypo
ag

SEQ ID NO: 55294 - DNA, 31 bp, Homo sapiens; identical to SEQ ID NO: 25568
  chr19:11608299-11608330
  hypo

SEQ ID NO: 55295 - DNA, 30 bp, Homo sapiens; identical to SEQ ID NO: 25569
  chr19:11666079-11666109
  hypo

SEQ ID NO: 55296 - DNA, 31 bp, Homo sapiens; identical to SEQ ID NO: 25570
  chr19:11699981-11700012
  hypo

SEQ ID NO: 55297 - DNA, 31 bp, Homo sapiens; identical to SEQ ID NO: 25571
  chr19:11700032-11700063
  hypo

SEQ ID NO: 55298 - DNA, 53 bp, Homo sapiens; identical to SEQ ID NO: 25572
  chr19:11794320-11794373
  hypo

SEQ ID NO: 55299 - DNA, 31 bp, Homo sapiens; identical to SEQ ID NO: 25573
  chr19:11794390-11794421
  hypo

SEQ ID NO: 55300 - DNA, 31 bp, Homo sapiens; identical to SEQ ID NO: 25574
  chr19:11794445-11794476
  hypo

SEQ ID NO: 55301 - DNA, 50 bp, Homo sapiens; identical to SEQ ID NO: 25577
  chr19:11961500-11961550
  hypo

SEQ ID NO: 55302 - DNA, 2 bp, Homo sapiens
  chr19:12146543-12146545
  hypo
ag

SEQ ID NO: 55303 - DNA, 31 bp, Homo sapiens; identical to SEQ ID NO: 25579
  chr19:12628508-12628539
  hypo

SEQ ID NO: 55304 - DNA, 31 bp, Homo sapiens; identical to SEQ ID NO: 25580
  chr19:12729991-12730022
  hypo

SEQ ID NO: 55305 - DNA, 31 bp, Homo sapiens; identical to SEQ ID NO: 25581
  chr19:12730024-12730055
  hypo

SEQ ID NO: 55306 - DNA, 2 bp, Homo sapiens
  chr19:12747554-12747556
  hypo
ac

SEQ ID NO: 55307 - DNA, 31 bp, Homo sapiens; identical to SEQ ID NO: 25583
  chr19:12757980-12758011
  hypo

SEQ ID NO: 55308 - DNA, 31 bp, Homo sapiens; identical to SEQ ID NO: 25584
  chr19:12774321-12774352
  hypo

SEQ ID NO: 55309 - DNA, 154 bp, Homo sapiens; identical to SEQ ID NO: 6646
  chr19:12806991-12807145
  hypo

SEQ ID NO: 55310 - DNA, 96 bp, Homo sapiens; identical to SEQ ID NO: 6647
  chr19:12807176-12807272
  hypo

SEQ ID NO: 55311 - DNA, 58 bp, Homo sapiens; identical to SEQ ID NO: 25588
  chr19:12885519-12885577
  hypo

SEQ ID NO: 55312 - DNA, 2 bp, Homo sapiens
  chr19:12985183-12985185
  hypo
ag

SEQ ID NO: 55313 - DNA, 31 bp, Homo sapiens; identical to SEQ ID NO: 25590
  chr19:12985283-12985314
  hypo

SEQ ID NO: 55314 - DNA, 74 bp, Homo sapiens; identical to SEQ ID NO: 25591
  chr19:12986929-12987003
  hypo

SEQ ID NO: 55315 - DNA, 46 bp, Homo sapiens; identical to SEQ ID NO: 25592
  chr19:13007715-13007761
  hypo

SEQ ID NO: 55316 - DNA, 31 bp, Homo sapiens; identical to SEQ ID NO: 25593
  chr19:13010498-13010529
  hypo

SEQ ID NO: 55317 - DNA, 31 bp, Homo sapiens; identical to SEQ ID NO: 25595
  chr19:13071905-13071936
  hypo

SEQ ID NO: 55318 - DNA, 31 bp, Homo sapiens; identical to SEQ ID NO: 25597
  chr19:13089222-13089253
  hypo

SEQ ID NO: 55319 - DNA, 94 bp, Homo sapiens; identical to SEQ ID NO: 6653
  chr19:13094455-13094549
  hypo

SEQ ID NO: 55320 - DNA, 31 bp, Homo sapiens; identical to SEQ ID NO: 6654
  chr19:13094556-13094587
  hypo

SEQ ID NO: 55321 - DNA, 135 bp, Homo sapiens; identical to SEQ ID NO: 6655
  chr19:13106027-13106162
  hypo

SEQ ID NO: 55322 - DNA, 128 bp, Homo sapiens; identical to SEQ ID NO: 6656
  chr19:13106342-13106470
  hypo

SEQ ID NO: 55323 - DNA, 125 bp, Homo sapiens; identical to SEQ ID NO: 6657
  chr19:13106528-13106653
  hypo

SEQ ID NO: 55324 - DNA, 97 bp, Homo sapiens; identical to SEQ ID NO: 6658
  chr19:13106773-13106870
  hypo

SEQ ID NO: 55325 - DNA, 31 bp, Homo sapiens; identical to SEQ ID NO: 6659
  chr19:13107273-13107304
  hypo

SEQ ID NO: 55326 - DNA, 31 bp, Homo sapiens; identical to SEQ ID NO: 25606
  chr19:13116014-13116045
  hypo

SEQ ID NO: 55327 - DNA, 31 bp, Homo sapiens; identical to SEQ ID NO: 25607
  chr19:13156411-13156442
  hypo

SEQ ID NO: 55328 - DNA, 31 bp, Homo sapiens; identical to SEQ ID NO: 25608
  chr19:13156498-13156529
  hypo

SEQ ID NO: 55329 - DNA, 31 bp, Homo sapiens; identical to SEQ ID NO: 25609
  chr19:13156639-13156670
  hypo

SEQ ID NO: 55330 - DNA, 44 bp, Homo sapiens; identical to SEQ ID NO: 25610
  chr19:13160323-13160367
  hypo

SEQ ID NO: 55331 - DNA, 31 bp, Homo sapiens; identical to SEQ ID NO: 25611
  chr19:13177632-13177663
  hypo

SEQ ID NO: 55332 - DNA, 31 bp, Homo sapiens; identical to SEQ ID NO: 25612
  chr19:13177665-13177696
  hypo

SEQ ID NO: 55333 - DNA, 80 bp, Homo sapiens; identical to SEQ ID NO: 25613
  chr19:13177731-13177811
  hypo

SEQ ID NO: 55334 - DNA, 40 bp, Homo sapiens; identical to SEQ ID NO: 25614
  chr19:13179792-13179832
  hypo

SEQ ID NO: 55335 - DNA, 62 bp, Homo sapiens; identical to SEQ ID NO: 25615
  chr19:13186059-13186121
  hypo

SEQ ID NO: 55336 - DNA, 31 bp, Homo sapiens; identical to SEQ ID NO: 25616
  chr19:13186183-13186214
  hypo

SEQ ID NO: 55337 - DNA, 31 bp, Homo sapiens; identical to SEQ ID NO: 25617
  chr19:13186478-13186509
  hypo

SEQ ID NO: 55338 - DNA, 31 bp, Homo sapiens; identical to SEQ ID NO: 25618
  chr19:13197661-13197692
  hypo

SEQ ID NO: 55339 - DNA, 31 bp, Homo sapiens; identical to SEQ ID NO: 25619
  chr19:13197713-13197744
  hypo

SEQ ID NO: 55340 - DNA, 31 bp, Homo sapiens; identical to SEQ ID NO: 25620
  chr19:13197773-13197804
  hypo

SEQ ID NO: 55341 - DNA, 31 bp, Homo sapiens; identical to SEQ ID NO: 25621
  chr19:13197842-13197873
  hypo

SEQ ID NO: 55342 - DNA, 54 bp, Homo sapiens; identical to SEQ ID NO: 25622
  chr19:13199712-13199766
  hypo

SEQ ID NO: 55343 - DNA, 82 bp, Homo sapiens; identical to SEQ ID NO: 6665
  chr19:13263792-13263874
  hypo

SEQ ID NO: 55344 - DNA, 69 bp, Homo sapiens; identical to SEQ ID NO: 6666
  chr19:13264168-13264237
  hypo

SEQ ID NO: 55345 - DNA, 31 bp, Homo sapiens; identical to SEQ ID NO: 6667
  chr19:13264554-13264585
  hypo

SEQ ID NO: 55346 - DNA, 136 bp, Homo sapiens; identical to SEQ ID NO: 6668
  chr19:13266907-13267043
  hypo

SEQ ID NO: 55347 - DNA, 63 bp, Homo sapiens; identical to SEQ ID NO: 6669
  chr19:13274018-13274081
  hypo

SEQ ID NO: 55348 - DNA, 56 bp, Homo sapiens; identical to SEQ ID NO: 25630
  chr19:13332534-13332590
  hypo

SEQ ID NO: 55349 - DNA, 31 bp, Homo sapiens; identical to SEQ ID NO: 25631
  chr19:13346306-13346337
  hypo

SEQ ID NO: 55350 - DNA, 31 bp, Homo sapiens; identical to SEQ ID NO: 25632
  chr19:13346400-13346431
  hypo

SEQ ID NO: 55351 - DNA, 67 bp, Homo sapiens; identical to SEQ ID NO: 25633
  chr19:13346445-13346512
  hypo

SEQ ID NO: 55352 - DNA, 31 bp, Homo sapiens; identical to SEQ ID NO: 25634
  chr19:13838455-13838486
  hypo

SEQ ID NO: 55353 - DNA, 74 bp, Homo sapiens; identical to SEQ ID NO: 6671
  chr19:13961396-13961470
  hypo

SEQ ID NO: 55354 - DNA, 31 bp, Homo sapiens; identical to SEQ ID NO: 25637
  chr19:13994001-13994032
  hypo

SEQ ID NO: 55355 - DNA, 31 bp, Homo sapiens; identical to SEQ ID NO: 25638
  chr19:13997267-13997298
  hypo

SEQ ID NO: 55356 - DNA, 31 bp, Homo sapiens; identical to SEQ ID NO: 25639
  chr19:14000114-14000145
  hypo

SEQ ID NO: 55357 - DNA, 31 bp, Homo sapiens; identical to SEQ ID NO: 25640
  chr19:14000163-14000194
  hypo

SEQ ID NO: 55358 - DNA, 31 bp, Homo sapiens; identical to SEQ ID NO: 25641
  chr19:14000376-14000407
  hypo

SEQ ID NO: 55359 - DNA, 31 bp, Homo sapiens; identical to SEQ ID NO: 25642
  chr19:14000961-14000992
  hypo

SEQ ID NO: 55360 - DNA, 31 bp, Homo sapiens; identical to SEQ ID NO: 25643
  chr19:14001000-14001031
  hypo

SEQ ID NO: 55361 - DNA, 41 bp, Homo sapiens; identical to SEQ ID NO: 25644
  chr19:14001045-14001086
  hypo

SEQ ID NO: 55362 - DNA, 38 bp, Homo sapiens; identical to SEQ ID NO: 25645
  chr19:14001099-14001137
  hypo

SEQ ID NO: 55363 - DNA, 31 bp, Homo sapiens; identical to SEQ ID NO: 25646
  chr19:14001140-14001171
  hypo

SEQ ID NO: 55364 - DNA, 31 bp, Homo sapiens; identical to SEQ ID NO: 25647
  chr19:14029921-14029952
  hypo

SEQ ID NO: 55365 - DNA, 31 bp, Homo sapiens; identical to SEQ ID NO: 25648
  chr19:14030022-14030053
  hypo

SEQ ID NO: 55366 - DNA, 89 bp, Homo sapiens; identical to SEQ ID NO: 25649
  chr19:14066987-14067076
  hypo

SEQ ID NO: 55367 - DNA, 31 bp, Homo sapiens; identical to SEQ ID NO: 6674
  chr19:14074199-14074230
  hypo

SEQ ID NO: 55368 - DNA, 31 bp, Homo sapiens; identical to SEQ ID NO: 25651
  chr19:14107952-14107983
  hypo

SEQ ID NO: 55369 - DNA, 2 bp, Homo sapiens
  chr19:14181304-14181306
  hypo
tg

SEQ ID NO: 55370 - DNA, 31 bp, Homo sapiens; identical to SEQ ID NO: 6675
  chr19:14205671-14205702
  hypo

SEQ ID NO: 55371 - DNA, 2 bp, Homo sapiens
  chr19:14209035-14209037
  hypo
at

SEQ ID NO: 55372 - DNA, 18 bp, Homo sapiens
  chr19:14209115-14209133
  hypo
tgacgtgtcaagagaggg

SEQ ID NO: 55373 - DNA, 31 bp, Homo sapiens; identical to SEQ ID NO: 25657
  chr19:14262993-14263024
  hypo

SEQ ID NO: 55374 - DNA, 49 bp, Homo sapiens; identical to SEQ ID NO: 6676
  chr19:14316560-14316609
  hypo

SEQ ID NO: 55375 - DNA, 31 bp, Homo sapiens; identical to SEQ ID NO: 25659
  chr19:14352488-14352519
  hypo

SEQ ID NO: 55376 - DNA, 31 bp, Homo sapiens; identical to SEQ ID NO: 25660
  chr19:14552118-14552149
  hypo

SEQ ID NO: 55377 - DNA, 58 bp, Homo sapiens; identical to SEQ ID NO: 6677
  chr19:14607123-14607181
  hypo

SEQ ID NO: 55378 - DNA, 31 bp, Homo sapiens; identical to SEQ ID NO: 25662
  chr19:14617205-14617236
  hypo

SEQ ID NO: 55379 - DNA, 31 bp, Homo sapiens; identical to SEQ ID NO: 25663
  chr19:14630489-14630520
  hypo

SEQ ID NO: 55380 - DNA, 31 bp, Homo sapiens; identical to SEQ ID NO: 25664
  chr19:14815853-14815884
  hypo

SEQ ID NO: 55381 - DNA, 80 bp, Homo sapiens; identical to SEQ ID NO: 25665
  chr19:14815915-14815995
  hypo

SEQ ID NO: 55382 - DNA, 31 bp, Homo sapiens; identical to SEQ ID NO: 25666
  chr19:15221469-15221500
  hypo

SEQ ID NO: 55383 - DNA, 31 bp, Homo sapiens; identical to SEQ ID NO: 25667
  chr19:15281704-15281735
  hypo

SEQ ID NO: 55384 - DNA, 31 bp, Homo sapiens; identical to SEQ ID NO: 25668
  chr19:15285091-15285122
  hypo

SEQ ID NO: 55385 - DNA, 31 bp, Homo sapiens; identical to SEQ ID NO: 25671
  chr19:15337909-15337940
  hypo

SEQ ID NO: 55386 - DNA, 31 bp, Homo sapiens; identical to SEQ ID NO: 25672
  chr19:15364849-15364880
  hypo

SEQ ID NO: 55387 - DNA, 40 bp, Homo sapiens; identical to SEQ ID NO: 25673
  chr19:15364952-15364992
  hypo

SEQ ID NO: 55388 - DNA, 61 bp, Homo sapiens; identical to SEQ ID NO: 25674
  chr19:16025605-16025666
  hypo

SEQ ID NO: 55389 - DNA, 31 bp, Homo sapiens; identical to SEQ ID NO: 25675
  chr19:16025684-16025715
  hypo

SEQ ID NO: 55390 - DNA, 31 bp, Homo sapiens; identical to SEQ ID NO: 25676
  chr19:16025762-16025793
  hypo

SEQ ID NO: 55391 - DNA, 54 bp, Homo sapiens; identical to SEQ ID NO: 25677
  chr19:16147949-16148003
  hypo

SEQ ID NO: 55392 - DNA, 52 bp, Homo sapiens; identical to SEQ ID NO: 40041
  chr19:16187000-16187052
  hypo

SEQ ID NO: 55393 - DNA, 31 bp, Homo sapiens; identical to SEQ ID NO: 6686
  chr19:16187105-16187136
  hypo

SEQ ID NO: 55394 - DNA, 31 bp, Homo sapiens; identical to SEQ ID NO: 6687
  chr19:16187138-16187169
  hypo

SEQ ID NO: 55395 - DNA, 343 bp, Homo sapiens; identical to SEQ ID NO: 6688
  chr19:16187276-16187619
  hypo

SEQ ID NO: 55396 - DNA, 240 bp, Homo sapiens; identical to SEQ ID NO: 6690
  chr19:16187798-16188038
  hypo

SEQ ID NO: 55397 - DNA, 37 bp, Homo sapiens; identical to SEQ ID NO: 6692
  chr19:16222616-16222653
  hypo

SEQ ID NO: 55398 - DNA, 57 bp, Homo sapiens; identical to SEQ ID NO: 25685
  chr19:16226373-16226430
  hypo

SEQ ID NO: 55399 - DNA, 31 bp, Homo sapiens; identical to SEQ ID NO: 25686
  chr19:16226502-16226533
  hypo

SEQ ID NO: 55400 - DNA, 31 bp, Homo sapiens; identical to SEQ ID NO: 25687
  chr19:16228440-16228471
  hypo

SEQ ID NO: 55401 - DNA, 2 bp, Homo sapiens
  chr19:16232443-16232445
  hypo
ta

SEQ ID NO: 55402 - DNA, 57 bp, Homo sapiens; identical to SEQ ID NO: 25689
  chr19:16232677-16232734
  hypo

SEQ ID NO: 55403 - DNA, 31 bp, Homo sapiens; identical to SEQ ID NO: 25690
  chr19:16232871-16232902
  hypo

SEQ ID NO: 55404 - DNA, 60 bp, Homo sapiens; identical to SEQ ID NO: 25691
  chr19:16243051-16243111
  hypo

SEQ ID NO: 55405 - DNA, 88 bp, Homo sapiens; identical to SEQ ID NO: 25692
  chr19:16243191-16243279
  hypo

SEQ ID NO: 55406 - DNA, 31 bp, Homo sapiens; identical to SEQ ID NO: 25693
  chr19:16337581-16337612
  hypo

SEQ ID NO: 55407 - DNA, 31 bp, Homo sapiens; identical to SEQ ID NO: 25694
  chr19:16338020-16338051
  hypo

SEQ ID NO: 55408 - DNA, 57 bp, Homo sapiens; identical to SEQ ID NO: 25695
  chr19:16472530-16472587
  hypo

SEQ ID NO: 55409 - DNA, 126 bp, Homo sapiens; identical to SEQ ID NO: 25696
  chr19:16485581-16485707
  hypo

SEQ ID NO: 55410 - DNA, 31 bp, Homo sapiens; identical to SEQ ID NO: 25697
  chr19:16495005-16495036
  hypo

SEQ ID NO: 55411 - DNA, 31 bp, Homo sapiens; identical to SEQ ID NO: 25699
  chr19:16550471-16550502
  hypo

SEQ ID NO: 55412 - DNA, 31 bp, Homo sapiens; identical to SEQ ID NO: 25700
  chr19:16590107-16590138
  hypo

SEQ ID NO: 55413 - DNA, 62 bp, Homo sapiens; identical to SEQ ID NO: 25701
  chr19:16638586-16638648
  hypo

SEQ ID NO: 55414 - DNA, 2 bp, Homo sapiens
  chr19:16638667-16638669
  hypo
cc

SEQ ID NO: 55415 - DNA, 31 bp, Homo sapiens; identical to SEQ ID NO: 25704
  chr19:16715769-16715800
  hypo

SEQ ID NO: 55416 - DNA, 31 bp, Homo sapiens; identical to SEQ ID NO: 25705
  chr19:16835421-16835452
  hypo

SEQ ID NO: 55417 - DNA, 31 bp, Homo sapiens; identical to SEQ ID NO: 25707
  chr19:17160622-17160653
  hypo

SEQ ID NO: 55418 - DNA, 31 bp, Homo sapiens; identical to SEQ ID NO: 25708
  chr19:17335975-17336006
  hypo

SEQ ID NO: 55419 - DNA, 30 bp, Homo sapiens; identical to SEQ ID NO: 25709
  chr19:17336185-17336215
  hypo

SEQ ID NO: 55420 - DNA, 99 bp, Homo sapiens; identical to SEQ ID NO: 6693
  chr19:17355756-17355855
  hypo

SEQ ID NO: 55421 - DNA, 57 bp, Homo sapiens; identical to SEQ ID NO: 25711
  chr19:17369110-17369167
  hypo

SEQ ID NO: 55422 - DNA, 48 bp, Homo sapiens; identical to SEQ ID NO: 25715
  chr19:17423020-17423068
  hypo

SEQ ID NO: 55423 - DNA, 34 bp, Homo sapiens; identical to SEQ ID NO: 25716
  chr19:17423126-17423160
  hypo

SEQ ID NO: 55424 - DNA, 39 bp, Homo sapiens; identical to SEQ ID NO: 25717
  chr19:17423161-17423200
  hypo

SEQ ID NO: 55425 - DNA, 31 bp, Homo sapiens; identical to SEQ ID NO: 25718
  chr19:17447345-17447376
  hypo

SEQ ID NO: 55426 - DNA, 27 bp, Homo sapiens
  chr19:17449458-17449485
  hypo
cggaaacagaggcgcagcggcggcagg

SEQ ID NO: 55427 - DNA, 31 bp, Homo sapiens; identical to SEQ ID NO: 25720
  chr19:17648069-17648100
  hypo

SEQ ID NO: 55428 - DNA, 2 bp, Homo sapiens
  chr19:17759136-17759138
  hypo
at

SEQ ID NO: 55429 - DNA, 31 bp, Homo sapiens; identical to SEQ ID NO: 25725
  chr19:17986849-17986880
  hypo

SEQ ID NO: 55430 - DNA, 2 bp, Homo sapiens
  chr19:17994698-17994700
  hypo
tg

SEQ ID NO: 55431 - DNA, 31 bp, Homo sapiens; identical to SEQ ID NO: 6704
  chr19:18119199-18119230
  hypo

SEQ ID NO: 55432 - DNA, 31 bp, Homo sapiens; identical to SEQ ID NO: 25731
  chr19:18123644-18123675
  hypo

SEQ ID NO: 55433 - DNA, 67 bp, Homo sapiens; identical to SEQ ID NO: 25732
  chr19:18123740-18123807
  hypo

SEQ ID NO: 55434 - DNA, 31 bp, Homo sapiens; identical to SEQ ID NO: 25733
  chr19:18123850-18123881
  hypo

SEQ ID NO: 55435 - DNA, 71 bp, Homo sapiens; identical to SEQ ID NO: 25734
  chr19:18123890-18123961
  hypo

SEQ ID NO: 55436 - DNA, 2 bp, Homo sapiens
  chr19:18207918-18207920
  hypo
gg

SEQ ID NO: 55437 - DNA, 38 bp, Homo sapiens; identical to SEQ ID NO: 25737
  chr19:18241248-18241286
  hypo

SEQ ID NO: 55438 - DNA, 15 bp, Homo sapiens
  chr19:18241290-18241305
  hypo
cctctgtccccaggg

SEQ ID NO: 55439 - DNA, 22 bp, Homo sapiens
  chr19:18271975-18271997
  hypo
ggcgcgccgggccctgcggggt

SEQ ID NO: 55440 - DNA, 65 bp, Homo sapiens; identical to SEQ ID NO: 25740
  chr19:18273253-18273318
  hypo

SEQ ID NO: 55441 - DNA, 31 bp, Homo sapiens; identical to SEQ ID NO: 25741
  chr19:18277901-18277932
  hypo

SEQ ID NO: 55442 - DNA, 31 bp, Homo sapiens; identical to SEQ ID NO: 25743
  chr19:18435084-18435115
  hypo

SEQ ID NO: 55443 - DNA, 50 bp, Homo sapiens; identical to SEQ ID NO: 25744
  chr19:18556528-18556578
  hypo

SEQ ID NO: 55444 - DNA, 47 bp, Homo sapiens; identical to SEQ ID NO: 25745
  chr19:18591738-18591785
  hypo

SEQ ID NO: 55445 - DNA, 38 bp, Homo sapiens; identical to SEQ ID NO: 25746
  chr19:18591843-18591881
  hypo

SEQ ID NO: 55446 - DNA, 31 bp, Homo sapiens; identical to SEQ ID NO: 25747
  chr19:18835064-18835095
  hypo

SEQ ID NO: 55447 - DNA, 60 bp, Homo sapiens; identical to SEQ ID NO: 25748
  chr19:18836820-18836880
  hypo

SEQ ID NO: 55448 - DNA, 65 bp, Homo sapiens
  chr19:18871011-18871076
  hypo
acctgggcatcggtggcgccggccagggtaaggcagggacactccgccctcggacagagcactgg

SEQ ID NO: 55449 - DNA, 2 bp, Homo sapiens
  chr19:18895720-18895722
  hypo
ag

SEQ ID NO: 55450 - DNA, 37 bp, Homo sapiens
  chr19:18957752-18957789
  hypo
agatcgcaccactgcactccagcctgagcgacagtca

SEQ ID NO: 55451 - DNA, 31 bp, Homo sapiens; identical to SEQ ID NO: 25758
  chr19:18997500-18997531
  hypo

SEQ ID NO: 55452 - DNA, 31 bp, Homo sapiens; identical to SEQ ID NO: 25759
  chr19:19004328-19004359
  hypo

SEQ ID NO: 55453 - DNA, 2 bp, Homo sapiens
  chr19:19447943-19447945
  hypo
tt

SEQ ID NO: 55454 - DNA, 31 bp, Homo sapiens; identical to SEQ ID NO: 25763
  chr19:19605784-19605815
  hypo

SEQ ID NO: 55455 - DNA, 66 bp, Homo sapiens; identical to SEQ ID NO: 25764
  chr19:19674353-19674419
  hypo

SEQ ID NO: 55456 - DNA, 31 bp, Homo sapiens; identical to SEQ ID NO: 25765
  chr19:19723143-19723174
  hypo

SEQ ID NO: 55457 - DNA, 51 bp, Homo sapiens; identical to SEQ ID NO: 25766
  chr19:19735077-19735128
  hypo

SEQ ID NO: 55458 - DNA, 55 bp, Homo sapiens; identical to SEQ ID NO: 25767
  chr19:19766966-19767021
  hypo

SEQ ID NO: 55459 - DNA, 31 bp, Homo sapiens; identical to SEQ ID NO: 25768
  chr19:19769451-19769482
  hypo

SEQ ID NO: 55460 - DNA, 70 bp, Homo sapiens; identical to SEQ ID NO: 25773
  chr19:21513594-21513664
  hypo

SEQ ID NO: 55461 - DNA, 31 bp, Homo sapiens; identical to SEQ ID NO: 6716
  chr19:21664417-21664448
  hypo

SEQ ID NO: 55462 - DNA, 40 bp, Homo sapiens; identical to SEQ ID NO: 25775
  chr19:22239553-22239593
  hypo

SEQ ID NO: 55463 - DNA, 2 bp, Homo sapiens
  chr19:23083159-23083161
  hypo
at

SEQ ID NO: 55464 - DNA, 31 bp, Homo sapiens; identical to SEQ ID NO: 25777
  chr19:23084330-23084361
  hypo

SEQ ID NO: 55465 - DNA, 31 bp, Homo sapiens; identical to SEQ ID NO: 25778
  chr19:23453187-23453218
  hypo

SEQ ID NO: 55466 - DNA, 31 bp, Homo sapiens; identical to SEQ ID NO: 25779
  chr19:23694934-23694965
  hypo

SEQ ID NO: 55467 - DNA, 37 bp, Homo sapiens; identical to SEQ ID NO: 25780
  chr19:24270270-24270307
  hypo

SEQ ID NO: 55468 - DNA, 31 bp, Homo sapiens; identical to SEQ ID NO: 25781
  chr19:24270316-24270347
  hypo

SEQ ID NO: 55469 - DNA, 52 bp, Homo sapiens; identical to SEQ ID NO: 25782
  chr19:24270365-24270417
  hypo

SEQ ID NO: 55470 - DNA, 31 bp, Homo sapiens; identical to SEQ ID NO: 25783
  chr19:24273700-24273731
  hypo

SEQ ID NO: 55471 - DNA, 31 bp, Homo sapiens; identical to SEQ ID NO: 25784
  chr19:30561932-30561963
  hypo

SEQ ID NO: 55472 - DNA, 31 bp, Homo sapiens; identical to SEQ ID NO: 25785
  chr19:30562031-30562062
  hypo

SEQ ID NO: 55473 - DNA, 31 bp, Homo sapiens; identical to SEQ ID NO: 6717
  chr19:30730220-30730251
  hypo

SEQ ID NO: 55474 - DNA, 2 bp, Homo sapiens
  chr19:32835110-32835112
  hypo
at

SEQ ID NO: 55475 - DNA, 56 bp, Homo sapiens; identical to SEQ ID NO: 25789
  chr19:32850571-32850627
  hypo

SEQ ID NO: 55476 - DNA, 67 bp, Homo sapiens; identical to SEQ ID NO: 25790
  chr19:32850692-32850759
  hypo

SEQ ID NO: 55477 - DNA, 2 bp, Homo sapiens
  chr19:32898334-32898336
  hypo
tt

SEQ ID NO: 55478 - DNA, 31 bp, Homo sapiens; identical to SEQ ID NO: 25795
  chr19:32898498-32898529
  hypo

SEQ ID NO: 55479 - DNA, 31 bp, Homo sapiens; identical to SEQ ID NO: 25796
  chr19:33334782-33334813
  hypo

SEQ ID NO: 55480 - DNA, 31 bp, Homo sapiens; identical to SEQ ID NO: 25797
  chr19:33357609-33357640
  hypo

SEQ ID NO: 55481 - DNA, 82 bp, Homo sapiens; identical to SEQ ID NO: 25798
  chr19:33365574-33365656
  hypo

SEQ ID NO: 55482 - DNA, 36 bp, Homo sapiens; identical to SEQ ID NO: 25799
  chr19:33365689-33365725
  hypo

SEQ ID NO: 55483 - DNA, 31 bp, Homo sapiens; identical to SEQ ID NO: 25800
  chr19:33488746-33488777
  hypo

SEQ ID NO: 55484 - DNA, 31 bp, Homo sapiens; identical to SEQ ID NO: 25801
  chr19:33515046-33515077
  hypo

SEQ ID NO: 55485 - DNA, 69 bp, Homo sapiens; identical to SEQ ID NO: 6719
  chr19:33555490-33555559
  hypo

SEQ ID NO: 55486 - DNA, 35 bp, Homo sapiens; identical to SEQ ID NO: 6720
  chr19:33555747-33555782
  hypo

SEQ ID NO: 55487 - DNA, 86 bp, Homo sapiens; identical to SEQ ID NO: 6721
  chr19:33555883-33555969
  hypo

SEQ ID NO: 55488 - DNA, 31 bp, Homo sapiens; identical to SEQ ID NO: 25805
  chr19:33556996-33557027
  hypo

SEQ ID NO: 55489 - DNA, 41 bp, Homo sapiens; identical to SEQ ID NO: 25806
  chr19:33557038-33557079
  hypo

SEQ ID NO: 55490 - DNA, 13 bp, Homo sapiens
  chr19:33557318-33557331
  hypo
ggagcacggttct

SEQ ID NO: 55491 - DNA, 120 bp, Homo sapiens; identical to SEQ ID NO: 25808
  chr19:33693686-33693806
  hypo

SEQ ID NO: 55492 - DNA, 31 bp, Homo sapiens; identical to SEQ ID NO: 25809
  chr19:33694485-33694516
  hypo

SEQ ID NO: 55493 - DNA, 31 bp, Homo sapiens; identical to SEQ ID NO: 25810
  chr19:33696683-33696714
  hypo

SEQ ID NO: 55494 - DNA, 31 bp, Homo sapiens; identical to SEQ ID NO: 25811
  chr19:33697266-33697297
  hypo

SEQ ID NO: 55495 - DNA, 57 bp, Homo sapiens; identical to SEQ ID NO: 25812
  chr19:33697589-33697646
  hypo

SEQ ID NO: 55496 - DNA, 31 bp, Homo sapiens; identical to SEQ ID NO: 25813
  chr19:33697776-33697807
  hypo

SEQ ID NO: 55497 - DNA, 31 bp, Homo sapiens; identical to SEQ ID NO: 25814
  chr19:33698373-33698404
  hypo

SEQ ID NO: 55498 - DNA, 62 bp, Homo sapiens; identical to SEQ ID NO: 25815
  chr19:33698406-33698468
  hypo

SEQ ID NO: 55499 - DNA, 31 bp, Homo sapiens; identical to SEQ ID NO: 25816
  chr19:33772907-33772938
  hypo

SEQ ID NO: 55500 - DNA, 59 bp, Homo sapiens; identical to SEQ ID NO: 25817
  chr19:33772982-33773041
  hypo

SEQ ID NO: 55501 - DNA, 31 bp, Homo sapiens; identical to SEQ ID NO: 25818
  chr19:33773067-33773098
  hypo

SEQ ID NO: 55502 - DNA, 27 bp, Homo sapiens
  chr19:33792630-33792657
  hypo
cgtgggcggcggcgtggggtgaccggg

SEQ ID NO: 55503 - DNA, 461 bp, Homo sapiens; identical to SEQ ID NO: 6726
  chr19:33792664-33793125
  hypo

SEQ ID NO: 55504 - DNA, 44 bp, Homo sapiens; identical to SEQ ID NO: 6727
  chr19:33793282-33793326
  hypo

SEQ ID NO: 55505 - DNA, 298 bp, Homo sapiens; identical to SEQ ID NO: 6728
  chr19:33793356-33793654
  hypo

SEQ ID NO: 55506 - DNA, 38 bp, Homo sapiens; identical to SEQ ID NO: 6729
  chr19:33793669-33793707
  hypo

SEQ ID NO: 55507 - DNA, 132 bp, Homo sapiens; identical to SEQ ID NO: 6730
  chr19:33793732-33793864
  hypo

SEQ ID NO: 55508 - DNA, 8 bp, Homo sapiens
  chr19:33793869-33793877
  hypo
agaaccag

SEQ ID NO: 55509 - DNA, 31 bp, Homo sapiens; identical to SEQ ID NO: 25826
  chr19:33926620-33926651
  hypo

SEQ ID NO: 55510 - DNA, 58 bp, Homo sapiens; identical to SEQ ID NO: 25827
  chr19:33926665-33926723
  hypo

SEQ ID NO: 55511 - DNA, 31 bp, Homo sapiens; identical to SEQ ID NO: 25828
  chr19:33926768-33926799
  hypo

SEQ ID NO: 55512 - DNA, 37 bp, Homo sapiens; identical to SEQ ID NO: 25829
  chr19:33996088-33996125
  hypo

SEQ ID NO: 55513 - DNA, 2 bp, Homo sapiens
  chr19:33996126-33996128
  hypo
ac

SEQ ID NO: 55514 - DNA, 58 bp, Homo sapiens
  chr19:33996157-33996215
  hypo
tgctctccacagaaggcagcggcatttgctctgcggtggaagccggcagccatctgag

SEQ ID NO: 55515 - DNA, 31 bp, Homo sapiens; identical to SEQ ID NO: 25831
  chr19:33997988-33998019
  hypo

SEQ ID NO: 55516 - DNA, 68 bp, Homo sapiens; identical to SEQ ID NO: 25832
  chr19:33998037-33998105
  hypo

SEQ ID NO: 55517 - DNA, 31 bp, Homo sapiens; identical to SEQ ID NO: 25833
  chr19:34039505-34039536
  hypo

SEQ ID NO: 55518 - DNA, 36 bp, Homo sapiens; identical to SEQ ID NO: 25834
  chr19:35512755-35512791
  hypo

SEQ ID NO: 55519 - DNA, 31 bp, Homo sapiens; identical to SEQ ID NO: 25835
  chr19:35551107-35551138
  hypo

SEQ ID NO: 55520 - DNA, 34 bp, Homo sapiens; identical to SEQ ID NO: 25836
  chr19:35551204-35551238
  hypo

SEQ ID NO: 55521 - DNA, 67 bp, Homo sapiens; identical to SEQ ID NO: 25837
  chr19:35551242-35551309
  hypo

SEQ ID NO: 55522 - DNA, 31 bp, Homo sapiens; identical to SEQ ID NO: 25838
  chr19:35566027-35566058
  hypo

SEQ ID NO: 55523 - DNA, 31 bp, Homo sapiens; identical to SEQ ID NO: 25839
  chr19:35587924-35587955
  hypo

SEQ ID NO: 55524 - DNA, 31 bp, Homo sapiens; identical to SEQ ID NO: 25840
  chr19:35590624-35590655
  hypo

SEQ ID NO: 55525 - DNA, 33 bp, Homo sapiens; identical to SEQ ID NO: 25841
  chr19:35591099-35591132
  hypo

SEQ ID NO: 55526 - DNA, 31 bp, Homo sapiens; identical to SEQ ID NO: 25843
  chr19:35599313-35599344
  hypo

SEQ ID NO: 55527 - DNA, 2 bp, Homo sapiens
  chr19:35608941-35608943
  hypo
ag

SEQ ID NO: 55528 - DNA, 3 bp, Homo sapiens
  chr19:35608972-35608975
  hypo
aac

SEQ ID NO: 55529 - DNA, 2 bp, Homo sapiens
  chr19:35615954-35615956
  hypo
gg

SEQ ID NO: 55530 - DNA, 42 bp, Homo sapiens; identical to SEQ ID NO: 6735
  chr19:35738943-35738985
  hypo

SEQ ID NO: 55531 - DNA, 31 bp, Homo sapiens; identical to SEQ ID NO: 25851
  chr19:35795098-35795129
  hypo

SEQ ID NO: 55532 - DNA, 31 bp, Homo sapiens; identical to SEQ ID NO: 25852
  chr19:35804027-35804058
  hypo

SEQ ID NO: 55533 - DNA, 31 bp, Homo sapiens; identical to SEQ ID NO: 25853
  chr19:35889405-35889436
  hypo

SEQ ID NO: 55534 - DNA, 40 bp, Homo sapiens; identical to SEQ ID NO: 6736
  chr19:36123861-36123901
  hypo

SEQ ID NO: 55535 - DNA, 31 bp, Homo sapiens; identical to SEQ ID NO: 6737
  chr19:36123966-36123997
  hypo

SEQ ID NO: 55536 - DNA, 31 bp, Homo sapiens; identical to SEQ ID NO: 25857
  chr19:36156234-36156265
  hypo

SEQ ID NO: 55537 - DNA, 31 bp, Homo sapiens; identical to SEQ ID NO: 25858
  chr19:36156397-36156428
  hypo

SEQ ID NO: 55538 - DNA, 2 bp, Homo sapiens
  chr19:36220087-36220089
  hypo
ag

SEQ ID NO: 55539 - DNA, 12 bp, Homo sapiens
  chr19:36220151-36220163
  hypo
ctccctcaagaa

SEQ ID NO: 55540 - DNA, 31 bp, Homo sapiens; identical to SEQ ID NO: 25860
  chr19:36220166-36220197
  hypo

SEQ ID NO: 55541 - DNA, 2 bp, Homo sapiens
  chr19:36222350-36222352
  hypo
ga

SEQ ID NO: 55542 - DNA, 29 bp, Homo sapiens
  chr19:36222534-36222563
  hypo
gcagttccccatggcgtgcaaagcctgca

SEQ ID NO: 55543 - DNA, 31 bp, Homo sapiens; identical to SEQ ID NO: 25869
  chr19:36222575-36222606
  hypo

SEQ ID NO: 55544 - DNA, 41 bp, Homo sapiens; identical to SEQ ID NO: 25870
  chr19:36275618-36275659
  hypo

SEQ ID NO: 55545 - DNA, 31 bp, Homo sapiens; identical to SEQ ID NO: 25871
  chr19:36362341-36362372
  hypo

SEQ ID NO: 55546 - DNA, 31 bp, Homo sapiens; identical to SEQ ID NO: 25872
  chr19:36388610-36388641
  hypo

SEQ ID NO: 55547 - DNA, 31 bp, Homo sapiens; identical to SEQ ID NO: 25873
  chr19:36388659-36388690
  hypo

SEQ ID NO: 55548 - DNA, 31 bp, Homo sapiens; identical to SEQ ID NO: 25874
  chr19:36525680-36525711
  hypo

SEQ ID NO: 55549 - DNA, 31 bp, Homo sapiens; identical to SEQ ID NO: 6740
  chr19:36544541-36544572
  hypo

SEQ ID NO: 55550 - DNA, 52 bp, Homo sapiens; identical to SEQ ID NO: 25876
  chr19:36592821-36592873
  hypo

SEQ ID NO: 55551 - DNA, 31 bp, Homo sapiens; identical to SEQ ID NO: 25877
  chr19:36592903-36592934
  hypo

SEQ ID NO: 55552 - DNA, 31 bp, Homo sapiens; identical to SEQ ID NO: 25880
  chr19:36853753-36853784
  hypo

SEQ ID NO: 55553 - DNA, 35 bp, Homo sapiens; identical to SEQ ID NO: 25881
  chr19:36853814-36853849
  hypo

SEQ ID NO: 55554 - DNA, 54 bp, Homo sapiens; identical to SEQ ID NO: 25882
  chr19:36853886-36853940
  hypo

SEQ ID NO: 55555 - DNA, 31 bp, Homo sapiens; identical to SEQ ID NO: 25883
  chr19:36858741-36858772
  hypo

SEQ ID NO: 55556 - DNA, 31 bp, Homo sapiens; identical to SEQ ID NO: 25888
  chr19:36957676-36957707
  hypo

SEQ ID NO: 55557 - DNA, 31 bp, Homo sapiens; identical to SEQ ID NO: 25889
  chr19:36970716-36970747
  hypo

SEQ ID NO: 55558 - DNA, 31 bp, Homo sapiens; identical to SEQ ID NO: 25891
  chr19:37128452-37128483
  hypo

SEQ ID NO: 55559 - DNA, 31 bp, Homo sapiens; identical to SEQ ID NO: 25892
  chr19:37173450-37173481
  hypo

SEQ ID NO: 55560 - DNA, 31 bp, Homo sapiens; identical to SEQ ID NO: 25893
  chr19:37699579-37699610
  hypo

SEQ ID NO: 55561 - DNA, 31 bp, Homo sapiens; identical to SEQ ID NO: 25894
  chr19:37725643-37725674
  hypo

SEQ ID NO: 55562 - DNA, 31 bp, Homo sapiens; identical to SEQ ID NO: 25898
  chr19:37831823-37831854
  hypo

SEQ ID NO: 55563 - DNA, 41 bp, Homo sapiens; identical to SEQ ID NO: 25899
  chr19:37853602-37853643
  hypo

SEQ ID NO: 55564 - DNA, 70 bp, Homo sapiens; identical to SEQ ID NO: 25900
  chr19:37853686-37853756
  hypo

SEQ ID NO: 55565 - DNA, 31 bp, Homo sapiens; identical to SEQ ID NO: 25901
  chr19:37854102-37854133
  hypo

SEQ ID NO: 55566 - DNA, 39 bp, Homo sapiens; identical to SEQ ID NO: 25902
  chr19:38069704-38069743
  hypo

SEQ ID NO: 55567 - DNA, 31 bp, Homo sapiens; identical to SEQ ID NO: 25903
  chr19:38069815-38069846
  hypo

SEQ ID NO: 55568 - DNA, 31 bp, Homo sapiens; identical to SEQ ID NO: 25907
  chr19:38273725-38273756
  hypo

SEQ ID NO: 55569 - DNA, 58 bp, Homo sapiens; identical to SEQ ID NO: 25908
  chr19:38383047-38383105
  hypo

SEQ ID NO: 55570 - DNA, 58 bp, Homo sapiens; identical to SEQ ID NO: 6744
  chr19:38398220-38398278
  hypo

SEQ ID NO: 55571 - DNA, 31 bp, Homo sapiens; identical to SEQ ID NO: 6745
  chr19:38417473-38417504
  hypo

SEQ ID NO: 55572 - DNA, 55 bp, Homo sapiens; identical to SEQ ID NO: 25911
  chr19:38500468-38500523
  hypo

SEQ ID NO: 55573 - DNA, 73 bp, Homo sapiens; identical to SEQ ID NO: 25912
  chr19:38564441-38564514
  hypo

SEQ ID NO: 55574 - DNA, 31 bp, Homo sapiens; identical to SEQ ID NO: 25913
  chr19:38564624-38564655
  hypo

SEQ ID NO: 55575 - DNA, 31 bp, Homo sapiens; identical to SEQ ID NO: 25914
  chr19:38613383-38613414
  hypo

SEQ ID NO: 55576 - DNA, 31 bp, Homo sapiens; identical to SEQ ID NO: 25915
  chr19:38621444-38621475
  hypo

SEQ ID NO: 55577 - DNA, 31 bp, Homo sapiens; identical to SEQ ID NO: 25916
  chr19:38764529-38764560
  hypo

SEQ ID NO: 55578 - DNA, 31 bp, Homo sapiens; identical to SEQ ID NO: 25917
  chr19:38779795-38779826
  hypo

SEQ ID NO: 55579 - DNA, 46 bp, Homo sapiens; identical to SEQ ID NO: 25918
  chr19:38817273-38817319
  hypo

SEQ ID NO: 55580 - DNA, 42 bp, Homo sapiens; identical to SEQ ID NO: 40088
  chr19:38853193-38853235
  hypo

SEQ ID NO: 55581 - DNA, 31 bp, Homo sapiens; identical to SEQ ID NO: 25923
  chr19:38858044-38858075
  hypo

SEQ ID NO: 55582 - DNA, 2 bp, Homo sapiens
  chr19:38873934-38873936
  hypo
ag

SEQ ID NO: 55583 - DNA, 31 bp, Homo sapiens; identical to SEQ ID NO: 25925
  chr19:39087809-39087840
  hypo

SEQ ID NO: 55584 - DNA, 126 bp, Homo sapiens; identical to SEQ ID NO: 25926
  chr19:39092088-39092214
  hypo

SEQ ID NO: 55585 - DNA, 46 bp, Homo sapiens; identical to SEQ ID NO: 25927
  chr19:39151299-39151345
  hypo

SEQ ID NO: 55586 - DNA, 2 bp, Homo sapiens
  chr19:39151505-39151507
  hypo
at

SEQ ID NO: 55587 - DNA, 2 bp, Homo sapiens
  chr19:39151782-39151784
  hypo
gt

SEQ ID NO: 55588 - DNA, 31 bp, Homo sapiens; identical to SEQ ID NO: 25930
  chr19:39211843-39211874
  hypo

SEQ ID NO: 55589 - DNA, 31 bp, Homo sapiens; identical to SEQ ID NO: 25931
  chr19:39221973-39222004
  hypo

SEQ ID NO: 55590 - DNA, 46 bp, Homo sapiens
  chr19:39222034-39222080
  hypo
ttcctcatccatcaaacggactaagacagccccgaccccatagggt

SEQ ID NO: 55591 - DNA, 33 bp, Homo sapiens; identical to SEQ ID NO: 25933
  chr19:39238368-39238401
  hypo

SEQ ID NO: 55592 - DNA, 60 bp, Homo sapiens; identical to SEQ ID NO: 25936
  chr19:39327504-39327564
  hypo

SEQ ID NO: 55593 - DNA, 34 bp, Homo sapiens; identical to SEQ ID NO: 25937
  chr19:39327570-39327604
  hypo

SEQ ID NO: 55594 - DNA, 31 bp, Homo sapiens; identical to SEQ ID NO: 25938
  chr19:39327626-39327657
  hypo

SEQ ID NO: 55595 - DNA, 31 bp, Homo sapiens; identical to SEQ ID NO: 25939
  chr19:39329500-39329531
  hypo

SEQ ID NO: 55596 - DNA, 2 bp, Homo sapiens
  chr19:39329571-39329573
  hypo
ga

SEQ ID NO: 55597 - DNA, 7 bp, Homo sapiens
  chr19:39329639-39329646
  hypo
ttttcat

SEQ ID NO: 55598 - DNA, 34 bp, Homo sapiens; identical to SEQ ID NO: 25941
  chr19:39330891-39330925
  hypo

SEQ ID NO: 55599 - DNA, 31 bp, Homo sapiens; identical to SEQ ID NO: 6754
  chr19:39379455-39379486
  hypo

SEQ ID NO: 55600 - DNA, 31 bp, Homo sapiens; identical to SEQ ID NO: 25943
  chr19:39415992-39416023
  hypo

SEQ ID NO: 55601 - DNA, 54 bp, Homo sapiens; identical to SEQ ID NO: 25944
  chr19:39416071-39416125
  hypo

SEQ ID NO: 55602 - DNA, 31 bp, Homo sapiens; identical to SEQ ID NO: 25945
  chr19:39416138-39416169
  hypo

SEQ ID NO: 55603 - DNA, 49 bp, Homo sapiens; identical to SEQ ID NO: 25946
  chr19:39644615-39644664
  hypo

SEQ ID NO: 55604 - DNA, 31 bp, Homo sapiens; identical to SEQ ID NO: 25947
  chr19:39645706-39645737
  hypo

SEQ ID NO: 55605 - DNA, 2 bp, Homo sapiens
  chr19:39645861-39645863
  hypo
ct

SEQ ID NO: 55606 - DNA, 51 bp, Homo sapiens; identical to SEQ ID NO: 25949
  chr19:39670669-39670720
  hypo

SEQ ID NO: 55607 - DNA, 31 bp, Homo sapiens; identical to SEQ ID NO: 25950
  chr19:39670724-39670755
  hypo

SEQ ID NO: 55608 - DNA, 54 bp, Homo sapiens; identical to SEQ ID NO: 25951
  chr19:39964613-39964667
  hypo

SEQ ID NO: 55609 - DNA, 31 bp, Homo sapiens; identical to SEQ ID NO: 25952
  chr19:39992862-39992893
  hypo

SEQ ID NO: 55610 - DNA, 36 bp, Homo sapiens; identical to SEQ ID NO: 25953
  chr19:40020472-40020508
  hypo

SEQ ID NO: 55611 - DNA, 42 bp, Homo sapiens; identical to SEQ ID NO: 25954
  chr19:40386022-40386064
  hypo

SEQ ID NO: 55612 - DNA, 31 bp, Homo sapiens; identical to SEQ ID NO: 25956
  chr19:40710378-40710409
  hypo

SEQ ID NO: 55613 - DNA, 31 bp, Homo sapiens; identical to SEQ ID NO: 25957
  chr19:40829748-40829779
  hypo

SEQ ID NO: 55614 - DNA, 2 bp, Homo sapiens
  chr19:40829792-40829794
  hypo
gg

SEQ ID NO: 55615 - DNA, 31 bp, Homo sapiens; identical to SEQ ID NO: 25960
  chr19:40834858-40834889
  hypo

SEQ ID NO: 55616 - DNA, 44 bp, Homo sapiens; identical to SEQ ID NO: 25961
  chr19:40900556-40900600
  hypo

SEQ ID NO: 55617 - DNA, 44 bp, Homo sapiens; identical to SEQ ID NO: 6757
  chr19:40939938-40939982
  hypo

SEQ ID NO: 55618 - DNA, 2 bp, Homo sapiens
  chr19:40951613-40951615
  hypo
aa

SEQ ID NO: 55619 - DNA, 31 bp, Homo sapiens; identical to SEQ ID NO: 25967
  chr19:41174214-41174245
  hypo

SEQ ID NO: 55620 - DNA, 31 bp, Homo sapiens; identical to SEQ ID NO: 25968
  chr19:41201589-41201620
  hypo

SEQ ID NO: 55621 - DNA, 31 bp, Homo sapiens; identical to SEQ ID NO: 25970
  chr19:41328143-41328174
  hypo

SEQ ID NO: 55622 - DNA, 31 bp, Homo sapiens; identical to SEQ ID NO: 25975
  chr19:41946358-41946389
  hypo

SEQ ID NO: 55623 - DNA, 36 bp, Homo sapiens; identical to SEQ ID NO: 25979
  chr19:42400291-42400327
  hypo

SEQ ID NO: 55624 - DNA, 61 bp, Homo sapiens; identical to SEQ ID NO: 25980
  chr19:42400355-42400416
  hypo

SEQ ID NO: 55625 - DNA, 2 bp, Homo sapiens
  chr19:42408202-42408204
  hypo
ag

SEQ ID NO: 55626 - DNA, 31 bp, Homo sapiens; identical to SEQ ID NO: 25987
  chr19:42408987-42409018
  hypo

SEQ ID NO: 55627 - DNA, 31 bp, Homo sapiens; identical to SEQ ID NO: 25988
  chr19:42424224-42424255
  hypo

SEQ ID NO: 55628 - DNA, 31 bp, Homo sapiens; identical to SEQ ID NO: 25989
  chr19:42712731-42712762
  hypo

SEQ ID NO: 55629 - DNA, 56 bp, Homo sapiens; identical to SEQ ID NO: 25990
  chr19:42712764-42712820
  hypo

SEQ ID NO: 55630 - DNA, 47 bp, Homo sapiens; identical to SEQ ID NO: 25991
  chr19:42729403-42729450
  hypo

SEQ ID NO: 55631 - DNA, 70 bp, Homo sapiens; identical to SEQ ID NO: 25992
  chr19:42796491-42796561
  hypo

SEQ ID NO: 55632 - DNA, 31 bp, Homo sapiens; identical to SEQ ID NO: 25993
  chr19:42809712-42809743
  hypo

SEQ ID NO: 55633 - DNA, 31 bp, Homo sapiens; identical to SEQ ID NO: 25994
  chr19:42813634-42813665
  hypo

SEQ ID NO: 55634 - DNA, 43 bp, Homo sapiens; identical to SEQ ID NO: 25995
  chr19:42813774-42813817
  hypo

SEQ ID NO: 55635 - DNA, 31 bp, Homo sapiens; identical to SEQ ID NO: 6779
  chr19:43866888-43866919
  hypo

SEQ ID NO: 55636 - DNA, 37 bp, Homo sapiens; identical to SEQ ID NO: 25998
  chr19:43975085-43975122
  hypo

SEQ ID NO: 55637 - DNA, 31 bp, Homo sapiens; identical to SEQ ID NO: 25999
  chr19:44128828-44128859
  hypo

SEQ ID NO: 55638 - DNA, 39 bp, Homo sapiens; identical to SEQ ID NO: 6781
  chr19:44144096-44144135
  hypo

SEQ ID NO: 55639 - DNA, 70 bp, Homo sapiens; identical to SEQ ID NO: 6782
  chr19:44144185-44144255
  hypo

SEQ ID NO: 55640 - DNA, 31 bp, Homo sapiens; identical to SEQ ID NO: 26003
  chr19:44207937-44207968
  hypo

SEQ ID NO: 55641 - DNA, 45 bp, Homo sapiens; identical to SEQ ID NO: 26004
  chr19:44564103-44564148
  hypo

SEQ ID NO: 55642 - DNA, 57 bp, Homo sapiens; identical to SEQ ID NO: 26005
  chr19:44578498-44578555
  hypo

SEQ ID NO: 55643 - DNA, 32 bp, Homo sapiens; identical to SEQ ID NO: 26007
  chr19:44988474-44988506
  hypo

SEQ ID NO: 55644 - DNA, 301 bp, Homo sapiens; identical to SEQ ID NO: 6799
  chr19:45004315-45004616
  hypo

SEQ ID NO: 55645 - DNA, 60 bp, Homo sapiens; identical to SEQ ID NO: 6800
  chr19:45004619-45004679
  hypo

SEQ ID NO: 55646 - DNA, 110 bp, Homo sapiens; identical to SEQ ID NO: 6801
  chr19:45004771-45004881
  hypo

SEQ ID NO: 55647 - DNA, 31 bp, Homo sapiens; identical to SEQ ID NO: 6802
  chr19:45004885-45004916
  hypo

SEQ ID NO: 55648 - DNA, 63 bp, Homo sapiens; identical to SEQ ID NO: 26012
  chr19:45108573-45108636
  hypo

SEQ ID NO: 55649 - DNA, 31 bp, Homo sapiens; identical to SEQ ID NO: 26013
  chr19:45141558-45141589
  hypo

SEQ ID NO: 55650 - DNA, 31 bp, Homo sapiens; identical to SEQ ID NO: 26014
  chr19:45149596-45149627
  hypo

SEQ ID NO: 55651 - DNA, 31 bp, Homo sapiens; identical to SEQ ID NO: 26015
  chr19:45149630-45149661
  hypo

SEQ ID NO: 55652 - DNA, 37 bp, Homo sapiens; identical to SEQ ID NO: 26016
  chr19:45149710-45149747
  hypo

SEQ ID NO: 55653 - DNA, 36 bp, Homo sapiens; identical to SEQ ID NO: 26017
  chr19:45162025-45162061
  hypo

SEQ ID NO: 55654 - DNA, 36 bp, Homo sapiens; identical to SEQ ID NO: 26018
  chr19:45164647-45164683
  hypo

SEQ ID NO: 55655 - DNA, 89 bp, Homo sapiens; identical to SEQ ID NO: 26019
  chr19:45164688-45164777
  hypo

SEQ ID NO: 55656 - DNA, 52 bp, Homo sapiens; identical to SEQ ID NO: 26020
  chr19:45164802-45164854
  hypo

SEQ ID NO: 55657 - DNA, 31 bp, Homo sapiens; identical to SEQ ID NO: 26021
  chr19:45186850-45186881
  hypo

SEQ ID NO: 55658 - DNA, 51 bp, Homo sapiens; identical to SEQ ID NO: 26022
  chr19:45186947-45186998
  hypo

SEQ ID NO: 55659 - DNA, 31 bp, Homo sapiens; identical to SEQ ID NO: 26023
  chr19:45193692-45193723
  hypo

SEQ ID NO: 55660 - DNA, 31 bp, Homo sapiens; identical to SEQ ID NO: 26024
  chr19:45193743-45193774
  hypo

SEQ ID NO: 55661 - DNA, 31 bp, Homo sapiens; identical to SEQ ID NO: 26026
  chr19:45202941-45202972
  hypo

SEQ ID NO: 55662 - DNA, 84 bp, Homo sapiens; identical to SEQ ID NO: 26027
  chr19:45211219-45211303
  hypo

SEQ ID NO: 55663 - DNA, 47 bp, Homo sapiens; identical to SEQ ID NO: 6807
  chr19:45312125-45312172
  hypo

SEQ ID NO: 55664 - DNA, 31 bp, Homo sapiens; identical to SEQ ID NO: 6808
  chr19:45312174-45312205
  hypo

SEQ ID NO: 55665 - DNA, 35 bp, Homo sapiens; identical to SEQ ID NO: 6809
  chr19:45312232-45312267
  hypo

SEQ ID NO: 55666 - DNA, 31 bp, Homo sapiens; identical to SEQ ID NO: 6810
  chr19:45312293-45312324
  hypo

SEQ ID NO: 55667 - DNA, 31 bp, Homo sapiens; identical to SEQ ID NO: 26032
  chr19:45314750-45314781
  hypo

SEQ ID NO: 55668 - DNA, 31 bp, Homo sapiens; identical to SEQ ID NO: 26033
  chr19:45317398-45317429
  hypo

SEQ ID NO: 55669 - DNA, 31 bp, Homo sapiens; identical to SEQ ID NO: 26034
  chr19:45322432-45322463
  hypo

SEQ ID NO: 55670 - DNA, 56 bp, Homo sapiens; identical to SEQ ID NO: 6813
  chr19:45348185-45348241
  hypo

SEQ ID NO: 55671 - DNA, 31 bp, Homo sapiens; identical to SEQ ID NO: 6814
  chr19:45348243-45348274
  hypo

SEQ ID NO: 55672 - DNA, 117 bp, Homo sapiens; identical to SEQ ID NO: 6816
  chr19:45348954-45349071
  hypo

SEQ ID NO: 55673 - DNA, 495 bp, Homo sapiens; identical to SEQ ID NO: 6817
  chr19:45349504-45349999
  hypo

SEQ ID NO: 55674 - DNA, 56 bp, Homo sapiens; identical to SEQ ID NO: 6818
  chr19:45350001-45350057
  hypo

SEQ ID NO: 55675 - DNA, 31 bp, Homo sapiens; identical to SEQ ID NO: 26040
  chr19:45368652-45368683
  hypo

SEQ ID NO: 55676 - DNA, 49 bp, Homo sapiens; identical to SEQ ID NO: 26041
  chr19:45368824-45368873
  hypo

SEQ ID NO: 55677 - DNA, 36 bp, Homo sapiens; identical to SEQ ID NO: 26042
  chr19:45377061-45377097
  hypo

SEQ ID NO: 55678 - DNA, 31 bp, Homo sapiens; identical to SEQ ID NO: 26043
  chr19:45377456-45377487
  hypo

SEQ ID NO: 55679 - DNA, 40 bp, Homo sapiens; identical to SEQ ID NO: 26045
  chr19:45390078-45390118
  hypo

SEQ ID NO: 55680 - DNA, 31 bp, Homo sapiens; identical to SEQ ID NO: 26046
  chr19:45390120-45390151
  hypo

SEQ ID NO: 55681 - DNA, 31 bp, Homo sapiens; identical to SEQ ID NO: 26047
  chr19:45465160-45465191
  hypo

SEQ ID NO: 55682 - DNA, 31 bp, Homo sapiens; identical to SEQ ID NO: 26048
  chr19:45465345-45465376
  hypo

SEQ ID NO: 55683 - DNA, 31 bp, Homo sapiens; identical to SEQ ID NO: 26050
  chr19:45546691-45546722
  hypo

SEQ ID NO: 55684 - DNA, 31 bp, Homo sapiens; identical to SEQ ID NO: 26051
  chr19:45546745-45546776
  hypo

SEQ ID NO: 55685 - DNA, 11 bp, Homo sapiens
  chr19:45574700-45574711
  hypo
ggggaagcctc

SEQ ID NO: 55686 - DNA, 31 bp, Homo sapiens; identical to SEQ ID NO: 26053
  chr19:45603729-45603760
  hypo

SEQ ID NO: 55687 - DNA, 31 bp, Homo sapiens; identical to SEQ ID NO: 26054
  chr19:45603944-45603975
  hypo

SEQ ID NO: 55688 - DNA, 31 bp, Homo sapiens; identical to SEQ ID NO: 26055
  chr19:45603978-45604009
  hypo

SEQ ID NO: 55689 - DNA, 120 bp, Homo sapiens; identical to SEQ ID NO: 26063
  chr19:45737163-45737283
  hypo

SEQ ID NO: 55690 - DNA, 32 bp, Homo sapiens; identical to SEQ ID NO: 26066
  chr19:45813961-45813993
  hypo

SEQ ID NO: 55691 - DNA, 26 bp, Homo sapiens
  chr19:45851443-45851469
  hypo
gggggcaggaacggcagggacccatt

SEQ ID NO: 55692 - DNA, 40 bp, Homo sapiens; identical to SEQ ID NO: 26069
  chr19:45856037-45856077
  hypo

SEQ ID NO: 55693 - DNA, 31 bp, Homo sapiens; identical to SEQ ID NO: 26070
  chr19:45856080-45856111
  hypo

SEQ ID NO: 55694 - DNA, 31 bp, Homo sapiens; identical to SEQ ID NO: 26071
  chr19:45856125-45856156
  hypo

SEQ ID NO: 55695 - DNA, 39 bp, Homo sapiens; identical to SEQ ID NO: 26072
  chr19:45895250-45895289
  hypo

SEQ ID NO: 55696 - DNA, 38 bp, Homo sapiens; identical to SEQ ID NO: 26073
  chr19:45895420-45895458
  hypo

SEQ ID NO: 55697 - DNA, 47 bp, Homo sapiens; identical to SEQ ID NO: 6822
  chr19:45908809-45908856
  hypo

SEQ ID NO: 55698 - DNA, 31 bp, Homo sapiens; identical to SEQ ID NO: 6823
  chr19:45959072-45959103
  hypo

SEQ ID NO: 55699 - DNA, 59 bp, Homo sapiens; identical to SEQ ID NO: 6824
  chr19:45959173-45959232
  hypo

SEQ ID NO: 55700 - DNA, 102 bp, Homo sapiens; identical to SEQ ID NO: 6825
  chr19:45959233-45959335
  hypo

SEQ ID NO: 55701 - DNA, 108 bp, Homo sapiens; identical to SEQ ID NO: 6827
  chr19:46271507-46271615
  hypo

SEQ ID NO: 55702 - DNA, 34 bp, Homo sapiens; identical to SEQ ID NO: 6828
  chr19:46273812-46273846
  hypo

SEQ ID NO: 55703 - DNA, 57 bp, Homo sapiens; identical to SEQ ID NO: 26082
  chr19:46330671-46330728
  hypo

SEQ ID NO: 55704 - DNA, 31 bp, Homo sapiens; identical to SEQ ID NO: 26083
  chr19:46345642-46345673
  hypo

SEQ ID NO: 55705 - DNA, 63 bp, Homo sapiens; identical to SEQ ID NO: 26084
  chr19:46345685-46345748
  hypo

SEQ ID NO: 55706 - DNA, 31 bp, Homo sapiens; identical to SEQ ID NO: 26085
  chr19:46404483-46404514
  hypo

SEQ ID NO: 55707 - DNA, 2 bp, Homo sapiens
  chr19:46404521-46404523
  hypo
aa

SEQ ID NO: 55708 - DNA, 31 bp, Homo sapiens; identical to SEQ ID NO: 26088
  chr19:46835961-46835992
  hypo

SEQ ID NO: 55709 - DNA, 51 bp, Homo sapiens; identical to SEQ ID NO: 26090
  chr19:46875805-46875856
  hypo

SEQ ID NO: 55710 - DNA, 37 bp, Homo sapiens; identical to SEQ ID NO: 26091
  chr19:46875886-46875923
  hypo

SEQ ID NO: 55711 - DNA, 31 bp, Homo sapiens; identical to SEQ ID NO: 26092
  chr19:47113153-47113184
  hypo

SEQ ID NO: 55712 - DNA, 39 bp, Homo sapiens; identical to SEQ ID NO: 26095
  chr19:47270416-47270455
  hypo

SEQ ID NO: 55713 - DNA, 2 bp, Homo sapiens
  chr19:47284560-47284562
  hypo
ag

SEQ ID NO: 55714 - DNA, 5 bp, Homo sapiens
  chr19:47284598-47284603
  hypo
taatc

SEQ ID NO: 55715 - DNA, 51 bp, Homo sapiens; identical to SEQ ID NO: 26098
  chr19:47305319-47305370
  hypo

SEQ ID NO: 55716 - DNA, 31 bp, Homo sapiens; identical to SEQ ID NO: 26099
  chr19:47350196-47350227
  hypo

SEQ ID NO: 55717 - DNA, 56 bp, Homo sapiens; identical to SEQ ID NO: 6837
  chr19:47363285-47363341
  hypo

SEQ ID NO: 55718 - DNA, 31 bp, Homo sapiens; identical to SEQ ID NO: 6838
  chr19:47363344-47363375
  hypo

SEQ ID NO: 55719 - DNA, 39 bp, Homo sapiens; identical to SEQ ID NO: 26103
  chr19:47498023-47498062
  hypo

SEQ ID NO: 55720 - DNA, 31 bp, Homo sapiens; identical to SEQ ID NO: 26105
  chr19:47540627-47540658
  hypo

SEQ ID NO: 55721 - DNA, 2 bp, Homo sapiens
  chr19:47540683-47540685
  hypo
tc

SEQ ID NO: 55722 - DNA, 31 bp, Homo sapiens; identical to SEQ ID NO: 26107
  chr19:47540767-47540798
  hypo

SEQ ID NO: 55723 - DNA, 44 bp, Homo sapiens; identical to SEQ ID NO: 26108
  chr19:47593037-47593081
  hypo

SEQ ID NO: 55724 - DNA, 23 bp, Homo sapiens
  chr19:47593148-47593171
  hypo
tgtgagaccaggccaccggggtt

SEQ ID NO: 55725 - DNA, 24 bp, Homo sapiens
  chr19:47593246-47593270
  hypo
ttggcacgccggtactggttcagc

SEQ ID NO: 55726 - DNA, 35 bp, Homo sapiens
  chr19:47633341-47633376
  hypo
gagattacaggtgcgagtcaccgtgcctggcctat

SEQ ID NO: 55727 - DNA, 21 bp, Homo sapiens
  chr19:47633405-47633426
  hypo
ctgggccgtgactgcctctaa

SEQ ID NO: 55728 - DNA, 54 bp, Homo sapiens; identical to SEQ ID NO: 26112
  chr19:47646738-47646792
  hypo

SEQ ID NO: 55729 - DNA, 41 bp, Homo sapiens; identical to SEQ ID NO: 26113
  chr19:47646839-47646880
  hypo

SEQ ID NO: 55730 - DNA, 31 bp, Homo sapiens; identical to SEQ ID NO: 6843
  chr19:47729938-47729969
  hypo

SEQ ID NO: 55731 - DNA, 31 bp, Homo sapiens; identical to SEQ ID NO: 6844
  chr19:47738880-47738911
  hypo

SEQ ID NO: 55732 - DNA, 31 bp, Homo sapiens; identical to SEQ ID NO: 26117
  chr19:47777369-47777400
  hypo

SEQ ID NO: 55733 - DNA, 53 bp, Homo sapiens; identical to SEQ ID NO: 26118
  chr19:47817583-47817636
  hypo

SEQ ID NO: 55734 - DNA, 31 bp, Homo sapiens; identical to SEQ ID NO: 26119
  chr19:47844143-47844174
  hypo

SEQ ID NO: 55735 - DNA, 31 bp, Homo sapiens; identical to SEQ ID NO: 26120
  chr19:47980239-47980270
  hypo

SEQ ID NO: 55736 - DNA, 56 bp, Homo sapiens; identical to SEQ ID NO: 26123
  chr19:48012649-48012705
  hypo

SEQ ID NO: 55737 - DNA, 31 bp, Homo sapiens; identical to SEQ ID NO: 26124
  chr19:48058859-48058890
  hypo

SEQ ID NO: 55738 - DNA, 31 bp, Homo sapiens; identical to SEQ ID NO: 26125
  chr19:48073242-48073273
  hypo

SEQ ID NO: 55739 - DNA, 31 bp, Homo sapiens; identical to SEQ ID NO: 26126
  chr19:48082931-48082962
  hypo

SEQ ID NO: 55740 - DNA, 31 bp, Homo sapiens; identical to SEQ ID NO: 26127
  chr19:48082988-48083019
  hypo

SEQ ID NO: 55741 - DNA, 31 bp, Homo sapiens; identical to SEQ ID NO: 26128
  chr19:48120570-48120601
  hypo

SEQ ID NO: 55742 - DNA, 31 bp, Homo sapiens; identical to SEQ ID NO: 26129
  chr19:48151219-48151250
  hypo

SEQ ID NO: 55743 - DNA, 2 bp, Homo sapiens
  chr19:48151264-48151266
  hypo
ta

SEQ ID NO: 55744 - DNA, 31 bp, Homo sapiens; identical to SEQ ID NO: 26132
  chr19:48154747-48154778
  hypo

SEQ ID NO: 55745 - DNA, 31 bp, Homo sapiens; identical to SEQ ID NO: 26134
  chr19:48161921-48161952
  hypo

SEQ ID NO: 55746 - DNA, 43 bp, Homo sapiens; identical to SEQ ID NO: 26136
  chr19:48305537-48305580
  hypo

SEQ ID NO: 55747 - DNA, 31 bp, Homo sapiens; identical to SEQ ID NO: 26137
  chr19:48326572-48326603
  hypo

SEQ ID NO: 55748 - DNA, 31 bp, Homo sapiens; identical to SEQ ID NO: 26139
  chr19:48801739-48801770
  hypo

SEQ ID NO: 55749 - DNA, 31 bp, Homo sapiens; identical to SEQ ID NO: 26140
  chr19:48806355-48806386
  hypo

SEQ ID NO: 55750 - DNA, 49 bp, Homo sapiens; identical to SEQ ID NO: 26141
  chr19:48823577-48823626
  hypo

SEQ ID NO: 55751 - DNA, 31 bp, Homo sapiens; identical to SEQ ID NO: 6846
  chr19:48823670-48823701
  hypo

SEQ ID NO: 55752 - DNA, 31 bp, Homo sapiens; identical to SEQ ID NO: 6847
  chr19:48823705-48823736
  hypo

SEQ ID NO: 55753 - DNA, 31 bp, Homo sapiens; identical to SEQ ID NO: 26144
  chr19:48857972-48858003
  hypo

SEQ ID NO: 55754 - DNA, 31 bp, Homo sapiens; identical to SEQ ID NO: 26145
  chr19:48889322-48889353
  hypo

SEQ ID NO: 55755 - DNA, 24 bp, Homo sapiens
  chr19:48989625-48989649
  hypo
ttcttcctacgtgactcaggcccc

SEQ ID NO: 55756 - DNA, 53 bp, Homo sapiens; identical to SEQ ID NO: 6850
  chr19:48994528-48994581
  hypo

SEQ ID NO: 55757 - DNA, 31 bp, Homo sapiens; identical to SEQ ID NO: 6851
  chr19:48996514-48996545
  hypo

SEQ ID NO: 55758 - DNA, 10 bp, Homo sapiens
  chr19:49043501-49043511
  hypo
ctgcagctgg

SEQ ID NO: 55759 - DNA, 2 bp, Homo sapiens
  chr19:49143015-49143017
  hypo
cc

SEQ ID NO: 55760 - DNA, 31 bp, Homo sapiens; identical to SEQ ID NO: 26155
  chr19:49166052-49166083
  hypo

SEQ ID NO: 55761 - DNA, 31 bp, Homo sapiens; identical to SEQ ID NO: 26156
  chr19:49173463-49173494
  hypo

SEQ ID NO: 55762 - DNA, 113 bp, Homo sapiens; identical to SEQ ID NO: 26157
  chr19:49173706-49173819
  hypo

SEQ ID NO: 55763 - DNA, 2 bp, Homo sapiens
  chr19:49180461-49180463
  hypo
ga

SEQ ID NO: 55764 - DNA, 31 bp, Homo sapiens; identical to SEQ ID NO: 26159
  chr19:49183538-49183569
  hypo

SEQ ID NO: 55765 - DNA, 36 bp, Homo sapiens; identical to SEQ ID NO: 26160
  chr19:49183599-49183635
  hypo

SEQ ID NO: 55766 - DNA, 84 bp, Homo sapiens; identical to SEQ ID NO: 26161
  chr19:49183641-49183725
  hypo

SEQ ID NO: 55767 - DNA, 142 bp, Homo sapiens; identical to SEQ ID NO: 26162
  chr19:49183848-49183990
  hypo

SEQ ID NO: 55768 - DNA, 31 bp, Homo sapiens; identical to SEQ ID NO: 26163
  chr19:49207343-49207374
  hypo

SEQ ID NO: 55769 - DNA, 57 bp, Homo sapiens; identical to SEQ ID NO: 26167
  chr19:49237088-49237145
  hypo

SEQ ID NO: 55770 - DNA, 31 bp, Homo sapiens; identical to SEQ ID NO: 26169
  chr19:49246878-49246909
  hypo

SEQ ID NO: 55771 - DNA, 89 bp, Homo sapiens; identical to SEQ ID NO: 26172
  chr19:49281056-49281145
  hypo

SEQ ID NO: 55772 - DNA, 31 bp, Homo sapiens; identical to SEQ ID NO: 26173
  chr19:49287746-49287777
  hypo

SEQ ID NO: 55773 - DNA, 42 bp, Homo sapiens; identical to SEQ ID NO: 26176
  chr19:49348662-49348704
  hypo

SEQ ID NO: 55774 - DNA, 31 bp, Homo sapiens; identical to SEQ ID NO: 26177
  chr19:49348814-49348845
  hypo

SEQ ID NO: 55775 - DNA, 6 bp, Homo sapiens
  chr19:49463918-49463924
  hypo
catgtt

SEQ ID NO: 55776 - DNA, 31 bp, Homo sapiens; identical to SEQ ID NO: 6854
  chr19:49466992-49467023
  hypo

SEQ ID NO: 55777 - DNA, 34 bp, Homo sapiens; identical to SEQ ID NO: 26180
  chr19:49525577-49525611
  hypo

SEQ ID NO: 55778 - DNA, 97 bp, Homo sapiens; identical to SEQ ID NO: 26181
  chr19:49540856-49540953
  hypo

SEQ ID NO: 55779 - DNA, 31 bp, Homo sapiens; identical to SEQ ID NO: 26182
  chr19:49606779-49606810
  hypo

SEQ ID NO: 55780 - DNA, 334 bp, Homo sapiens; identical to SEQ ID NO: 6859
  chr19:49660927-49661261
  hypo

SEQ ID NO: 55781 - DNA, 31 bp, Homo sapiens; identical to SEQ ID NO: 26184
  chr19:49828593-49828624
  hypo

SEQ ID NO: 55782 - DNA, 2 bp, Homo sapiens
  chr19:49971865-49971867
  hypo
gg

SEQ ID NO: 55783 - DNA, 6 bp, Homo sapiens
  chr19:49997365-49997371
  hypo
ggcgtg

SEQ ID NO: 55784 - DNA, 37 bp, Homo sapiens; identical to SEQ ID NO: 26187
  chr19:49997509-49997546
  hypo

SEQ ID NO: 55785 - DNA, 126 bp, Homo sapiens; identical to SEQ ID NO: 26188
  chr19:50059841-50059967
  hypo

SEQ ID NO: 55786 - DNA, 121 bp, Homo sapiens; identical to SEQ ID NO: 26189
  chr19:50059968-50060089
  hypo

SEQ ID NO: 55787 - DNA, 31 bp, Homo sapiens; identical to SEQ ID NO: 26190
  chr19:50060437-50060468
  hypo

SEQ ID NO: 55788 - DNA, 42 bp, Homo sapiens; identical to SEQ ID NO: 26191
  chr19:50060911-50060953
  hypo

SEQ ID NO: 55789 - DNA, 48 bp, Homo sapiens; identical to SEQ ID NO: 26192
  chr19:50060976-50061024
  hypo

SEQ ID NO: 55790 - DNA, 50 bp, Homo sapiens; identical to SEQ ID NO: 26193
  chr19:50061034-50061084
  hypo

SEQ ID NO: 55791 - DNA, 68 bp, Homo sapiens; identical to SEQ ID NO: 26194
  chr19:50061335-50061403
  hypo

SEQ ID NO: 55792 - DNA, 50 bp, Homo sapiens; identical to SEQ ID NO: 26195
  chr19:50061413-50061463
  hypo

SEQ ID NO: 55793 - DNA, 31 bp, Homo sapiens; identical to SEQ ID NO: 26197
  chr19:50092048-50092079
  hypo

SEQ ID NO: 55794 - DNA, 106 bp, Homo sapiens; identical to SEQ ID NO: 26199
  chr19:50208441-50208547
  hypo

SEQ ID NO: 55795 - DNA, 31 bp, Homo sapiens; identical to SEQ ID NO: 26200
  chr19:50208610-50208641
  hypo

SEQ ID NO: 55796 - DNA, 31 bp, Homo sapiens; identical to SEQ ID NO: 26201
  chr19:50215624-50215655
  hypo

SEQ ID NO: 55797 - DNA, 31 bp, Homo sapiens; identical to SEQ ID NO: 26202
  chr19:50218145-50218176
  hypo

SEQ ID NO: 55798 - DNA, 31 bp, Homo sapiens; identical to SEQ ID NO: 26203
  chr19:50247504-50247535
  hypo

SEQ ID NO: 55799 - DNA, 31 bp, Homo sapiens; identical to SEQ ID NO: 26204
  chr19:50264372-50264403
  hypo

SEQ ID NO: 55800 - DNA, 63 bp, Homo sapiens; identical to SEQ ID NO: 26205
  chr19:50304784-50304847
  hypo

SEQ ID NO: 55801 - DNA, 34 bp, Homo sapiens; identical to SEQ ID NO: 26206
  chr19:50304852-50304886
  hypo

SEQ ID NO: 55802 - DNA, 7 bp, Homo sapiens
  chr19:50319639-50319646
  hypo
catgagc

SEQ ID NO: 55803 - DNA, 31 bp, Homo sapiens; identical to SEQ ID NO: 26210
  chr19:50355763-50355794
  hypo

SEQ ID NO: 55804 - DNA, 49 bp, Homo sapiens; identical to SEQ ID NO: 26211
  chr19:50361409-50361458
  hypo

SEQ ID NO: 55805 - DNA, 2 bp, Homo sapiens
  chr19:50364772-50364774
  hypo
gg

SEQ ID NO: 55806 - DNA, 31 bp, Homo sapiens; identical to SEQ ID NO: 26216
  chr19:50406381-50406412
  hypo

SEQ ID NO: 55807 - DNA, 60 bp, Homo sapiens; identical to SEQ ID NO: 26217
  chr19:50406526-50406586
  hypo

SEQ ID NO: 55808 - DNA, 31 bp, Homo sapiens; identical to SEQ ID NO: 26218
  chr19:50424142-50424173
  hypo

SEQ ID NO: 55809 - DNA, 2 bp, Homo sapiens
  chr19:50477608-50477610
  hypo
tg

SEQ ID NO: 55810 - DNA, 31 bp, Homo sapiens; identical to SEQ ID NO: 26220
  chr19:50673968-50673999
  hypo

SEQ ID NO: 55811 - DNA, 38 bp, Homo sapiens; identical to SEQ ID NO: 26221
  chr19:50705040-50705078
  hypo

SEQ ID NO: 55812 - DNA, 31 bp, Homo sapiens; identical to SEQ ID NO: 26222
  chr19:50726894-50726925
  hypo

SEQ ID NO: 55813 - DNA, 31 bp, Homo sapiens; identical to SEQ ID NO: 26223
  chr19:50753943-50753974
  hypo

SEQ ID NO: 55814 - DNA, 54 bp, Homo sapiens; identical to SEQ ID NO: 26224
  chr19:50756057-50756111
  hypo

SEQ ID NO: 55815 - DNA, 31 bp, Homo sapiens; identical to SEQ ID NO: 26226
  chr19:50764722-50764753
  hypo

SEQ ID NO: 55816 - DNA, 62 bp, Homo sapiens; identical to SEQ ID NO: 26227
  chr19:50764856-50764918
  hypo

SEQ ID NO: 55817 - DNA, 31 bp, Homo sapiens; identical to SEQ ID NO: 26228
  chr19:50765105-50765136
  hypo

SEQ ID NO: 55818 - DNA, 76 bp, Homo sapiens; identical to SEQ ID NO: 26229
  chr19:50765187-50765263
  hypo

SEQ ID NO: 55819 - DNA, 31 bp, Homo sapiens; identical to SEQ ID NO: 26230
  chr19:50765284-50765315
  hypo

SEQ ID NO: 55820 - DNA, 31 bp, Homo sapiens; identical to SEQ ID NO: 26231
  chr19:50766646-50766677
  hypo

SEQ ID NO: 55821 - DNA, 31 bp, Homo sapiens; identical to SEQ ID NO: 26232
  chr19:50783166-50783197
  hypo

SEQ ID NO: 55822 - DNA, 44 bp, Homo sapiens; identical to SEQ ID NO: 26233
  chr19:50784839-50784883
  hypo

SEQ ID NO: 55823 - DNA, 121 bp, Homo sapiens; identical to SEQ ID NO: 26234
  chr19:50784897-50785018
  hypo

SEQ ID NO: 55824 - DNA, 31 bp, Homo sapiens; identical to SEQ ID NO: 26235
  chr19:50819987-50820018
  hypo

SEQ ID NO: 55825 - DNA, 31 bp, Homo sapiens; identical to SEQ ID NO: 26236
  chr19:50826552-50826583
  hypo

SEQ ID NO: 55826 - DNA, 101 bp, Homo sapiens; identical to SEQ ID NO: 26237
  chr19:50826584-50826685
  hypo

SEQ ID NO: 55827 - DNA, 31 bp, Homo sapiens; identical to SEQ ID NO: 26238
  chr19:50826687-50826718
  hypo

SEQ ID NO: 55828 - DNA, 73 bp, Homo sapiens; identical to SEQ ID NO: 26239
  chr19:50826764-50826837
  hypo

SEQ ID NO: 55829 - DNA, 120 bp, Homo sapiens; identical to SEQ ID NO: 26240
  chr19:50826854-50826974
  hypo

SEQ ID NO: 55830 - DNA, 44 bp, Homo sapiens; identical to SEQ ID NO: 26241
  chr19:50827096-50827140
  hypo

SEQ ID NO: 55831 - DNA, 31 bp, Homo sapiens; identical to SEQ ID NO: 6871
  chr19:50829065-50829096
  hypo

SEQ ID NO: 55832 - DNA, 29 bp, Homo sapiens
  chr19:50833970-50833999
  hypo
aatataggcaggaccgataaaaaatgggg

SEQ ID NO: 55833 - DNA, 31 bp, Homo sapiens; identical to SEQ ID NO: 26245
  chr19:50838465-50838496
  hypo

SEQ ID NO: 55834 - DNA, 31 bp, Homo sapiens; identical to SEQ ID NO: 26246
  chr19:50898860-50898891
  hypo

SEQ ID NO: 55835 - DNA, 2 bp, Homo sapiens
  chr19:51295127-51295129
  hypo
cc

SEQ ID NO: 55836 - DNA, 31 bp, Homo sapiens; identical to SEQ ID NO: 6881
  chr19:52531307-52531338
  hypo

SEQ ID NO: 55837 - DNA, 31 bp, Homo sapiens; identical to SEQ ID NO: 26257
  chr19:52565128-52565159
  hypo

SEQ ID NO: 55838 - DNA, 51 bp, Homo sapiens; identical to SEQ ID NO: 26258
  chr19:52569173-52569224
  hypo

SEQ ID NO: 55839 - DNA, 72 bp, Homo sapiens; identical to SEQ ID NO: 26259
  chr19:52569227-52569299
  hypo

SEQ ID NO: 55840 - DNA, 51 bp, Homo sapiens; identical to SEQ ID NO: 26260
  chr19:52569341-52569392
  hypo

SEQ ID NO: 55841 - DNA, 31 bp, Homo sapiens; identical to SEQ ID NO: 6883
  chr19:52643470-52643501
  hypo

SEQ ID NO: 55842 - DNA, 36 bp, Homo sapiens; identical to SEQ ID NO: 6884
  chr19:52674676-52674712
  hypo

SEQ ID NO: 55843 - DNA, 36 bp, Homo sapiens; identical to SEQ ID NO: 26263
  chr19:52801590-52801626
  hypo

SEQ ID NO: 55844 - DNA, 31 bp, Homo sapiens; identical to SEQ ID NO: 26264
  chr19:53029535-53029566
  hypo

SEQ ID NO: 55845 - DNA, 31 bp, Homo sapiens; identical to SEQ ID NO: 26265
  chr19:53034437-53034468
  hypo

SEQ ID NO: 55846 - DNA, 31 bp, Homo sapiens; identical to SEQ ID NO: 26266
  chr19:53089213-53089244
  hypo

SEQ ID NO: 55847 - DNA, 35 bp, Homo sapiens; identical to SEQ ID NO: 26267
  chr19:53601967-53602002
  hypo

SEQ ID NO: 55848 - DNA, 95 bp, Homo sapiens; identical to SEQ ID NO: 26268
  chr19:53602015-53602110
  hypo

SEQ ID NO: 55849 - DNA, 31 bp, Homo sapiens; identical to SEQ ID NO: 26269
  chr19:53668464-53668495
  hypo

SEQ ID NO: 55850 - DNA, 61 bp, Homo sapiens; identical to SEQ ID NO: 26270
  chr19:53668504-53668565
  hypo

SEQ ID NO: 55851 - DNA, 34 bp, Homo sapiens; identical to SEQ ID NO: 26271
  chr19:53854270-53854304
  hypo

SEQ ID NO: 55852 - DNA, 47 bp, Homo sapiens; identical to SEQ ID NO: 26272
  chr19:53854363-53854410
  hypo

SEQ ID NO: 55853 - DNA, 31 bp, Homo sapiens; identical to SEQ ID NO: 26273
  chr19:53854426-53854457
  hypo

SEQ ID NO: 55854 - DNA, 31 bp, Homo sapiens; identical to SEQ ID NO: 26274
  chr19:54072512-54072543
  hypo

SEQ ID NO: 55855 - DNA, 41 bp, Homo sapiens; identical to SEQ ID NO: 26275
  chr19:55609522-55609563
  hypo

SEQ ID NO: 55856 - DNA, 31 bp, Homo sapiens; identical to SEQ ID NO: 26276
  chr19:55671890-55671921
  hypo

SEQ ID NO: 55857 - DNA, 2 bp, Homo sapiens
  chr19:55912264-55912266
  hypo
tc

SEQ ID NO: 55858 - DNA, 31 bp, Homo sapiens; identical to SEQ ID NO: 26279
  chr19:55986596-55986627
  hypo

SEQ ID NO: 55859 - DNA, 68 bp, Homo sapiens; identical to SEQ ID NO: 26280
  chr19:55986655-55986723
  hypo

SEQ ID NO: 55860 - DNA, 31 bp, Homo sapiens; identical to SEQ ID NO: 26281
  chr19:55998079-55998110
  hypo

SEQ ID NO: 55861 - DNA, 31 bp, Homo sapiens; identical to SEQ ID NO: 26282
  chr19:56052608-56052639
  hypo

SEQ ID NO: 55862 - DNA, 31 bp, Homo sapiens; identical to SEQ ID NO: 26283
  chr19:56066672-56066703
  hypo

SEQ ID NO: 55863 - DNA, 60 bp, Homo sapiens; identical to SEQ ID NO: 26284
  chr19:56089713-56089773
  hypo

SEQ ID NO: 55864 - DNA, 18 bp, Homo sapiens
  chr19:56159669-56159687
  hypo
cctcggaccccgggcacc

SEQ ID NO: 55865 - DNA, 31 bp, Homo sapiens; identical to SEQ ID NO: 26287
  chr19:56178937-56178968
  hypo

SEQ ID NO: 55866 - DNA, 31 bp, Homo sapiens; identical to SEQ ID NO: 26289
  chr19:56179511-56179542
  hypo

SEQ ID NO: 55867 - DNA, 31 bp, Homo sapiens; identical to SEQ ID NO: 26290
  chr19:56179584-56179615
  hypo

SEQ ID NO: 55868 - DNA, 2 bp, Homo sapiens
  chr19:56179647-56179649
  hypo
tt

SEQ ID NO: 55869 - DNA, 36 bp, Homo sapiens; identical to SEQ ID NO: 26292
  chr19:56179723-56179759
  hypo

SEQ ID NO: 55870 - DNA, 31 bp, Homo sapiens; identical to SEQ ID NO: 26294
  chr19:56197525-56197556
  hypo

SEQ ID NO: 55871 - DNA, 31 bp, Homo sapiens; identical to SEQ ID NO: 26295
  chr19:56197772-56197803
  hypo

SEQ ID NO: 55872 - DNA, 53 bp, Homo sapiens; identical to SEQ ID NO: 26296
  chr19:56198990-56199043
  hypo

SEQ ID NO: 55873 - DNA, 2 bp, Homo sapiens
  chr19:56200495-56200497
  hypo
tg

SEQ ID NO: 55874 - DNA, 2 bp, Homo sapiens
  chr19:56205700-56205702
  hypo
ct

SEQ ID NO: 55875 - DNA, 31 bp, Homo sapiens; identical to SEQ ID NO: 26302
  chr19:56617513-56617544
  hypo

SEQ ID NO: 55876 - DNA, 31 bp, Homo sapiens; identical to SEQ ID NO: 26303
  chr19:56617572-56617603
  hypo

SEQ ID NO: 55877 - DNA, 58 bp, Homo sapiens; identical to SEQ ID NO: 26304
  chr19:56617604-56617662
  hypo

SEQ ID NO: 55878 - DNA, 34 bp, Homo sapiens; identical to SEQ ID NO: 26305
  chr19:56671236-56671270
  hypo

SEQ ID NO: 55879 - DNA, 31 bp, Homo sapiens; identical to SEQ ID NO: 26306
  chr19:56761105-56761136
  hypo

SEQ ID NO: 55880 - DNA, 31 bp, Homo sapiens; identical to SEQ ID NO: 26307
  chr19:56761139-56761170
  hypo

SEQ ID NO: 55881 - DNA, 31 bp, Homo sapiens; identical to SEQ ID NO: 26308
  chr19:56806260-56806291
  hypo

SEQ ID NO: 55882 - DNA, 31 bp, Homo sapiens; identical to SEQ ID NO: 26316
  chr19:58006805-58006836
  hypo

SEQ ID NO: 55883 - DNA, 31 bp, Homo sapiens; identical to SEQ ID NO: 26317
  chr19:58161230-58161261
  hypo

SEQ ID NO: 55884 - DNA, 31 bp, Homo sapiens; identical to SEQ ID NO: 26321
  chr19:58304690-58304721
  hypo

SEQ ID NO: 55885 - DNA, 35 bp, Homo sapiens; identical to SEQ ID NO: 26322
  chr19:58316860-58316895
  hypo

SEQ ID NO: 55886 - DNA, 40 bp, Homo sapiens; identical to SEQ ID NO: 6922
  chr19:58694379-58694419
  hypo

SEQ ID NO: 55887 - DNA, 50 bp, Homo sapiens; identical to SEQ ID NO: 6923
  chr19:58694424-58694474
  hypo

SEQ ID NO: 55888 - DNA, 68 bp, Homo sapiens; identical to SEQ ID NO: 40212
  chr19:58694485-58694553
  hypo

SEQ ID NO: 55889 - DNA, 38 bp, Homo sapiens; identical to SEQ ID NO: 26328
  chr19:58711830-58711868
  hypo

SEQ ID NO: 55890 - DNA, 60 bp, Homo sapiens; identical to SEQ ID NO: 26329
  chr19:58711891-58711951
  hypo

SEQ ID NO: 55891 - DNA, 31 bp, Homo sapiens; identical to SEQ ID NO: 26330
  chr19:58711956-58711987
  hypo

SEQ ID NO: 55892 - DNA, 91 bp, Homo sapiens; identical to SEQ ID NO: 26331
  chr19:58872595-58872686
  hypo

SEQ ID NO: 55893 - DNA, 89 bp, Homo sapiens; identical to SEQ ID NO: 6926
  chr19:58874183-58874272
  hypo

SEQ ID NO: 55894 - DNA, 31 bp, Homo sapiens; identical to SEQ ID NO: 6927
  chr19:58874318-58874349
  hypo

SEQ ID NO: 55895 - DNA, 72 bp, Homo sapiens; identical to SEQ ID NO: 6928
  chr19:58920315-58920387
  hypo

SEQ ID NO: 55896 - DNA, 31 bp, Homo sapiens; identical to SEQ ID NO: 6929
  chr19:59010522-59010553
  hypo

SEQ ID NO: 55897 - DNA, 31 bp, Homo sapiens; identical to SEQ ID NO: 26339
  chr20:276871-276902
  hypo

SEQ ID NO: 55898 - DNA, 2 bp, Homo sapiens
  chr20:276976-276978
  hypo
ca

SEQ ID NO: 55899 - DNA, 2 bp, Homo sapiens
  chr20:401015-401017
  hypo
gc

SEQ ID NO: 55900 - DNA, 31 bp, Homo sapiens; identical to SEQ ID NO: 26346
  chr20:413053-413084
  hypo

SEQ ID NO: 55901 - DNA, 53 bp, Homo sapiens; identical to SEQ ID NO: 26347
  chr20:413085-413138
  hypo

SEQ ID NO: 55902 - DNA, 31 bp, Homo sapiens; identical to SEQ ID NO: 26348
  chr20:413139-413170
  hypo

SEQ ID NO: 55903 - DNA, 2 bp, Homo sapiens
  chr20:799688-799690
  hypo
tg

SEQ ID NO: 55904 - DNA, 37 bp, Homo sapiens; identical to SEQ ID NO: 26350
  chr20:1276609-1276646
  hypo

SEQ ID NO: 55905 - DNA, 2 bp, Homo sapiens
  chr20:1323451-1323453
  hypo
gc

SEQ ID NO: 55906 - DNA, 31 bp, Homo sapiens; identical to SEQ ID NO: 26353
  chr20:2143498-2143529
  hypo

SEQ ID NO: 55907 - DNA, 31 bp, Homo sapiens; identical to SEQ ID NO: 26354
  chr20:2150415-2150446
  hypo

SEQ ID NO: 55908 - DNA, 2 bp, Homo sapiens
  chr20:2444390-2444392
  hypo
ac

SEQ ID NO: 55909 - DNA, 69 bp, Homo sapiens; identical to SEQ ID NO: 6943
  chr20:2444477-2444546
  hypo

SEQ ID NO: 55910 - DNA, 53 bp, Homo sapiens; identical to SEQ ID NO: 6944
  chr20:2444614-2444667
  hypo

SEQ ID NO: 55911 - DNA, 31 bp, Homo sapiens; identical to SEQ ID NO: 26360
  chr20:2739579-2739610
  hypo

SEQ ID NO: 55912 - DNA, 62 bp, Homo sapiens; identical to SEQ ID NO: 26361
  chr20:2739612-2739674
  hypo

SEQ ID NO: 55913 - DNA, 31 bp, Homo sapiens; identical to SEQ ID NO: 26362
  chr20:2739707-2739738
  hypo

SEQ ID NO: 55914 - DNA, 31 bp, Homo sapiens; identical to SEQ ID NO: 26363
  chr20:2739756-2739787
  hypo

SEQ ID NO: 55915 - DNA, 31 bp, Homo sapiens; identical to SEQ ID NO: 26364
  chr20:3003331-3003362
  hypo

SEQ ID NO: 55916 - DNA, 154 bp, Homo sapiens; identical to SEQ ID NO: 6945
  chr20:3154655-3154809
  hypo

SEQ ID NO: 55917 - DNA, 31 bp, Homo sapiens; identical to SEQ ID NO: 26366
  chr20:3175799-3175830
  hypo

SEQ ID NO: 55918 - DNA, 31 bp, Homo sapiens; identical to SEQ ID NO: 26368
  chr20:3202289-3202320
  hypo

SEQ ID NO: 55919 - DNA, 49 bp, Homo sapiens; identical to SEQ ID NO: 26369
  chr20:3211454-3211503
  hypo

SEQ ID NO: 55920 - DNA, 35 bp, Homo sapiens; identical to SEQ ID NO: 26370
  chr20:3211813-3211848
  hypo

SEQ ID NO: 55921 - DNA, 40 bp, Homo sapiens; identical to SEQ ID NO: 26371
  chr20:3214856-3214896
  hypo

SEQ ID NO: 55922 - DNA, 291 bp, Homo sapiens; identical to SEQ ID NO: 6948
  chr20:3220114-3220405
  hypo

SEQ ID NO: 55923 - DNA, 47 bp, Homo sapiens; identical to SEQ ID NO: 6951
  chr20:4129264-4129311
  hypo

SEQ ID NO: 55924 - DNA, 203 bp, Homo sapiens; identical to SEQ ID NO: 6952
  chr20:4129403-4129606
  hypo

SEQ ID NO: 55925 - DNA, 99 bp, Homo sapiens; identical to SEQ ID NO: 6953
  chr20:4129702-4129801
  hypo

SEQ ID NO: 55926 - DNA, 92 bp, Homo sapiens; identical to SEQ ID NO: 6954
  chr20:4129817-4129909
  hypo

SEQ ID NO: 55927 - DNA, 96 bp, Homo sapiens; identical to SEQ ID NO: 6955
  chr20:4130006-4130102
  hypo

SEQ ID NO: 55928 - DNA, 82 bp, Homo sapiens; identical to SEQ ID NO: 40233
  chr20:4804008-4804090
  hypo

SEQ ID NO: 55929 - DNA, 31 bp, Homo sapiens; identical to SEQ ID NO: 26384
  chr20:4865129-4865160
  hypo

SEQ ID NO: 55930 - DNA, 31 bp, Homo sapiens; identical to SEQ ID NO: 26386
  chr20:4966923-4966954
  hypo

SEQ ID NO: 55931 - DNA, 31 bp, Homo sapiens; identical to SEQ ID NO: 26390
  chr20:5762466-5762497
  hypo

SEQ ID NO: 55932 - DNA, 7 bp, Homo sapiens
  chr20:5762550-5762557
  hypo
gcaatat

SEQ ID NO: 55933 - DNA, 31 bp, Homo sapiens; identical to SEQ ID NO: 26393
  chr20:6837484-6837515
  hypo

SEQ ID NO: 55934 - DNA, 31 bp, Homo sapiens; identical to SEQ ID NO: 26394
  chr20:6837579-6837610
  hypo

SEQ ID NO: 55935 - DNA, 30 bp, Homo sapiens; identical to SEQ ID NO: 26395
  chr20:6837616-6837646
  hypo

SEQ ID NO: 55936 - DNA, 2 bp, Homo sapiens
  chr20:7958417-7958419
  hypo
aa

SEQ ID NO: 55937 - DNA, 35 bp, Homo sapiens
  chr20:7958448-7958483
  hypo
agaaacacgtcaaagttgtacgagtcacacatata

SEQ ID NO: 55938 - DNA, 41 bp, Homo sapiens; identical to SEQ ID NO: 26397
  chr20:7958524-7958565
  hypo

SEQ ID NO: 55939 - DNA, 14 bp, Homo sapiens
  chr20:9049238-9049252
  hypo
gccctgcgggctcg

SEQ ID NO: 55940 - DNA, 47 bp, Homo sapiens; identical to SEQ ID NO: 26400
  chr20:10515151-10515198
  hypo

SEQ ID NO: 55941 - DNA, 58 bp, Homo sapiens; identical to SEQ ID NO: 26401
  chr20:10515261-10515319
  hypo

SEQ ID NO: 55942 - DNA, 170 bp, Homo sapiens; identical to SEQ ID NO: 6969
  chr20:10653740-10653910
  hypo

SEQ ID NO: 55943 - DNA, 108 bp, Homo sapiens; identical to SEQ ID NO: 6970
  chr20:10653916-10654024
  hypo

SEQ ID NO: 55944 - DNA, 129 bp, Homo sapiens; identical to SEQ ID NO: 6971
  chr20:10654668-10654797
  hypo

SEQ ID NO: 55945 - DNA, 36 bp, Homo sapiens; identical to SEQ ID NO: 6972
  chr20:10654955-10654991
  hypo

SEQ ID NO: 55946 - DNA, 151 bp, Homo sapiens; identical to SEQ ID NO: 6973
  chr20:10655071-10655222
  hypo

SEQ ID NO: 55947 - DNA, 49 bp, Homo sapiens; identical to SEQ ID NO: 6974
  chr20:10655279-10655328
  hypo

SEQ ID NO: 55948 - DNA, 73 bp, Homo sapiens; identical to SEQ ID NO: 6975
  chr20:10655444-10655517
  hypo

SEQ ID NO: 55949 - DNA, 38 bp, Homo sapiens; identical to SEQ ID NO: 6976
  chr20:10655521-10655559
  hypo

SEQ ID NO: 55950 - DNA, 53 bp, Homo sapiens; identical to SEQ ID NO: 6977
  chr20:10655570-10655623
  hypo

SEQ ID NO: 55951 - DNA, 66 bp, Homo sapiens; identical to SEQ ID NO: 6980
  chr20:11871661-11871727
  hypo

SEQ ID NO: 55952 - DNA, 128 bp, Homo sapiens; identical to SEQ ID NO: 6981
  chr20:11871950-11872078
  hypo

SEQ ID NO: 55953 - DNA, 34 bp, Homo sapiens; identical to SEQ ID NO: 6982
  chr20:11872100-11872134
  hypo

SEQ ID NO: 55954 - DNA, 31 bp, Homo sapiens; identical to SEQ ID NO: 26416
  chr20:14115133-14115164
  hypo

SEQ ID NO: 55955 - DNA, 59 bp, Homo sapiens; identical to SEQ ID NO: 26417
  chr20:14812473-14812532
  hypo

SEQ ID NO: 55956 - DNA, 31 bp, Homo sapiens; identical to SEQ ID NO: 26418
  chr20:17471843-17471874
  hypo

SEQ ID NO: 55957 - DNA, 125 bp, Homo sapiens; identical to SEQ ID NO: 26419
  chr20:17489361-17489486
  hypo

SEQ ID NO: 55958 - DNA, 45 bp, Homo sapiens; identical to SEQ ID NO: 26420
  chr20:17489498-17489543
  hypo

SEQ ID NO: 55959 - DNA, 57 bp, Homo sapiens; identical to SEQ ID NO: 26421
  chr20:17489689-17489746
  hypo

SEQ ID NO: 55960 - DNA, 70 bp, Homo sapiens; identical to SEQ ID NO: 6986
  chr20:17549809-17549879
  hypo

SEQ ID NO: 55961 - DNA, 31 bp, Homo sapiens; identical to SEQ ID NO: 6987
  chr20:17549887-17549918
  hypo

SEQ ID NO: 55962 - DNA, 123 bp, Homo sapiens; identical to SEQ ID NO: 6988
  chr20:17549928-17550051
  hypo

SEQ ID NO: 55963 - DNA, 28 bp, Homo sapiens
  chr20:17971885-17971913
  hypo
agtgcataaaagaaagcgtcctcggctg

SEQ ID NO: 55964 - DNA, 31 bp, Homo sapiens; identical to SEQ ID NO: 26426
  chr20:18041682-18041713
  hypo

SEQ ID NO: 55965 - DNA, 31 bp, Homo sapiens; identical to SEQ ID NO: 26427
  chr20:18449103-18449134
  hypo

SEQ ID NO: 55966 - DNA, 45 bp, Homo sapiens; identical to SEQ ID NO: 26428
  chr20:19207655-19207700
  hypo

SEQ ID NO: 55967 - DNA, 31 bp, Homo sapiens; identical to SEQ ID NO: 26430
  chr20:19952936-19952967
  hypo

SEQ ID NO: 55968 - DNA, 31 bp, Homo sapiens; identical to SEQ ID NO: 6997
  chr20:19997854-19997885
  hypo

SEQ ID NO: 55969 - DNA, 34 bp, Homo sapiens; identical to SEQ ID NO: 26432
  chr20:20378094-20378128
  hypo

SEQ ID NO: 55970 - DNA, 31 bp, Homo sapiens; identical to SEQ ID NO: 26433
  chr20:20378130-20378161
  hypo

SEQ ID NO: 55971 - DNA, 31 bp, Homo sapiens; identical to SEQ ID NO: 26434
  chr20:20378195-20378226
  hypo

SEQ ID NO: 55972 - DNA, 31 bp, Homo sapiens; identical to SEQ ID NO: 26435
  chr20:20378232-20378263
  hypo

SEQ ID NO: 55973 - DNA, 31 bp, Homo sapiens; identical to SEQ ID NO: 6998
  chr20:20692668-20692699
  hypo

SEQ ID NO: 55974 - DNA, 31 bp, Homo sapiens; identical to SEQ ID NO: 26437
  chr20:21115586-21115617
  hypo

SEQ ID NO: 55975 - DNA, 36 bp, Homo sapiens; identical to SEQ ID NO: 26438
  chr20:22324532-22324568
  hypo

SEQ ID NO: 55976 - DNA, 31 bp, Homo sapiens; identical to SEQ ID NO: 26439
  chr20:23108362-23108393
  hypo

SEQ ID NO: 55977 - DNA, 31 bp, Homo sapiens; identical to SEQ ID NO: 7006
  chr20:23618042-23618073
  hypo

SEQ ID NO: 55978 - DNA, 34 bp, Homo sapiens; identical to SEQ ID NO: 7007
  chr20:23618145-23618179
  hypo

SEQ ID NO: 55979 - DNA, 10 bp, Homo sapiens
  chr20:23618645-23618655
  hypo
caccccaccg

SEQ ID NO: 55980 - DNA, 31 bp, Homo sapiens; identical to SEQ ID NO: 7009
  chr20:23618696-23618727
  hypo

SEQ ID NO: 55981 - DNA, 31 bp, Homo sapiens; identical to SEQ ID NO: 26444
  chr20:24476178-24476209
  hypo

SEQ ID NO: 55982 - DNA, 83 bp, Homo sapiens; identical to SEQ ID NO: 26445
  chr20:24944572-24944655
  hypo

SEQ ID NO: 55983 - DNA, 66 bp, Homo sapiens; identical to SEQ ID NO: 26446
  chr20:24944695-24944761
  hypo

SEQ ID NO: 55984 - DNA, 31 bp, Homo sapiens; identical to SEQ ID NO: 26449
  chr20:25236290-25236321
  hypo

SEQ ID NO: 55985 - DNA, 34 bp, Homo sapiens; identical to SEQ ID NO: 26450
  chr20:25278857-25278891
  hypo

SEQ ID NO: 55986 - DNA, 31 bp, Homo sapiens; identical to SEQ ID NO: 26451
  chr20:25310087-25310118
  hypo

SEQ ID NO: 55987 - DNA, 31 bp, Homo sapiens; identical to SEQ ID NO: 26452
  chr20:25310119-25310150
  hypo

SEQ ID NO: 55988 - DNA, 31 bp, Homo sapiens; identical to SEQ ID NO: 26453
  chr20:25310157-25310188
  hypo

SEQ ID NO: 55989 - DNA, 31 bp, Homo sapiens; identical to SEQ ID NO: 26454
  chr20:25310197-25310228
  hypo

SEQ ID NO: 55990 - DNA, 31 bp, Homo sapiens; identical to SEQ ID NO: 26455
  chr20:25310246-25310277
  hypo

SEQ ID NO: 55991 - DNA, 2 bp, Homo sapiens
  chr20:25320568-25320570
  hypo
gc

SEQ ID NO: 55992 - DNA, 31 bp, Homo sapiens; identical to SEQ ID NO: 26458
  chr20:25344213-25344244
  hypo

SEQ ID NO: 55993 - DNA, 31 bp, Homo sapiens; identical to SEQ ID NO: 26459
  chr20:25451905-25451936
  hypo

SEQ ID NO: 55994 - DNA, 31 bp, Homo sapiens; identical to SEQ ID NO: 26460
  chr20:25470594-25470625
  hypo

SEQ ID NO: 55995 - DNA, 31 bp, Homo sapiens; identical to SEQ ID NO: 26461
  chr20:25470646-25470677
  hypo

SEQ ID NO: 55996 - DNA, 37 bp, Homo sapiens; identical to SEQ ID NO: 26462
  chr20:25470724-25470761
  hypo

SEQ ID NO: 55997 - DNA, 31 bp, Homo sapiens; identical to SEQ ID NO: 26463
  chr20:25605600-25605631
  hypo

SEQ ID NO: 55998 - DNA, 36 bp, Homo sapiens; identical to SEQ ID NO: 26464
  chr20:26062266-26062302
  hypo

SEQ ID NO: 55999 - DNA, 2 bp, Homo sapiens
  chr20:30153939-30153941
  hypo
tt

SEQ ID NO: 56000 - DNA, 60 bp, Homo sapiens; identical to SEQ ID NO: 26467
  chr20:30154019-30154079
  hypo

SEQ ID NO: 56001 - DNA, 31 bp, Homo sapiens; identical to SEQ ID NO: 26469
  chr20:30181188-30181219
  hypo

SEQ ID NO: 56002 - DNA, 62 bp, Homo sapiens; identical to SEQ ID NO: 26470
  chr20:30181234-30181296
  hypo

SEQ ID NO: 56003 - DNA, 13 bp, Homo sapiens
  chr20:30468308-30468321
  hypo
ttttttgagacgg

SEQ ID NO: 56004 - DNA, 31 bp, Homo sapiens; identical to SEQ ID NO: 26475
  chr20:30720983-30721014
  hypo

SEQ ID NO: 56005 - DNA, 31 bp, Homo sapiens; identical to SEQ ID NO: 26476
  chr20:30721031-30721062
  hypo

SEQ ID NO: 56006 - DNA, 65 bp, Homo sapiens; identical to SEQ ID NO: 26478
  chr20:31081012-31081077
  hypo

SEQ ID NO: 56007 - DNA, 57 bp, Homo sapiens; identical to SEQ ID NO: 26480
  chr20:31146688-31146745
  hypo

SEQ ID NO: 56008 - DNA, 31 bp, Homo sapiens; identical to SEQ ID NO: 26481
  chr20:31196056-31196087
  hypo

SEQ ID NO: 56009 - DNA, 31 bp, Homo sapiens; identical to SEQ ID NO: 26482
  chr20:31196132-31196163
  hypo

SEQ ID NO: 56010 - DNA, 93 bp, Homo sapiens; identical to SEQ ID NO: 7020
  chr20:31351104-31351197
  hypo

SEQ ID NO: 56011 - DNA, 59 bp, Homo sapiens; identical to SEQ ID NO: 7021
  chr20:31351208-31351267
  hypo

SEQ ID NO: 56012 - DNA, 31 bp, Homo sapiens; identical to SEQ ID NO: 26485
  chr20:31859916-31859947
  hypo

SEQ ID NO: 56013 - DNA, 40 bp, Homo sapiens; identical to SEQ ID NO: 26487
  chr20:32370538-32370578
  hypo

SEQ ID NO: 56014 - DNA, 31 bp, Homo sapiens; identical to SEQ ID NO: 26489
  chr20:32378462-32378493
  hypo

SEQ ID NO: 56015 - DNA, 31 bp, Homo sapiens; identical to SEQ ID NO: 26490
  chr20:32378502-32378533
  hypo

SEQ ID NO: 56016 - DNA, 46 bp, Homo sapiens; identical to SEQ ID NO: 26491
  chr20:32378714-32378760
  hypo

SEQ ID NO: 56017 - DNA, 2 bp, Homo sapiens
  chr20:32378889-32378891
  hypo
tc

SEQ ID NO: 56018 - DNA, 31 bp, Homo sapiens; identical to SEQ ID NO: 26493
  chr20:32441487-32441518
  hypo

SEQ ID NO: 56019 - DNA, 32 bp, Homo sapiens; identical to SEQ ID NO: 26496
  chr20:32584927-32584959
  hypo

SEQ ID NO: 56020 - DNA, 2 bp, Homo sapiens
  chr20:32677660-32677662
  hypo
tc

SEQ ID NO: 56021 - DNA, 7 bp, Homo sapiens
  chr20:32677691-32677698
  hypo
gtgacaa

SEQ ID NO: 56022 - DNA, 31 bp, Homo sapiens; identical to SEQ ID NO: 26500
  chr20:33131650-33131681
  hypo

SEQ ID NO: 56023 - DNA, 31 bp, Homo sapiens; identical to SEQ ID NO: 26501
  chr20:33183872-33183903
  hypo

SEQ ID NO: 56024 - DNA, 31 bp, Homo sapiens; identical to SEQ ID NO: 7023
  chr20:33464342-33464373
  hypo

SEQ ID NO: 56025 - DNA, 277 bp, Homo sapiens; identical to SEQ ID NO: 7024
  chr20:33464381-33464658
  hypo

SEQ ID NO: 56026 - DNA, 31 bp, Homo sapiens; identical to SEQ ID NO: 7025
  chr20:33464676-33464707
  hypo

SEQ ID NO: 56027 - DNA, 77 bp, Homo sapiens; identical to SEQ ID NO: 26505
  chr20:33544842-33544919
  hypo

SEQ ID NO: 56028 - DNA, 62 bp, Homo sapiens; identical to SEQ ID NO: 26507
  chr20:33572632-33572694
  hypo

SEQ ID NO: 56029 - DNA, 2 bp, Homo sapiens
  chr20:34041980-34041982
  hypo
aa

SEQ ID NO: 56030 - DNA, 50 bp, Homo sapiens; identical to SEQ ID NO: 26509
  chr20:34092135-34092185
  hypo

SEQ ID NO: 56031 - DNA, 2 bp, Homo sapiens
  chr20:34147977-34147979
  hypo
aa

SEQ ID NO: 56032 - DNA, 2 bp, Homo sapiens
  chr20:34312501-34312503
  hypo
tg

SEQ ID NO: 56033 - DNA, 185 bp, Homo sapiens; identical to SEQ ID NO: 7026
  chr20:34680179-34680364
  hypo

SEQ ID NO: 56034 - DNA, 370 bp, Homo sapiens; identical to SEQ ID NO: 7027
  chr20:34680572-34680942
  hypo

SEQ ID NO: 56035 - DNA, 31 bp, Homo sapiens; identical to SEQ ID NO: 26517
  chr20:34859595-34859626
  hypo

SEQ ID NO: 56036 - DNA, 26 bp, Homo sapiens
  chr20:35089001-35089027
  hypo
acaagagttgggtctgcgtctggcag

SEQ ID NO: 56037 - DNA, 46 bp, Homo sapiens; identical to SEQ ID NO: 26522
  chr20:35615274-35615320
  hypo

SEQ ID NO: 56038 - DNA, 31 bp, Homo sapiens; identical to SEQ ID NO: 26523
  chr20:35615341-35615372
  hypo

SEQ ID NO: 56039 - DNA, 2 bp, Homo sapiens
  chr20:35924129-35924131
  hypo
gt

SEQ ID NO: 56040 - DNA, 123 bp, Homo sapiens; identical to SEQ ID NO: 26526
  chr20:35987181-35987304
  hypo

SEQ ID NO: 56041 - DNA, 31 bp, Homo sapiens; identical to SEQ ID NO: 26527
  chr20:36567344-36567375
  hypo

SEQ ID NO: 56042 - DNA, 31 bp, Homo sapiens; identical to SEQ ID NO: 26528
  chr20:36627480-36627511
  hypo

SEQ ID NO: 56043 - DNA, 31 bp, Homo sapiens; identical to SEQ ID NO: 26530
  chr20:36759315-36759346
  hypo

SEQ ID NO: 56044 - DNA, 47 bp, Homo sapiens; identical to SEQ ID NO: 26531
  chr20:36760996-36761043
  hypo

SEQ ID NO: 56045 - DNA, 42 bp, Homo sapiens; identical to SEQ ID NO: 26532
  chr20:36766839-36766881
  hypo

SEQ ID NO: 56046 - DNA, 31 bp, Homo sapiens; identical to SEQ ID NO: 26533
  chr20:36770629-36770660
  hypo

SEQ ID NO: 56047 - DNA, 42 bp, Homo sapiens; identical to SEQ ID NO: 26534
  chr20:36770722-36770764
  hypo

SEQ ID NO: 56048 - DNA, 31 bp, Homo sapiens; identical to SEQ ID NO: 26535
  chr20:36774949-36774980
  hypo

SEQ ID NO: 56049 - DNA, 31 bp, Homo sapiens; identical to SEQ ID NO: 26536
  chr20:36802981-36803012
  hypo

SEQ ID NO: 56050 - DNA, 31 bp, Homo sapiens; identical to SEQ ID NO: 26537
  chr20:36803017-36803048
  hypo

SEQ ID NO: 56051 - DNA, 31 bp, Homo sapiens; identical to SEQ ID NO: 26538
  chr20:36848110-36848141
  hypo

SEQ ID NO: 56052 - DNA, 31 bp, Homo sapiens; identical to SEQ ID NO: 26539
  chr20:36992908-36992939
  hypo

SEQ ID NO: 56053 - DNA, 31 bp, Homo sapiens; identical to SEQ ID NO: 26540
  chr20:37145083-37145114
  hypo

SEQ ID NO: 56054 - DNA, 31 bp, Homo sapiens; identical to SEQ ID NO: 26541
  chr20:37145122-37145153
  hypo

SEQ ID NO: 56055 - DNA, 31 bp, Homo sapiens; identical to SEQ ID NO: 26542
  chr20:37145166-37145197
  hypo

SEQ ID NO: 56056 - DNA, 55 bp, Homo sapiens; identical to SEQ ID NO: 26543
  chr20:37145206-37145261
  hypo

SEQ ID NO: 56057 - DNA, 66 bp, Homo sapiens; identical to SEQ ID NO: 7037
  chr20:37274777-37274843
  hypo

SEQ ID NO: 56058 - DNA, 57 bp, Homo sapiens; identical to SEQ ID NO: 7038
  chr20:37274850-37274907
  hypo

SEQ ID NO: 56059 - DNA, 31 bp, Homo sapiens; identical to SEQ ID NO: 26555
  chr20:37622329-37622360
  hypo

SEQ ID NO: 56060 - DNA, 31 bp, Homo sapiens; identical to SEQ ID NO: 26556
  chr20:37622383-37622414
  hypo

SEQ ID NO: 56061 - DNA, 31 bp, Homo sapiens; identical to SEQ ID NO: 26557
  chr20:39989812-39989843
  hypo

SEQ ID NO: 56062 - DNA, 31 bp, Homo sapiens; identical to SEQ ID NO: 26558
  chr20:39989850-39989881
  hypo

SEQ ID NO: 56063 - DNA, 31 bp, Homo sapiens; identical to SEQ ID NO: 26559
  chr20:39989910-39989941
  hypo

SEQ ID NO: 56064 - DNA, 31 bp, Homo sapiens; identical to SEQ ID NO: 26560
  chr20:39991104-39991135
  hypo

SEQ ID NO: 56065 - DNA, 2 bp, Homo sapiens
  chr20:40321458-40321460
  hypo
gc

SEQ ID NO: 56066 - DNA, 34 bp, Homo sapiens; identical to SEQ ID NO: 7051
  chr20:40321598-40321632
  hypo

SEQ ID NO: 56067 - DNA, 2 bp, Homo sapiens
  chr20:42088630-42088632
  hypo
ga

SEQ ID NO: 56068 - DNA, 21 bp, Homo sapiens
  chr20:42088765-42088786
  hypo
atgaagcgtgctttggacaaa

SEQ ID NO: 56069 - DNA, 31 bp, Homo sapiens; identical to SEQ ID NO: 26565
  chr20:42192720-42192751
  hypo

SEQ ID NO: 56070 - DNA, 31 bp, Homo sapiens; identical to SEQ ID NO: 26566
  chr20:42192764-42192795
  hypo

SEQ ID NO: 56071 - DNA, 54 bp, Homo sapiens; identical to SEQ ID NO: 26567
  chr20:42192810-42192864
  hypo

SEQ ID NO: 56072 - DNA, 31 bp, Homo sapiens; identical to SEQ ID NO: 26571
  chr20:42314848-42314879
  hypo

SEQ ID NO: 56073 - DNA, 31 bp, Homo sapiens; identical to SEQ ID NO: 26572
  chr20:42314895-42314926
  hypo

SEQ ID NO: 56074 - DNA, 31 bp, Homo sapiens; identical to SEQ ID NO: 26573
  chr20:42314973-42315004
  hypo

SEQ ID NO: 56075 - DNA, 2 bp, Homo sapiens
  chr20:42931308-42931310
  hypo
ta

SEQ ID NO: 56076 - DNA, 31 bp, Homo sapiens; identical to SEQ ID NO: 26576
  chr20:42931346-42931377
  hypo

SEQ ID NO: 56077 - DNA, 60 bp, Homo sapiens; identical to SEQ ID NO: 26577
  chr20:42931388-42931448
  hypo

SEQ ID NO: 56078 - DNA, 31 bp, Homo sapiens; identical to SEQ ID NO: 26578
  chr20:43019102-43019133
  hypo

SEQ ID NO: 56079 - DNA, 38 bp, Homo sapiens; identical to SEQ ID NO: 26579
  chr20:43019162-43019200
  hypo

SEQ ID NO: 56080 - DNA, 61 bp, Homo sapiens; identical to SEQ ID NO: 26580
  chr20:43019237-43019298
  hypo

SEQ ID NO: 56081 - DNA, 31 bp, Homo sapiens; identical to SEQ ID NO: 26581
  chr20:43047810-43047841
  hypo

SEQ ID NO: 56082 - DNA, 54 bp, Homo sapiens; identical to SEQ ID NO: 26582
  chr20:43356085-43356139
  hypo

SEQ ID NO: 56083 - DNA, 48 bp, Homo sapiens; identical to SEQ ID NO: 26583
  chr20:43356237-43356285
  hypo

SEQ ID NO: 56084 - DNA, 31 bp, Homo sapiens; identical to SEQ ID NO: 26585
  chr20:43963003-43963034
  hypo

SEQ ID NO: 56085 - DNA, 103 bp, Homo sapiens; identical to SEQ ID NO: 7053
  chr20:43976985-43977088
  hypo

SEQ ID NO: 56086 - DNA, 40 bp, Homo sapiens; identical to SEQ ID NO: 7054
  chr20:43977172-43977212
  hypo

SEQ ID NO: 56087 - DNA, 74 bp, Homo sapiens; identical to SEQ ID NO: 7055
  chr20:44462766-44462840
  hypo

SEQ ID NO: 56088 - DNA, 18 bp, Homo sapiens
  chr20:44602322-44602340
  hypo
attgccttccagcctggg

SEQ ID NO: 56089 - DNA, 37 bp, Homo sapiens; identical to SEQ ID NO: 26597
  chr20:44602404-44602441
  hypo

SEQ ID NO: 56090 - DNA, 31 bp, Homo sapiens; identical to SEQ ID NO: 26599
  chr20:45833393-45833424
  hypo

SEQ ID NO: 56091 - DNA, 31 bp, Homo sapiens; identical to SEQ ID NO: 26600
  chr20:45837914-45837945
  hypo

SEQ ID NO: 56092 - DNA, 31 bp, Homo sapiens; identical to SEQ ID NO: 26605
  chr20:46013732-46013763
  hypo

SEQ ID NO: 56093 - DNA, 2 bp, Homo sapiens
  chr20:47247200-47247202
  hypo
ag

SEQ ID NO: 56094 - DNA, 7 bp, Homo sapiens
  chr20:47252918-47252925
  hypo
tgggcaa

SEQ ID NO: 56095 - DNA, 47 bp, Homo sapiens; identical to SEQ ID NO: 26608
  chr20:47268238-47268285
  hypo

SEQ ID NO: 56096 - DNA, 40 bp, Homo sapiens; identical to SEQ ID NO: 26610
  chr20:47490311-47490351
  hypo

SEQ ID NO: 56097 - DNA, 31 bp, Homo sapiens; identical to SEQ ID NO: 26611
  chr20:47490384-47490415
  hypo

SEQ ID NO: 56098 - DNA, 31 bp, Homo sapiens; identical to SEQ ID NO: 26612
  chr20:47490423-47490454
  hypo

SEQ ID NO: 56099 - DNA, 31 bp, Homo sapiens; identical to SEQ ID NO: 7060
  chr20:47663142-47663173
  hypo

SEQ ID NO: 56100 - DNA, 34 bp, Homo sapiens; identical to SEQ ID NO: 26615
  chr20:47699047-47699081
  hypo

SEQ ID NO: 56101 - DNA, 2 bp, Homo sapiens
  chr20:47905349-47905351
  hypo
tt

SEQ ID NO: 56102 - DNA, 31 bp, Homo sapiens; identical to SEQ ID NO: 26623
  chr20:48157030-48157061
  hypo

SEQ ID NO: 56103 - DNA, 31 bp, Homo sapiens; identical to SEQ ID NO: 7061
  chr20:48195046-48195077
  hypo

SEQ ID NO: 56104 - DNA, 31 bp, Homo sapiens; identical to SEQ ID NO: 26625
  chr20:48350400-48350431
  hypo

SEQ ID NO: 56105 - DNA, 31 bp, Homo sapiens; identical to SEQ ID NO: 26626
  chr20:48673064-48673095
  hypo

SEQ ID NO: 56106 - DNA, 39 bp, Homo sapiens; identical to SEQ ID NO: 26627
  chr20:48673853-48673892
  hypo

SEQ ID NO: 56107 - DNA, 2 bp, Homo sapiens
  chr20:48673895-48673897
  hypo
tt

SEQ ID NO: 56108 - DNA, 42 bp, Homo sapiens; identical to SEQ ID NO: 7062
  chr20:48771161-48771203
  hypo

SEQ ID NO: 56109 - DNA, 43 bp, Homo sapiens; identical to SEQ ID NO: 7063
  chr20:48771236-48771279
  hypo

SEQ ID NO: 56110 - DNA, 31 bp, Homo sapiens; identical to SEQ ID NO: 7064
  chr20:48771291-48771322
  hypo

SEQ ID NO: 56111 - DNA, 31 bp, Homo sapiens; identical to SEQ ID NO: 26636
  chr20:48791884-48791915
  hypo

SEQ ID NO: 56112 - DNA, 40 bp, Homo sapiens; identical to SEQ ID NO: 26637
  chr20:48853283-48853323
  hypo

SEQ ID NO: 56113 - DNA, 31 bp, Homo sapiens; identical to SEQ ID NO: 26638
  chr20:48887085-48887116
  hypo

SEQ ID NO: 56114 - DNA, 31 bp, Homo sapiens; identical to SEQ ID NO: 26639
  chr20:48916106-48916137
  hypo

SEQ ID NO: 56115 - DNA, 31 bp, Homo sapiens; identical to SEQ ID NO: 26640
  chr20:48916376-48916407
  hypo

SEQ ID NO: 56116 - DNA, 52 bp, Homo sapiens; identical to SEQ ID NO: 26641
  chr20:48968283-48968335
  hypo

SEQ ID NO: 56117 - DNA, 31 bp, Homo sapiens; identical to SEQ ID NO: 26642
  chr20:48968393-48968424
  hypo

SEQ ID NO: 56118 - DNA, 31 bp, Homo sapiens; identical to SEQ ID NO: 26643
  chr20:48975510-48975541
  hypo

SEQ ID NO: 56119 - DNA, 31 bp, Homo sapiens; identical to SEQ ID NO: 26644
  chr20:48975789-48975820
  hypo

SEQ ID NO: 56120 - DNA, 31 bp, Homo sapiens; identical to SEQ ID NO: 26645
  chr20:48988162-48988193
  hypo

SEQ ID NO: 56121 - DNA, 55 bp, Homo sapiens; identical to SEQ ID NO: 26646
  chr20:49008037-49008092
  hypo

SEQ ID NO: 56122 - DNA, 31 bp, Homo sapiens; identical to SEQ ID NO: 26647
  chr20:49013290-49013321
  hypo

SEQ ID NO: 56123 - DNA, 31 bp, Homo sapiens; identical to SEQ ID NO: 26648
  chr20:49046545-49046576
  hypo

SEQ ID NO: 56124 - DNA, 48 bp, Homo sapiens; identical to SEQ ID NO: 26649
  chr20:49046593-49046641
  hypo

SEQ ID NO: 56125 - DNA, 31 bp, Homo sapiens; identical to SEQ ID NO: 26650
  chr20:49054049-49054080
  hypo

SEQ ID NO: 56126 - DNA, 31 bp, Homo sapiens; identical to SEQ ID NO: 7065
  chr20:49131961-49131992
  hypo

SEQ ID NO: 56127 - DNA, 2 bp, Homo sapiens
  chr20:49194286-49194288
  hypo
ac

SEQ ID NO: 56128 - DNA, 31 bp, Homo sapiens; identical to SEQ ID NO: 26653
  chr20:49197047-49197078
  hypo

SEQ ID NO: 56129 - DNA, 2 bp, Homo sapiens
  chr20:49204178-49204180
  hypo
ta

SEQ ID NO: 56130 - DNA, 31 bp, Homo sapiens; identical to SEQ ID NO: 26657
  chr20:49222908-49222939
  hypo

SEQ ID NO: 56131 - DNA, 49 bp, Homo sapiens; identical to SEQ ID NO: 26658
  chr20:49223730-49223779
  hypo

SEQ ID NO: 56132 - DNA, 31 bp, Homo sapiens; identical to SEQ ID NO: 26659
  chr20:49224077-49224108
  hypo

SEQ ID NO: 56133 - DNA, 31 bp, Homo sapiens; identical to SEQ ID NO: 26660
  chr20:49224899-49224930
  hypo

SEQ ID NO: 56134 - DNA, 130 bp, Homo sapiens; identical to SEQ ID NO: 26661
  chr20:49224950-49225080
  hypo

SEQ ID NO: 56135 - DNA, 60 bp, Homo sapiens; identical to SEQ ID NO: 26662
  chr20:49225088-49225148
  hypo

SEQ ID NO: 56136 - DNA, 122 bp, Homo sapiens; identical to SEQ ID NO: 26663
  chr20:49225157-49225279
  hypo

SEQ ID NO: 56137 - DNA, 31 bp, Homo sapiens; identical to SEQ ID NO: 26664
  chr20:49225315-49225346
  hypo

SEQ ID NO: 56138 - DNA, 31 bp, Homo sapiens; identical to SEQ ID NO: 26665
  chr20:49225975-49226006
  hypo

SEQ ID NO: 56139 - DNA, 47 bp, Homo sapiens; identical to SEQ ID NO: 7067
  chr20:49226026-49226073
  hypo

SEQ ID NO: 56140 - DNA, 61 bp, Homo sapiens; identical to SEQ ID NO: 7068
  chr20:49226085-49226146
  hypo

SEQ ID NO: 56141 - DNA, 89 bp, Homo sapiens; identical to SEQ ID NO: 7069
  chr20:49226147-49226236
  hypo

SEQ ID NO: 56142 - DNA, 31 bp, Homo sapiens; identical to SEQ ID NO: 26669
  chr20:49228230-49228261
  hypo

SEQ ID NO: 56143 - DNA, 31 bp, Homo sapiens; identical to SEQ ID NO: 26670
  chr20:49230487-49230518
  hypo

SEQ ID NO: 56144 - DNA, 35 bp, Homo sapiens; identical to SEQ ID NO: 26671
  chr20:49230521-49230556
  hypo

SEQ ID NO: 56145 - DNA, 60 bp, Homo sapiens; identical to SEQ ID NO: 26672
  chr20:49236428-49236488
  hypo

SEQ ID NO: 56146 - DNA, 74 bp, Homo sapiens; identical to SEQ ID NO: 26674
  chr20:49244348-49244422
  hypo

SEQ ID NO: 56147 - DNA, 31 bp, Homo sapiens; identical to SEQ ID NO: 26675
  chr20:49247322-49247353
  hypo

SEQ ID NO: 56148 - DNA, 35 bp, Homo sapiens; identical to SEQ ID NO: 26677
  chr20:49264293-49264328
  hypo

SEQ ID NO: 56149 - DNA, 31 bp, Homo sapiens; identical to SEQ ID NO: 26678
  chr20:49264413-49264444
  hypo

SEQ ID NO: 56150 - DNA, 78 bp, Homo sapiens; identical to SEQ ID NO: 26680
  chr20:49282238-49282316
  hypo

SEQ ID NO: 56151 - DNA, 31 bp, Homo sapiens; identical to SEQ ID NO: 26681
  chr20:49285098-49285129
  hypo

SEQ ID NO: 56152 - DNA, 31 bp, Homo sapiens; identical to SEQ ID NO: 26683
  chr20:49289682-49289713
  hypo

SEQ ID NO: 56153 - DNA, 31 bp, Homo sapiens; identical to SEQ ID NO: 26684
  chr20:49289765-49289796
  hypo

SEQ ID NO: 56154 - DNA, 44 bp, Homo sapiens; identical to SEQ ID NO: 26685
  chr20:49289819-49289863
  hypo

SEQ ID NO: 56155 - DNA, 31 bp, Homo sapiens; identical to SEQ ID NO: 26686
  chr20:49294666-49294697
  hypo

SEQ ID NO: 56156 - DNA, 31 bp, Homo sapiens; identical to SEQ ID NO: 26687
  chr20:49318932-49318963
  hypo

SEQ ID NO: 56157 - DNA, 40 bp, Homo sapiens; identical to SEQ ID NO: 26689
  chr20:49331493-49331533
  hypo

SEQ ID NO: 56158 - DNA, 35 bp, Homo sapiens; identical to SEQ ID NO: 26692
  chr20:49345550-49345585
  hypo

SEQ ID NO: 56159 - DNA, 2 bp, Homo sapiens
  chr20:49345670-49345672
  hypo
gg

SEQ ID NO: 56160 - DNA, 20 bp, Homo sapiens
  chr20:49345727-49345747
  hypo
acccacgaacttcctgataa

SEQ ID NO: 56161 - DNA, 31 bp, Homo sapiens; identical to SEQ ID NO: 26701
  chr20:49398687-49398718
  hypo

SEQ ID NO: 56162 - DNA, 31 bp, Homo sapiens; identical to SEQ ID NO: 26702
  chr20:49399781-49399812
  hypo

SEQ ID NO: 56163 - DNA, 63 bp, Homo sapiens; identical to SEQ ID NO: 26703
  chr20:49467236-49467299
  hypo

SEQ ID NO: 56164 - DNA, 31 bp, Homo sapiens; identical to SEQ ID NO: 26704
  chr20:49467312-49467343
  hypo

SEQ ID NO: 56165 - DNA, 31 bp, Homo sapiens; identical to SEQ ID NO: 26705
  chr20:49467399-49467430
  hypo

SEQ ID NO: 56166 - DNA, 31 bp, Homo sapiens; identical to SEQ ID NO: 26706
  chr20:49468872-49468903
  hypo

SEQ ID NO: 56167 - DNA, 31 bp, Homo sapiens; identical to SEQ ID NO: 7072
  chr20:49574742-49574773
  hypo

SEQ ID NO: 56168 - DNA, 31 bp, Homo sapiens; identical to SEQ ID NO: 26708
  chr20:49810091-49810122
  hypo

SEQ ID NO: 56169 - DNA, 42 bp, Homo sapiens; identical to SEQ ID NO: 26709
  chr20:49948350-49948392
  hypo

SEQ ID NO: 56170 - DNA, 78 bp, Homo sapiens; identical to SEQ ID NO: 26710
  chr20:50199882-50199960
  hypo

SEQ ID NO: 56171 - DNA, 31 bp, Homo sapiens; identical to SEQ ID NO: 26712
  chr20:50293890-50293921
  hypo

SEQ ID NO: 56172 - DNA, 82 bp, Homo sapiens; identical to SEQ ID NO: 26713
  chr20:50294009-50294091
  hypo

SEQ ID NO: 56173 - DNA, 31 bp, Homo sapiens; identical to SEQ ID NO: 26714
  chr20:50296832-50296863
  hypo

SEQ ID NO: 56174 - DNA, 31 bp, Homo sapiens; identical to SEQ ID NO: 26715
  chr20:50309616-50309647
  hypo

SEQ ID NO: 56175 - DNA, 31 bp, Homo sapiens; identical to SEQ ID NO: 26717
  chr20:50326110-50326141
  hypo

SEQ ID NO: 56176 - DNA, 42 bp, Homo sapiens; identical to SEQ ID NO: 26718
  chr20:50346532-50346574
  hypo

SEQ ID NO: 56177 - DNA, 297 bp, Homo sapiens; identical to SEQ ID NO: 7076
  chr20:50383734-50384031
  hypo

SEQ ID NO: 56178 - DNA, 105 bp, Homo sapiens; identical to SEQ ID NO: 7085
  chr20:50384933-50385038
  hypo

SEQ ID NO: 56179 - DNA, 31 bp, Homo sapiens; identical to SEQ ID NO: 26721
  chr20:50390635-50390666
  hypo

SEQ ID NO: 56180 - DNA, 31 bp, Homo sapiens; identical to SEQ ID NO: 26722
  chr20:50405411-50405442
  hypo

SEQ ID NO: 56181 - DNA, 35 bp, Homo sapiens; identical to SEQ ID NO: 26723
  chr20:50405456-50405491
  hypo

SEQ ID NO: 56182 - DNA, 31 bp, Homo sapiens; identical to SEQ ID NO: 26724
  chr20:50407492-50407523
  hypo

SEQ ID NO: 56183 - DNA, 31 bp, Homo sapiens; identical to SEQ ID NO: 26725
  chr20:50411962-50411993
  hypo

SEQ ID NO: 56184 - DNA, 31 bp, Homo sapiens; identical to SEQ ID NO: 26726
  chr20:50430800-50430831
  hypo

SEQ ID NO: 56185 - DNA, 39 bp, Homo sapiens; identical to SEQ ID NO: 26727
  chr20:50441825-50441864
  hypo

SEQ ID NO: 56186 - DNA, 31 bp, Homo sapiens; identical to SEQ ID NO: 26728
  chr20:50462772-50462803
  hypo

SEQ ID NO: 56187 - DNA, 31 bp, Homo sapiens; identical to SEQ ID NO: 26729
  chr20:50468578-50468609
  hypo

SEQ ID NO: 56188 - DNA, 31 bp, Homo sapiens; identical to SEQ ID NO: 26731
  chr20:50557513-50557544
  hypo

SEQ ID NO: 56189 - DNA, 43 bp, Homo sapiens; identical to SEQ ID NO: 26732
  chr20:50591573-50591616
  hypo

SEQ ID NO: 56190 - DNA, 35 bp, Homo sapiens; identical to SEQ ID NO: 26733
  chr20:50805265-50805300
  hypo

SEQ ID NO: 56191 - DNA, 31 bp, Homo sapiens; identical to SEQ ID NO: 26734
  chr20:50805902-50805933
  hypo

SEQ ID NO: 56192 - DNA, 31 bp, Homo sapiens; identical to SEQ ID NO: 26735
  chr20:52214964-52214995
  hypo

SEQ ID NO: 56193 - DNA, 31 bp, Homo sapiens; identical to SEQ ID NO: 26736
  chr20:52275977-52276008
  hypo

SEQ ID NO: 56194 - DNA, 35 bp, Homo sapiens; identical to SEQ ID NO: 26737
  chr20:52305007-52305042
  hypo

SEQ ID NO: 56195 - DNA, 31 bp, Homo sapiens; identical to SEQ ID NO: 26738
  chr20:52374170-52374201
  hypo

SEQ ID NO: 56196 - DNA, 31 bp, Homo sapiens; identical to SEQ ID NO: 26739
  chr20:52374209-52374240
  hypo

SEQ ID NO: 56197 - DNA, 31 bp, Homo sapiens; identical to SEQ ID NO: 26740
  chr20:52401840-52401871
  hypo

SEQ ID NO: 56198 - DNA, 31 bp, Homo sapiens; identical to SEQ ID NO: 26741
  chr20:52429880-52429911
  hypo

SEQ ID NO: 56199 - DNA, 47 bp, Homo sapiens; identical to SEQ ID NO: 26742
  chr20:52481242-52481289
  hypo

SEQ ID NO: 56200 - DNA, 49 bp, Homo sapiens; identical to SEQ ID NO: 26743
  chr20:52481376-52481425
  hypo

SEQ ID NO: 56201 - DNA, 47 bp, Homo sapiens; identical to SEQ ID NO: 26745
  chr20:52758896-52758943
  hypo

SEQ ID NO: 56202 - DNA, 31 bp, Homo sapiens; identical to SEQ ID NO: 26746
  chr20:52758944-52758975
  hypo

SEQ ID NO: 56203 - DNA, 168 bp, Homo sapiens; identical to SEQ ID NO: 7089
  chr20:54934125-54934293
  hypo

SEQ ID NO: 56204 - DNA, 35 bp, Homo sapiens; identical to SEQ ID NO: 7090
  chr20:54934305-54934340
  hypo

SEQ ID NO: 56205 - DNA, 31 bp, Homo sapiens; identical to SEQ ID NO: 26751
  chr20:55692779-55692810
  hypo

SEQ ID NO: 56206 - DNA, 104 bp, Homo sapiens; identical to SEQ ID NO: 26752
  chr20:55692828-55692932
  hypo

SEQ ID NO: 56207 - DNA, 40 bp, Homo sapiens; identical to SEQ ID NO: 26753
  chr20:55797061-55797101
  hypo

SEQ ID NO: 56208 - DNA, 2 bp, Homo sapiens
  chr20:55925380-55925382
  hypo
ta

SEQ ID NO: 56209 - DNA, 2 bp, Homo sapiens
  chr20:56271494-56271496
  hypo
tt

SEQ ID NO: 56210 - DNA, 31 bp, Homo sapiens; identical to SEQ ID NO: 7103
  chr20:56784986-56785017
  hypo

SEQ ID NO: 56211 - DNA, 47 bp, Homo sapiens; identical to SEQ ID NO: 7104
  chr20:56785103-56785150
  hypo

SEQ ID NO: 56212 - DNA, 43 bp, Homo sapiens; identical to SEQ ID NO: 7105
  chr20:56785202-56785245
  hypo

SEQ ID NO: 56213 - DNA, 31 bp, Homo sapiens; identical to SEQ ID NO: 26761
  chr20:56977724-56977755
  hypo

SEQ ID NO: 56214 - DNA, 31 bp, Homo sapiens; identical to SEQ ID NO: 26762
  chr20:56977769-56977800
  hypo

SEQ ID NO: 56215 - DNA, 40 bp, Homo sapiens; identical to SEQ ID NO: 26763
  chr20:56977809-56977849
  hypo

SEQ ID NO: 56216 - DNA, 127 bp, Homo sapiens; identical to SEQ ID NO: 40342
  chr20:57225466-57225593
  hypo

SEQ ID NO: 56217 - DNA, 2 bp, Homo sapiens
  chr20:57268844-57268846
  hypo
cc

SEQ ID NO: 56218 - DNA, 61 bp, Homo sapiens; identical to SEQ ID NO: 26770
  chr20:57577806-57577867
  hypo

SEQ ID NO: 56219 - DNA, 2 bp, Homo sapiens
  chr20:58514096-58514098
  hypo
tg

SEQ ID NO: 56220 - DNA, 129 bp, Homo sapiens; identical to SEQ ID NO: 40344
  chr20:58514400-58514529
  hypo

SEQ ID NO: 56221 - DNA, 2 bp, Homo sapiens
  chr20:60477305-60477307
  hypo
gc

SEQ ID NO: 56222 - DNA, 50 bp, Homo sapiens; identical to SEQ ID NO: 26778
  chr20:60494964-60495014
  hypo

SEQ ID NO: 56223 - DNA, 31 bp, Homo sapiens; identical to SEQ ID NO: 26779
  chr20:60541625-60541656
  hypo

SEQ ID NO: 56224 - DNA, 59 bp, Homo sapiens
  chr20:60552007-60552066
  hypo
agaagcatagctgctgcgtgccagctcctgtggagagctctggcggtttcagctgatga

SEQ ID NO: 56225 - DNA, 7 bp, Homo sapiens
  chr20:60552337-60552344
  hypo
acaactc

SEQ ID NO: 56226 - DNA, 31 bp, Homo sapiens; identical to SEQ ID NO: 26783
  chr20:60552376-60552407
  hypo

SEQ ID NO: 56227 - DNA, 98 bp, Homo sapiens; identical to SEQ ID NO: 26784
  chr20:60563834-60563932
  hypo

SEQ ID NO: 56228 - DNA, 2 bp, Homo sapiens
  chr20:60635092-60635094
  hypo
tc

SEQ ID NO: 56229 - DNA, 19 bp, Homo sapiens
  chr20:60781271-60781290
  hypo
gtctgtatgcagtgcccgg

SEQ ID NO: 56230 - DNA, 56 bp, Homo sapiens; identical to SEQ ID NO: 26797
  chr20:60781649-60781705
  hypo

SEQ ID NO: 56231 - DNA, 31 bp, Homo sapiens; identical to SEQ ID NO: 26798
  chr20:60781718-60781749
  hypo

SEQ ID NO: 56232 - DNA, 31 bp, Homo sapiens; identical to SEQ ID NO: 26799
  chr20:60781760-60781791
  hypo

SEQ ID NO: 56233 - DNA, 31 bp, Homo sapiens; identical to SEQ ID NO: 26800
  chr20:60842461-60842492
  hypo

SEQ ID NO: 56234 - DNA, 31 bp, Homo sapiens; identical to SEQ ID NO: 26801
  chr20:60842500-60842531
  hypo

SEQ ID NO: 56235 - DNA, 50 bp, Homo sapiens; identical to SEQ ID NO: 26802
  chr20:60842567-60842617
  hypo

SEQ ID NO: 56236 - DNA, 34 bp, Homo sapiens; identical to SEQ ID NO: 26803
  chr20:60866894-60866928
  hypo

SEQ ID NO: 56237 - DNA, 41 bp, Homo sapiens; identical to SEQ ID NO: 26804
  chr20:60905901-60905942
  hypo

SEQ ID NO: 56238 - DNA, 2 bp, Homo sapiens
  chr20:60905950-60905952
  hypo
gg

SEQ ID NO: 56239 - DNA, 31 bp, Homo sapiens; identical to SEQ ID NO: 26806
  chr20:60912468-60912499
  hypo

SEQ ID NO: 56240 - DNA, 56 bp, Homo sapiens; identical to SEQ ID NO: 26807
  chr20:60912906-60912962
  hypo

SEQ ID NO: 56241 - DNA, 44 bp, Homo sapiens; identical to SEQ ID NO: 26808
  chr20:60913135-60913179
  hypo

SEQ ID NO: 56242 - DNA, 52 bp, Homo sapiens; identical to SEQ ID NO: 26809
  chr20:60913468-60913520
  hypo

SEQ ID NO: 56243 - DNA, 31 bp, Homo sapiens; identical to SEQ ID NO: 26814
  chr20:60926143-60926174
  hypo

SEQ ID NO: 56244 - DNA, 84 bp, Homo sapiens; identical to SEQ ID NO: 7116
  chr20:60941670-60941754
  hypo

SEQ ID NO: 56245 - DNA, 40 bp, Homo sapiens; identical to SEQ ID NO: 7117
  chr20:60941797-60941837
  hypo

SEQ ID NO: 56246 - DNA, 31 bp, Homo sapiens; identical to SEQ ID NO: 7118
  chr20:60941840-60941871
  hypo

SEQ ID NO: 56247 - DNA, 31 bp, Homo sapiens; identical to SEQ ID NO: 7119
  chr20:60941883-60941914
  hypo

SEQ ID NO: 56248 - DNA, 36 bp, Homo sapiens
  chr20:60953645-60953681
  hypo
tccagggaagcgactccgtcccgcttggcctcagtc

SEQ ID NO: 56249 - DNA, 31 bp, Homo sapiens; identical to SEQ ID NO: 26822
  chr20:60970998-60971029
  hypo

SEQ ID NO: 56250 - DNA, 99 bp, Homo sapiens; identical to SEQ ID NO: 26823
  chr20:60982951-60983050
  hypo

SEQ ID NO: 56251 - DNA, 64 bp, Homo sapiens
  chr20:60984130-60984194
  hypo
agccaacctggcctgcgggcagtgtgtagggaacacacggcttttgtttcgtgtgattctggag

SEQ ID NO: 56252 - DNA, 31 bp, Homo sapiens; identical to SEQ ID NO: 26827
  chr20:61024982-61025013
  hypo

SEQ ID NO: 56253 - DNA, 2 bp, Homo sapiens
  chr20:61270287-61270289
  hypo
ga

SEQ ID NO: 56254 - DNA, 31 bp, Homo sapiens; identical to SEQ ID NO: 26829
  chr20:61275876-61275907
  hypo

SEQ ID NO: 56255 - DNA, 31 bp, Homo sapiens; identical to SEQ ID NO: 26833
  chr20:61297786-61297817
  hypo

SEQ ID NO: 56256 - DNA, 55 bp, Homo sapiens; identical to SEQ ID NO: 26834
  chr20:61297824-61297879
  hypo

SEQ ID NO: 56257 - DNA, 2 bp, Homo sapiens
  chr20:61412186-61412188
  hypo
ag

SEQ ID NO: 56258 - DNA, 31 bp, Homo sapiens; identical to SEQ ID NO: 26838
  chr20:61471156-61471187
  hypo

SEQ ID NO: 56259 - DNA, 70 bp, Homo sapiens
  chr20:61472199-61472269
  hypo
ctcggccgccgactggacgcgcgggccttgccagcgagcaccctcatcgggctgtcgcctgacagcatac

SEQ ID NO: 56260 - DNA, 31 bp, Homo sapiens; identical to SEQ ID NO: 26840
  chr20:61472340-61472371
  hypo

SEQ ID NO: 56261 - DNA, 58 bp, Homo sapiens; identical to SEQ ID NO: 26841
  chr20:61482262-61482320
  hypo

SEQ ID NO: 56262 - DNA, 114 bp, Homo sapiens; identical to SEQ ID NO: 7123
  chr20:61492901-61493015
  hypo

SEQ ID NO: 56263 - DNA, 35 bp, Homo sapiens
  chr20:61506536-61506571
  hypo
gtgaattcatcggggagccccgcaccctcacctgc

SEQ ID NO: 56264 - DNA, 2 bp, Homo sapiens
  chr20:61567397-61567399
  hypo
ga

SEQ ID NO: 56265 - DNA, 31 bp, Homo sapiens; identical to SEQ ID NO: 26847
  chr20:61576608-61576639
  hypo

SEQ ID NO: 56266 - DNA, 2 bp, Homo sapiens
  chr20:61765607-61765609
  hypo
gc

SEQ ID NO: 56267 - DNA, 31 bp, Homo sapiens; identical to SEQ ID NO: 26850
  chr20:61819883-61819914
  hypo

SEQ ID NO: 56268 - DNA, 62 bp, Homo sapiens; identical to SEQ ID NO: 26851
  chr20:61819940-61820002
  hypo

SEQ ID NO: 56269 - DNA, 31 bp, Homo sapiens; identical to SEQ ID NO: 26852
  chr20:61820007-61820038
  hypo

SEQ ID NO: 56270 - DNA, 31 bp, Homo sapiens; identical to SEQ ID NO: 26853
  chr20:61835627-61835658
  hypo

SEQ ID NO: 56271 - DNA, 59 bp, Homo sapiens; identical to SEQ ID NO: 26854
  chr20:61838285-61838344
  hypo

SEQ ID NO: 56272 - DNA, 56 bp, Homo sapiens; identical to SEQ ID NO: 26856
  chr20:61895762-61895818
  hypo

SEQ ID NO: 56273 - DNA, 38 bp, Homo sapiens; identical to SEQ ID NO: 26857
  chr20:61909561-61909599
  hypo

SEQ ID NO: 56274 - DNA, 31 bp, Homo sapiens; identical to SEQ ID NO: 26858
  chr20:61973524-61973555
  hypo

SEQ ID NO: 56275 - DNA, 41 bp, Homo sapiens; identical to SEQ ID NO: 26859
  chr20:61973561-61973602
  hypo

SEQ ID NO: 56276 - DNA, 31 bp, Homo sapiens; identical to SEQ ID NO: 26865
  chr20:62127228-62127259
  hypo

SEQ ID NO: 56277 - DNA, 43 bp, Homo sapiens; identical to SEQ ID NO: 7127
  chr20:62152086-62152129
  hypo

SEQ ID NO: 56278 - DNA, 60 bp, Homo sapiens
  chr20:62153150-62153210
  hypo
cgcctgtggcctggctcgggacgccccgaggaagcagcccggcggtcagtccagcacagc

SEQ ID NO: 56279 - DNA, 2 bp, Homo sapiens
  chr20:62165578-62165580
  hypo
gg

SEQ ID NO: 56280 - DNA, 58 bp, Homo sapiens; identical to SEQ ID NO: 26872
  chr20:62179511-62179569
  hypo

SEQ ID NO: 56281 - DNA, 38 bp, Homo sapiens; identical to SEQ ID NO: 26873
  chr20:62179571-62179609
  hypo

SEQ ID NO: 56282 - DNA, 31 bp, Homo sapiens; identical to SEQ ID NO: 26874
  chr20:62179624-62179655
  hypo

SEQ ID NO: 56283 - DNA, 2 bp, Homo sapiens
  chr20:62221318-62221320
  hypo
tt

SEQ ID NO: 56284 - DNA, 47 bp, Homo sapiens; identical to SEQ ID NO: 26877
  chr20:62221625-62221672
  hypo

SEQ ID NO: 56285 - DNA, 123 bp, Homo sapiens; identical to SEQ ID NO: 26878
  chr20:62221899-62222022
  hypo

SEQ ID NO: 56286 - DNA, 31 bp, Homo sapiens; identical to SEQ ID NO: 26879
  chr20:62266230-62266261
  hypo

SEQ ID NO: 56287 - DNA, 71 bp, Homo sapiens; identical to SEQ ID NO: 7128
  chr20:62273399-62273470
  hypo

SEQ ID NO: 56288 - DNA, 31 bp, Homo sapiens; identical to SEQ ID NO: 7129
  chr20:62273486-62273517
  hypo

SEQ ID NO: 56289 - DNA, 2 bp, Homo sapiens
  chr20:62320910-62320912
  hypo
cc

SEQ ID NO: 56290 - DNA, 44 bp, Homo sapiens; identical to SEQ ID NO: 26888
  chr20:62326588-62326632
  hypo

SEQ ID NO: 56291 - DNA, 31 bp, Homo sapiens; identical to SEQ ID NO: 26889
  chr20:62326672-62326703
  hypo

SEQ ID NO: 56292 - DNA, 31 bp, Homo sapiens; identical to SEQ ID NO: 26890
  chr20:62329295-62329326
  hypo

SEQ ID NO: 56293 - DNA, 36 bp, Homo sapiens; identical to SEQ ID NO: 26899
  chr20:62440398-62440434
  hypo

SEQ ID NO: 56294 - DNA, 8 bp, Homo sapiens
  chr20:62487799-62487807
  hypo
aatacaga

SEQ ID NO: 56295 - DNA, 31 bp, Homo sapiens; identical to SEQ ID NO: 26903
  chr20:62560382-62560413
  hypo

SEQ ID NO: 56296 - DNA, 31 bp, Homo sapiens; identical to SEQ ID NO: 26904
  chr20:62562831-62562862
  hypo

SEQ ID NO: 56297 - DNA, 31 bp, Homo sapiens; identical to SEQ ID NO: 26905
  chr20:62576161-62576192
  hypo

SEQ ID NO: 56298 - DNA, 44 bp, Homo sapiens; identical to SEQ ID NO: 26906
  chr20:62576243-62576287
  hypo

SEQ ID NO: 56299 - DNA, 60 bp, Homo sapiens; identical to SEQ ID NO: 26907
  chr20:62578921-62578981
  hypo

SEQ ID NO: 56300 - DNA, 54 bp, Homo sapiens; identical to SEQ ID NO: 26908
  chr20:62583700-62583754
  hypo

SEQ ID NO: 56301 - DNA, 31 bp, Homo sapiens; identical to SEQ ID NO: 26909
  chr20:62583764-62583795
  hypo

SEQ ID NO: 56302 - DNA, 67 bp, Homo sapiens; identical to SEQ ID NO: 26910
  chr20:62583953-62584020
  hypo

SEQ ID NO: 56303 - DNA, 34 bp, Homo sapiens; identical to SEQ ID NO: 26911
  chr20:62598912-62598946
  hypo

SEQ ID NO: 56304 - DNA, 31 bp, Homo sapiens; identical to SEQ ID NO: 26912
  chr20:62608160-62608191
  hypo

SEQ ID NO: 56305 - DNA, 31 bp, Homo sapiens; identical to SEQ ID NO: 26913
  chr20:62608210-62608241
  hypo

SEQ ID NO: 56306 - DNA, 31 bp, Homo sapiens; identical to SEQ ID NO: 26914
  chr20:62608255-62608286
  hypo

SEQ ID NO: 56307 - DNA, 31 bp, Homo sapiens; identical to SEQ ID NO: 26916
  chr20:62646173-62646204
  hypo

SEQ ID NO: 56308 - DNA, 2 bp, Homo sapiens
  chr20:62662172-62662174
  hypo
ga

SEQ ID NO: 56309 - DNA, 21 bp, Homo sapiens
  chr20:62674084-62674105
  hypo
ttttctcgcgctggcgggcgg

SEQ ID NO: 56310 - DNA, 35 bp, Homo sapiens; identical to SEQ ID NO: 26920
  chr20:62705148-62705183
  hypo

SEQ ID NO: 56311 - DNA, 31 bp, Homo sapiens; identical to SEQ ID NO: 26924
  chr20:62859481-62859512
  hypo

SEQ ID NO: 56312 - DNA, 39 bp, Homo sapiens; identical to SEQ ID NO: 26925
  chr21:16383776-16383815
  hypo

SEQ ID NO: 56313 - DNA, 34 bp, Homo sapiens; identical to SEQ ID NO: 26926
  chr21:16408139-16408173
  hypo

SEQ ID NO: 56314 - DNA, 57 bp, Homo sapiens; identical to SEQ ID NO: 26927
  chr21:16408236-16408293
  hypo

SEQ ID NO: 56315 - DNA, 31 bp, Homo sapiens; identical to SEQ ID NO: 26928
  chr21:16747502-16747533
  hypo

SEQ ID NO: 56316 - DNA, 52 bp, Homo sapiens; identical to SEQ ID NO: 26929
  chr21:16747562-16747614
  hypo

SEQ ID NO: 56317 - DNA, 31 bp, Homo sapiens; identical to SEQ ID NO: 26930
  chr21:16747619-16747650
  hypo

SEQ ID NO: 56318 - DNA, 31 bp, Homo sapiens; identical to SEQ ID NO: 26931
  chr21:16747674-16747705
  hypo

SEQ ID NO: 56319 - DNA, 31 bp, Homo sapiens; identical to SEQ ID NO: 26932
  chr21:17092853-17092884
  hypo

SEQ ID NO: 56320 - DNA, 84 bp, Homo sapiens; identical to SEQ ID NO: 7147
  chr21:17102747-17102831
  hypo

SEQ ID NO: 56321 - DNA, 31 bp, Homo sapiens; identical to SEQ ID NO: 26934
  chr21:18824915-18824946
  hypo

SEQ ID NO: 56322 - DNA, 31 bp, Homo sapiens; identical to SEQ ID NO: 7152
  chr21:18885607-18885638
  hypo

SEQ ID NO: 56323 - DNA, 278 bp, Homo sapiens; identical to SEQ ID NO: 7153
  chr21:18885657-18885935
  hypo

SEQ ID NO: 56324 - DNA, 31 bp, Homo sapiens; identical to SEQ ID NO: 26937
  chr21:18913417-18913448
  hypo

SEQ ID NO: 56325 - DNA, 31 bp, Homo sapiens; identical to SEQ ID NO: 26938
  chr21:18936385-18936416
  hypo

SEQ ID NO: 56326 - DNA, 31 bp, Homo sapiens; identical to SEQ ID NO: 7154
  chr21:18985139-18985170
  hypo

SEQ ID NO: 56327 - DNA, 2 bp, Homo sapiens
  chr21:19274378-19274380
  hypo
ca

SEQ ID NO: 56328 - DNA, 2 bp, Homo sapiens
  chr21:19274827-19274829
  hypo
ct

SEQ ID NO: 56329 - DNA, 67 bp, Homo sapiens; identical to SEQ ID NO: 26943
  chr21:21132336-21132403
  hypo

SEQ ID NO: 56330 - DNA, 31 bp, Homo sapiens; identical to SEQ ID NO: 7156
  chr21:27011573-27011604
  hypo

SEQ ID NO: 56331 - DNA, 2 bp, Homo sapiens
  chr21:27011608-27011610
  hypo
gg

SEQ ID NO: 56332 - DNA, 30 bp, Homo sapiens; identical to SEQ ID NO: 40378
  chr21:27011639-27011669
  hypo

SEQ ID NO: 56333 - DNA, 101 bp, Homo sapiens; identical to SEQ ID NO: 40379
  chr21:27011672-27011773
  hypo

SEQ ID NO: 56334 - DNA, 33 bp, Homo sapiens; identical to SEQ ID NO: 26954
  chr21:27456834-27456867
  hypo

SEQ ID NO: 56335 - DNA, 31 bp, Homo sapiens; identical to SEQ ID NO: 26955
  chr21:27783697-27783728
  hypo

SEQ ID NO: 56336 - DNA, 35 bp, Homo sapiens; identical to SEQ ID NO: 26957
  chr21:30037523-30037558
  hypo

SEQ ID NO: 56337 - DNA, 31 bp, Homo sapiens; identical to SEQ ID NO: 26958
  chr21:30407640-30407671
  hypo

SEQ ID NO: 56338 - DNA, 33 bp, Homo sapiens; identical to SEQ ID NO: 26959
  chr21:30407702-30407735
  hypo

SEQ ID NO: 56339 - DNA, 70 bp, Homo sapiens; identical to SEQ ID NO: 26960
  chr21:33057408-33057478
  hypo

SEQ ID NO: 56340 - DNA, 31 bp, Homo sapiens; identical to SEQ ID NO: 26961
  chr21:33057528-33057559
  hypo

SEQ ID NO: 56341 - DNA, 31 bp, Homo sapiens; identical to SEQ ID NO: 26962
  chr21:33253353-33253384
  hypo

SEQ ID NO: 56342 - DNA, 31 bp, Homo sapiens; identical to SEQ ID NO: 26963
  chr21:33371339-33371370
  hypo

SEQ ID NO: 56343 - DNA, 31 bp, Homo sapiens; identical to SEQ ID NO: 26964
  chr21:33415198-33415229
  hypo

SEQ ID NO: 56344 - DNA, 31 bp, Homo sapiens; identical to SEQ ID NO: 26965
  chr21:33523366-33523397
  hypo

SEQ ID NO: 56345 - DNA, 31 bp, Homo sapiens; identical to SEQ ID NO: 26966
  chr21:33688988-33689019
  hypo

SEQ ID NO: 56346 - DNA, 25 bp, Homo sapiens
  chr21:33720324-33720349
  hypo
ccagttataccacaatcgcctgaga

SEQ ID NO: 56347 - DNA, 43 bp, Homo sapiens; identical to SEQ ID NO: 26970
  chr21:33754388-33754431
  hypo

SEQ ID NO: 56348 - DNA, 31 bp, Homo sapiens; identical to SEQ ID NO: 26971
  chr21:33760540-33760571
  hypo

SEQ ID NO: 56349 - DNA, 31 bp, Homo sapiens; identical to SEQ ID NO: 26972
  chr21:33781920-33781951
  hypo

SEQ ID NO: 56350 - DNA, 58 bp, Homo sapiens; identical to SEQ ID NO: 26973
  chr21:33791605-33791663
  hypo

SEQ ID NO: 56351 - DNA, 37 bp, Homo sapiens; identical to SEQ ID NO: 26974
  chr21:33791727-33791764
  hypo

SEQ ID NO: 56352 - DNA, 95 bp, Homo sapiens; identical to SEQ ID NO: 26975
  chr21:33812565-33812660
  hypo

SEQ ID NO: 56353 - DNA, 31 bp, Homo sapiens; identical to SEQ ID NO: 26976
  chr21:33812698-33812729
  hypo

SEQ ID NO: 56354 - DNA, 31 bp, Homo sapiens; identical to SEQ ID NO: 26977
  chr21:33824926-33824957
  hypo

SEQ ID NO: 56355 - DNA, 31 bp, Homo sapiens; identical to SEQ ID NO: 26980
  chr21:33844372-33844403
  hypo

SEQ ID NO: 56356 - DNA, 31 bp, Homo sapiens; identical to SEQ ID NO: 26981
  chr21:33845959-33845990
  hypo

SEQ ID NO: 56357 - DNA, 66 bp, Homo sapiens; identical to SEQ ID NO: 26982
  chr21:33849055-33849121
  hypo

SEQ ID NO: 56358 - DNA, 31 bp, Homo sapiens; identical to SEQ ID NO: 26983
  chr21:33870159-33870190
  hypo

SEQ ID NO: 56359 - DNA, 42 bp, Homo sapiens; identical to SEQ ID NO: 26984
  chr21:33870191-33870233
  hypo

SEQ ID NO: 56360 - DNA, 31 bp, Homo sapiens; identical to SEQ ID NO: 26985
  chr21:33875253-33875284
  hypo

SEQ ID NO: 56361 - DNA, 31 bp, Homo sapiens; identical to SEQ ID NO: 26986
  chr21:33875309-33875340
  hypo

SEQ ID NO: 56362 - DNA, 34 bp, Homo sapiens; identical to SEQ ID NO: 26987
  chr21:33876125-33876159
  hypo

SEQ ID NO: 56363 - DNA, 31 bp, Homo sapiens; identical to SEQ ID NO: 26988
  chr21:33876169-33876200
  hypo

SEQ ID NO: 56364 - DNA, 45 bp, Homo sapiens; identical to SEQ ID NO: 26989
  chr21:33876229-33876274
  hypo

SEQ ID NO: 56365 - DNA, 31 bp, Homo sapiens; identical to SEQ ID NO: 26991
  chr21:33879916-33879947
  hypo

SEQ ID NO: 56366 - DNA, 31 bp, Homo sapiens; identical to SEQ ID NO: 26995
  chr21:33884693-33884724
  hypo

SEQ ID NO: 56367 - DNA, 77 bp, Homo sapiens; identical to SEQ ID NO: 26998
  chr21:33924143-33924220
  hypo

SEQ ID NO: 56368 - DNA, 31 bp, Homo sapiens; identical to SEQ ID NO: 26999
  chr21:33924229-33924260
  hypo

SEQ ID NO: 56369 - DNA, 2 bp, Homo sapiens
  chr21:33983235-33983237
  hypo
tc

SEQ ID NO: 56370 - DNA, 31 bp, Homo sapiens; identical to SEQ ID NO: 27001
  chr21:34498740-34498771
  hypo

SEQ ID NO: 56371 - DNA, 31 bp, Homo sapiens; identical to SEQ ID NO: 27002
  chr21:34498778-34498809
  hypo

SEQ ID NO: 56372 - DNA, 59 bp, Homo sapiens; identical to SEQ ID NO: 27003
  chr21:34498858-34498917
  hypo

SEQ ID NO: 56373 - DNA, 31 bp, Homo sapiens; identical to SEQ ID NO: 27004
  chr21:34710939-34710970
  hypo

SEQ ID NO: 56374 - DNA, 31 bp, Homo sapiens; identical to SEQ ID NO: 7185
  chr21:34776440-34776471
  hypo

SEQ ID NO: 56375 - DNA, 31 bp, Homo sapiens; identical to SEQ ID NO: 27007
  chr21:34921349-34921380
  hypo

SEQ ID NO: 56376 - DNA, 37 bp, Homo sapiens; identical to SEQ ID NO: 27008
  chr21:35045296-35045333
  hypo

SEQ ID NO: 56377 - DNA, 42 bp, Homo sapiens; identical to SEQ ID NO: 27009
  chr21:35453129-35453171
  hypo

SEQ ID NO: 56378 - DNA, 37 bp, Homo sapiens; identical to SEQ ID NO: 27010
  chr21:35453174-35453211
  hypo

SEQ ID NO: 56379 - DNA, 31 bp, Homo sapiens; identical to SEQ ID NO: 27011
  chr21:35453253-35453284
  hypo

SEQ ID NO: 56380 - DNA, 31 bp, Homo sapiens; identical to SEQ ID NO: 27012
  chr21:35533044-35533075
  hypo

SEQ ID NO: 56381 - DNA, 31 bp, Homo sapiens; identical to SEQ ID NO: 27013
  chr21:35559282-35559313
  hypo

SEQ ID NO: 56382 - DNA, 31 bp, Homo sapiens; identical to SEQ ID NO: 27014
  chr21:35938134-35938165
  hypo

SEQ ID NO: 56383 - DNA, 111 bp, Homo sapiens; identical to SEQ ID NO: 7187
  chr21:35986868-35986979
  hypo

SEQ ID NO: 56384 - DNA, 31 bp, Homo sapiens; identical to SEQ ID NO: 27016
  chr21:36026851-36026882
  hypo

SEQ ID NO: 56385 - DNA, 53 bp, Homo sapiens; identical to SEQ ID NO: 27017
  chr21:36073673-36073726
  hypo

SEQ ID NO: 56386 - DNA, 38 bp, Homo sapiens; identical to SEQ ID NO: 27018
  chr21:37514441-37514479
  hypo

SEQ ID NO: 56387 - DNA, 2 bp, Homo sapiens
  chr21:37527927-37527929
  hypo
ca

SEQ ID NO: 56388 - DNA, 73 bp, Homo sapiens; identical to SEQ ID NO: 7190
  chr21:37528251-37528324
  hypo

SEQ ID NO: 56389 - DNA, 236 bp, Homo sapiens; identical to SEQ ID NO: 7191
  chr21:37528389-37528625
  hypo

SEQ ID NO: 56390 - DNA, 58 bp, Homo sapiens; identical to SEQ ID NO: 27022
  chr21:37612231-37612289
  hypo

SEQ ID NO: 56391 - DNA, 2 bp, Homo sapiens
  chr21:37750030-37750032
  hypo
ca

SEQ ID NO: 56392 - DNA, 31 bp, Homo sapiens; identical to SEQ ID NO: 22814
  chr21:37795934-37795965
  hypo

SEQ ID NO: 56393 - DNA, 31 bp, Homo sapiens; identical to SEQ ID NO: 27030
  chr21:37811705-37811736
  hypo

SEQ ID NO: 56394 - DNA, 31 bp, Homo sapiens; identical to SEQ ID NO: 27031
  chr21:37847274-37847305
  hypo

SEQ ID NO: 56395 - DNA, 31 bp, Homo sapiens; identical to SEQ ID NO: 27032
  chr21:37847324-37847355
  hypo

SEQ ID NO: 56396 - DNA, 80 bp, Homo sapiens; identical to SEQ ID NO: 27033
  chr21:37847367-37847447
  hypo

SEQ ID NO: 56397 - DNA, 31 bp, Homo sapiens; identical to SEQ ID NO: 27034
  chr21:37847450-37847481
  hypo

SEQ ID NO: 56398 - DNA, 31 bp, Homo sapiens; identical to SEQ ID NO: 27035
  chr21:37848303-37848334
  hypo

SEQ ID NO: 56399 - DNA, 80 bp, Homo sapiens; identical to SEQ ID NO: 27036
  chr21:37855512-37855592
  hypo

SEQ ID NO: 56400 - DNA, 31 bp, Homo sapiens; identical to SEQ ID NO: 27037
  chr21:37855836-37855867
  hypo

SEQ ID NO: 56401 - DNA, 31 bp, Homo sapiens; identical to SEQ ID NO: 27038
  chr21:38016439-38016470
  hypo

SEQ ID NO: 56402 - DNA, 31 bp, Homo sapiens; identical to SEQ ID NO: 27039
  chr21:38040958-38040989
  hypo

SEQ ID NO: 56403 - DNA, 74 bp, Homo sapiens; identical to SEQ ID NO: 27042
  chr21:38248310-38248384
  hypo

SEQ ID NO: 56404 - DNA, 67 bp, Homo sapiens; identical to SEQ ID NO: 7196
  chr21:38362191-38362258
  hypo

SEQ ID NO: 56405 - DNA, 31 bp, Homo sapiens; identical to SEQ ID NO: 27044
  chr21:38366029-38366060
  hypo

SEQ ID NO: 56406 - DNA, 31 bp, Homo sapiens; identical to SEQ ID NO: 27047
  chr21:38603337-38603368
  hypo

SEQ ID NO: 56407 - DNA, 31 bp, Homo sapiens; identical to SEQ ID NO: 27049
  chr21:38673106-38673137
  hypo

SEQ ID NO: 56408 - DNA, 31 bp, Homo sapiens; identical to SEQ ID NO: 27050
  chr21:38673196-38673227
  hypo

SEQ ID NO: 56409 - DNA, 85 bp, Homo sapiens; identical to SEQ ID NO: 27051
  chr21:38832659-38832744
  hypo

SEQ ID NO: 56410 - DNA, 31 bp, Homo sapiens; identical to SEQ ID NO: 27052
  chr21:38832783-38832814
  hypo

SEQ ID NO: 56411 - DNA, 31 bp, Homo sapiens; identical to SEQ ID NO: 27053
  chr21:39654406-39654437
  hypo

SEQ ID NO: 56412 - DNA, 31 bp, Homo sapiens; identical to SEQ ID NO: 27054
  chr21:39778090-39778121
  hypo

SEQ ID NO: 56413 - DNA, 31 bp, Homo sapiens; identical to SEQ ID NO: 27055
  chr21:39959230-39959261
  hypo

SEQ ID NO: 56414 - DNA, 31 bp, Homo sapiens; identical to SEQ ID NO: 27056
  chr21:40049305-40049336
  hypo

SEQ ID NO: 56415 - DNA, 40 bp, Homo sapiens; identical to SEQ ID NO: 27057
  chr21:40056139-40056179
  hypo

SEQ ID NO: 56416 - DNA, 44 bp, Homo sapiens; identical to SEQ ID NO: 27058
  chr21:40056229-40056273
  hypo

SEQ ID NO: 56417 - DNA, 31 bp, Homo sapiens; identical to SEQ ID NO: 27059
  chr21:40056290-40056321
  hypo

SEQ ID NO: 56418 - DNA, 31 bp, Homo sapiens; identical to SEQ ID NO: 27060
  chr21:40117755-40117786
  hypo

SEQ ID NO: 56419 - DNA, 31 bp, Homo sapiens; identical to SEQ ID NO: 27061
  chr21:40146603-40146634
  hypo

SEQ ID NO: 56420 - DNA, 43 bp, Homo sapiens; identical to SEQ ID NO: 27062
  chr21:40146701-40146744
  hypo

SEQ ID NO: 56421 - DNA, 39 bp, Homo sapiens; identical to SEQ ID NO: 27063
  chr21:40146746-40146785
  hypo

SEQ ID NO: 56422 - DNA, 163 bp, Homo sapiens; identical to SEQ ID NO: 7201
  chr21:40177484-40177647
  hypo

SEQ ID NO: 56423 - DNA, 31 bp, Homo sapiens; identical to SEQ ID NO: 7202
  chr21:40177761-40177792
  hypo

SEQ ID NO: 56424 - DNA, 88 bp, Homo sapiens; identical to SEQ ID NO: 7203
  chr21:40177801-40177889
  hypo

SEQ ID NO: 56425 - DNA, 66 bp, Homo sapiens; identical to SEQ ID NO: 7204
  chr21:40178016-40178082
  hypo

SEQ ID NO: 56426 - DNA, 270 bp, Homo sapiens; identical to SEQ ID NO: 7205
  chr21:40178123-40178393
  hypo

SEQ ID NO: 56427 - DNA, 149 bp, Homo sapiens; identical to SEQ ID NO: 7206
  chr21:40178399-40178548
  hypo

SEQ ID NO: 56428 - DNA, 44 bp, Homo sapiens; identical to SEQ ID NO: 27070
  chr21:40208389-40208433
  hypo

SEQ ID NO: 56429 - DNA, 45 bp, Homo sapiens; identical to SEQ ID NO: 27071
  chr21:40278581-40278626
  hypo

SEQ ID NO: 56430 - DNA, 31 bp, Homo sapiens; identical to SEQ ID NO: 27072
  chr21:40296633-40296664
  hypo

SEQ ID NO: 56431 - DNA, 31 bp, Homo sapiens; identical to SEQ ID NO: 27073
  chr21:40316355-40316386
  hypo

SEQ ID NO: 56432 - DNA, 31 bp, Homo sapiens; identical to SEQ ID NO: 27074
  chr21:40316395-40316426
  hypo

SEQ ID NO: 56433 - DNA, 31 bp, Homo sapiens; identical to SEQ ID NO: 27075
  chr21:40316469-40316500
  hypo

SEQ ID NO: 56434 - DNA, 40 bp, Homo sapiens; identical to SEQ ID NO: 27076
  chr21:40316507-40316547
  hypo

SEQ ID NO: 56435 - DNA, 56 bp, Homo sapiens; identical to SEQ ID NO: 27078
  chr21:40340268-40340324
  hypo

SEQ ID NO: 56436 - DNA, 31 bp, Homo sapiens; identical to SEQ ID NO: 27079
  chr21:40352340-40352371
  hypo

SEQ ID NO: 56437 - DNA, 31 bp, Homo sapiens; identical to SEQ ID NO: 27080
  chr21:40366395-40366426
  hypo

SEQ ID NO: 56438 - DNA, 31 bp, Homo sapiens; identical to SEQ ID NO: 27081
  chr21:40425094-40425125
  hypo

SEQ ID NO: 56439 - DNA, 41 bp, Homo sapiens; identical to SEQ ID NO: 27082
  chr21:40425339-40425380
  hypo

SEQ ID NO: 56440 - DNA, 31 bp, Homo sapiens; identical to SEQ ID NO: 27083
  chr21:40431170-40431201
  hypo

SEQ ID NO: 56441 - DNA, 55 bp, Homo sapiens; identical to SEQ ID NO: 27084
  chr21:40433690-40433745
  hypo

SEQ ID NO: 56442 - DNA, 31 bp, Homo sapiens; identical to SEQ ID NO: 27085
  chr21:40453330-40453361
  hypo

SEQ ID NO: 56443 - DNA, 47 bp, Homo sapiens; identical to SEQ ID NO: 27086
  chr21:40463108-40463155
  hypo

SEQ ID NO: 56444 - DNA, 31 bp, Homo sapiens; identical to SEQ ID NO: 27087
  chr21:40465399-40465430
  hypo

SEQ ID NO: 56445 - DNA, 31 bp, Homo sapiens; identical to SEQ ID NO: 27088
  chr21:40465598-40465629
  hypo

SEQ ID NO: 56446 - DNA, 31 bp, Homo sapiens; identical to SEQ ID NO: 27089
  chr21:40488783-40488814
  hypo

SEQ ID NO: 56447 - DNA, 31 bp, Homo sapiens; identical to SEQ ID NO: 27090
  chr21:40488815-40488846
  hypo

SEQ ID NO: 56448 - DNA, 37 bp, Homo sapiens; identical to SEQ ID NO: 27091
  chr21:40506467-40506504
  hypo

SEQ ID NO: 56449 - DNA, 31 bp, Homo sapiens; identical to SEQ ID NO: 27092
  chr21:40506513-40506544
  hypo

SEQ ID NO: 56450 - DNA, 2 bp, Homo sapiens
  chr21:40510521-40510523
  hypo
tt

SEQ ID NO: 56451 - DNA, 31 bp, Homo sapiens; identical to SEQ ID NO: 27096
  chr21:40525157-40525188
  hypo

SEQ ID NO: 56452 - DNA, 47 bp, Homo sapiens; identical to SEQ ID NO: 27097
  chr21:40525202-40525249
  hypo

SEQ ID NO: 56453 - DNA, 31 bp, Homo sapiens; identical to SEQ ID NO: 27098
  chr21:40525269-40525300
  hypo

SEQ ID NO: 56454 - DNA, 31 bp, Homo sapiens; identical to SEQ ID NO: 27099
  chr21:40525328-40525359
  hypo

SEQ ID NO: 56455 - DNA, 31 bp, Homo sapiens; identical to SEQ ID NO: 27101
  chr21:40697453-40697484
  hypo

SEQ ID NO: 56456 - DNA, 31 bp, Homo sapiens; identical to SEQ ID NO: 27102
  chr21:40820652-40820683
  hypo

SEQ ID NO: 56457 - DNA, 31 bp, Homo sapiens; identical to SEQ ID NO: 27103
  chr21:40820699-40820730
  hypo

SEQ ID NO: 56458 - DNA, 31 bp, Homo sapiens; identical to SEQ ID NO: 27104
  chr21:40820749-40820780
  hypo

SEQ ID NO: 56459 - DNA, 47 bp, Homo sapiens; identical to SEQ ID NO: 27105
  chr21:40820799-40820846
  hypo

SEQ ID NO: 56460 - DNA, 31 bp, Homo sapiens; identical to SEQ ID NO: 27106
  chr21:40904966-40904997
  hypo

SEQ ID NO: 56461 - DNA, 31 bp, Homo sapiens; identical to SEQ ID NO: 7208
  chr21:40941232-40941263
  hypo

SEQ ID NO: 56462 - DNA, 31 bp, Homo sapiens; identical to SEQ ID NO: 7209
  chr21:40941272-40941303
  hypo

SEQ ID NO: 56463 - DNA, 31 bp, Homo sapiens; identical to SEQ ID NO: 27110
  chr21:40976657-40976688
  hypo

SEQ ID NO: 56464 - DNA, 31 bp, Homo sapiens; identical to SEQ ID NO: 27111
  chr21:41040611-41040642
  hypo

SEQ ID NO: 56465 - DNA, 31 bp, Homo sapiens; identical to SEQ ID NO: 27112
  chr21:41137924-41137955
  hypo

SEQ ID NO: 56466 - DNA, 36 bp, Homo sapiens; identical to SEQ ID NO: 27114
  chr21:41711101-41711137
  hypo

SEQ ID NO: 56467 - DNA, 31 bp, Homo sapiens; identical to SEQ ID NO: 27115
  chr21:41753050-41753081
  hypo

SEQ ID NO: 56468 - DNA, 31 bp, Homo sapiens; identical to SEQ ID NO: 27116
  chr21:41931090-41931121
  hypo

SEQ ID NO: 56469 - DNA, 61 bp, Homo sapiens; identical to SEQ ID NO: 7210
  chr21:42539439-42539500
  hypo

SEQ ID NO: 56470 - DNA, 66 bp, Homo sapiens; identical to SEQ ID NO: 7211
  chr21:42539637-42539703
  hypo

SEQ ID NO: 56471 - DNA, 36 bp, Homo sapiens; identical to SEQ ID NO: 7212
  chr21:42539862-42539898
  hypo

SEQ ID NO: 56472 - DNA, 153 bp, Homo sapiens; identical to SEQ ID NO: 7213
  chr21:42540273-42540426
  hypo

SEQ ID NO: 56473 - DNA, 75 bp, Homo sapiens; identical to SEQ ID NO: 27121
  chr21:42582371-42582446
  hypo

SEQ ID NO: 56474 - DNA, 36 bp, Homo sapiens; identical to SEQ ID NO: 27122
  chr21:42582449-42582485
  hypo

SEQ ID NO: 56475 - DNA, 54 bp, Homo sapiens; identical to SEQ ID NO: 27123
  chr21:42582490-42582544
  hypo

SEQ ID NO: 56476 - DNA, 31 bp, Homo sapiens; identical to SEQ ID NO: 27125
  chr21:42676098-42676129
  hypo

SEQ ID NO: 56477 - DNA, 31 bp, Homo sapiens; identical to SEQ ID NO: 27126
  chr21:42676134-42676165
  hypo

SEQ ID NO: 56478 - DNA, 49 bp, Homo sapiens; identical to SEQ ID NO: 27127
  chr21:42676194-42676243
  hypo

SEQ ID NO: 56479 - DNA, 44 bp, Homo sapiens; identical to SEQ ID NO: 27128
  chr21:42676344-42676388
  hypo

SEQ ID NO: 56480 - DNA, 43 bp, Homo sapiens; identical to SEQ ID NO: 27129
  chr21:42700240-42700283
  hypo

SEQ ID NO: 56481 - DNA, 52 bp, Homo sapiens; identical to SEQ ID NO: 27130
  chr21:42710364-42710416
  hypo

SEQ ID NO: 56482 - DNA, 51 bp, Homo sapiens; identical to SEQ ID NO: 27131
  chr21:42710423-42710474
  hypo

SEQ ID NO: 56483 - DNA, 31 bp, Homo sapiens; identical to SEQ ID NO: 27132
  chr21:42710517-42710548
  hypo

SEQ ID NO: 56484 - DNA, 31 bp, Homo sapiens; identical to SEQ ID NO: 27133
  chr21:42722012-42722043
  hypo

SEQ ID NO: 56485 - DNA, 31 bp, Homo sapiens; identical to SEQ ID NO: 27134
  chr21:42896753-42896784
  hypo

SEQ ID NO: 56486 - DNA, 85 bp, Homo sapiens; identical to SEQ ID NO: 27135
  chr21:43026398-43026483
  hypo

SEQ ID NO: 56487 - DNA, 49 bp, Homo sapiens; identical to SEQ ID NO: 27136
  chr21:43026490-43026539
  hypo

SEQ ID NO: 56488 - DNA, 88 bp, Homo sapiens; identical to SEQ ID NO: 7220
  chr21:43067057-43067145
  hypo

SEQ ID NO: 56489 - DNA, 63 bp, Homo sapiens; identical to SEQ ID NO: 27139
  chr21:43090565-43090628
  hypo

SEQ ID NO: 56490 - DNA, 31 bp, Homo sapiens; identical to SEQ ID NO: 27140
  chr21:43098621-43098652
  hypo

SEQ ID NO: 56491 - DNA, 31 bp, Homo sapiens; identical to SEQ ID NO: 27141
  chr21:43102335-43102366
  hypo

SEQ ID NO: 56492 - DNA, 31 bp, Homo sapiens; identical to SEQ ID NO: 27142
  chr21:43102604-43102635
  hypo

SEQ ID NO: 56493 - DNA, 62 bp, Homo sapiens; identical to SEQ ID NO: 27143
  chr21:43102645-43102707
  hypo

SEQ ID NO: 56494 - DNA, 31 bp, Homo sapiens; identical to SEQ ID NO: 27144
  chr21:43102767-43102798
  hypo

SEQ ID NO: 56495 - DNA, 45 bp, Homo sapiens; identical to SEQ ID NO: 27145
  chr21:43109375-43109420
  hypo

SEQ ID NO: 56496 - DNA, 101 bp, Homo sapiens; identical to SEQ ID NO: 27146
  chr21:43109529-43109630
  hypo

SEQ ID NO: 56497 - DNA, 31 bp, Homo sapiens; identical to SEQ ID NO: 27147
  chr21:43112993-43113024
  hypo

SEQ ID NO: 56498 - DNA, 31 bp, Homo sapiens; identical to SEQ ID NO: 27148
  chr21:43143548-43143579
  hypo

SEQ ID NO: 56499 - DNA, 31 bp, Homo sapiens; identical to SEQ ID NO: 27149
  chr21:43154177-43154208
  hypo

SEQ ID NO: 56500 - DNA, 31 bp, Homo sapiens; identical to SEQ ID NO: 27150
  chr21:43160665-43160696
  hypo

SEQ ID NO: 56501 - DNA, 95 bp, Homo sapiens; identical to SEQ ID NO: 27151
  chr21:43160961-43161056
  hypo

SEQ ID NO: 56502 - DNA, 354 bp, Homo sapiens; identical to SEQ ID NO: 27152
  chr21:43161086-43161440
  hypo

SEQ ID NO: 56503 - DNA, 196 bp, Homo sapiens; identical to SEQ ID NO: 27153
  chr21:43161442-43161638
  hypo

SEQ ID NO: 56504 - DNA, 175 bp, Homo sapiens; identical to SEQ ID NO: 27154
  chr21:43161649-43161824
  hypo

SEQ ID NO: 56505 - DNA, 47 bp, Homo sapiens; identical to SEQ ID NO: 27155
  chr21:43161914-43161961
  hypo

SEQ ID NO: 56506 - DNA, 31 bp, Homo sapiens; identical to SEQ ID NO: 27156
  chr21:43161976-43162007
  hypo

SEQ ID NO: 56507 - DNA, 35 bp, Homo sapiens; identical to SEQ ID NO: 27157
  chr21:43162541-43162576
  hypo

SEQ ID NO: 56508 - DNA, 31 bp, Homo sapiens; identical to SEQ ID NO: 27158
  chr21:43162617-43162648
  hypo

SEQ ID NO: 56509 - DNA, 31 bp, Homo sapiens; identical to SEQ ID NO: 27159
  chr21:43162651-43162682
  hypo

SEQ ID NO: 56510 - DNA, 35 bp, Homo sapiens; identical to SEQ ID NO: 27160
  chr21:43164124-43164159
  hypo

SEQ ID NO: 56511 - DNA, 40 bp, Homo sapiens; identical to SEQ ID NO: 27161
  chr21:43164330-43164370
  hypo

SEQ ID NO: 56512 - DNA, 57 bp, Homo sapiens; identical to SEQ ID NO: 27162
  chr21:43164376-43164433
  hypo

SEQ ID NO: 56513 - DNA, 44 bp, Homo sapiens; identical to SEQ ID NO: 27163
  chr21:43164439-43164483
  hypo

SEQ ID NO: 56514 - DNA, 88 bp, Homo sapiens; identical to SEQ ID NO: 27164
  chr21:43165931-43166019
  hypo

SEQ ID NO: 56515 - DNA, 56 bp, Homo sapiens; identical to SEQ ID NO: 27165
  chr21:43166035-43166091
  hypo

SEQ ID NO: 56516 - DNA, 47 bp, Homo sapiens; identical to SEQ ID NO: 27166
  chr21:43166636-43166683
  hypo

SEQ ID NO: 56517 - DNA, 42 bp, Homo sapiens; identical to SEQ ID NO: 27167
  chr21:43166733-43166775
  hypo

SEQ ID NO: 56518 - DNA, 31 bp, Homo sapiens; identical to SEQ ID NO: 27168
  chr21:43166932-43166963
  hypo

SEQ ID NO: 56519 - DNA, 31 bp, Homo sapiens; identical to SEQ ID NO: 27169
  chr21:43169650-43169681
  hypo

SEQ ID NO: 56520 - DNA, 31 bp, Homo sapiens; identical to SEQ ID NO: 27170
  chr21:43175335-43175366
  hypo

SEQ ID NO: 56521 - DNA, 31 bp, Homo sapiens; identical to SEQ ID NO: 27171
  chr21:43176653-43176684
  hypo

SEQ ID NO: 56522 - DNA, 31 bp, Homo sapiens; identical to SEQ ID NO: 27172
  chr21:43256882-43256913
  hypo

SEQ ID NO: 56523 - DNA, 31 bp, Homo sapiens; identical to SEQ ID NO: 27173
  chr21:43259319-43259350
  hypo

SEQ ID NO: 56524 - DNA, 31 bp, Homo sapiens; identical to SEQ ID NO: 27174
  chr21:43282988-43283019
  hypo

SEQ ID NO: 56525 - DNA, 31 bp, Homo sapiens; identical to SEQ ID NO: 27175
  chr21:43296430-43296461
  hypo

SEQ ID NO: 56526 - DNA, 64 bp, Homo sapiens; identical to SEQ ID NO: 27177
  chr21:43347978-43348042
  hypo

SEQ ID NO: 56527 - DNA, 31 bp, Homo sapiens; identical to SEQ ID NO: 7224
  chr21:43373717-43373748
  hypo

SEQ ID NO: 56528 - DNA, 76 bp, Homo sapiens; identical to SEQ ID NO: 7225
  chr21:43374032-43374108
  hypo

SEQ ID NO: 56529 - DNA, 34 bp, Homo sapiens; identical to SEQ ID NO: 7226
  chr21:43374331-43374365
  hypo

SEQ ID NO: 56530 - DNA, 31 bp, Homo sapiens; identical to SEQ ID NO: 27181
  chr21:43448738-43448769
  hypo

SEQ ID NO: 56531 - DNA, 66 bp, Homo sapiens; identical to SEQ ID NO: 27182
  chr21:43481097-43481163
  hypo

SEQ ID NO: 56532 - DNA, 31 bp, Homo sapiens; identical to SEQ ID NO: 27183
  chr21:43501956-43501987
  hypo

SEQ ID NO: 56533 - DNA, 31 bp, Homo sapiens; identical to SEQ ID NO: 27184
  chr21:43707199-43707230
  hypo

SEQ ID NO: 56534 - DNA, 31 bp, Homo sapiens; identical to SEQ ID NO: 27185
  chr21:43726027-43726058
  hypo

SEQ ID NO: 56535 - DNA, 31 bp, Homo sapiens; identical to SEQ ID NO: 27186
  chr21:43738581-43738612
  hypo

SEQ ID NO: 56536 - DNA, 31 bp, Homo sapiens; identical to SEQ ID NO: 27187
  chr21:43772763-43772794
  hypo

SEQ ID NO: 56537 - DNA, 31 bp, Homo sapiens; identical to SEQ ID NO: 27188
  chr21:43772824-43772855
  hypo

SEQ ID NO: 56538 - DNA, 31 bp, Homo sapiens; identical to SEQ ID NO: 27189
  chr21:43772878-43772909
  hypo

SEQ ID NO: 56539 - DNA, 41 bp, Homo sapiens; identical to SEQ ID NO: 27190
  chr21:43772920-43772961
  hypo

SEQ ID NO: 56540 - DNA, 31 bp, Homo sapiens; identical to SEQ ID NO: 27191
  chr21:43790776-43790807
  hypo

SEQ ID NO: 56541 - DNA, 31 bp, Homo sapiens; identical to SEQ ID NO: 27192
  chr21:43962934-43962965
  hypo

SEQ ID NO: 56542 - DNA, 43 bp, Homo sapiens; identical to SEQ ID NO: 27193
  chr21:43968300-43968343
  hypo

SEQ ID NO: 56543 - DNA, 44 bp, Homo sapiens; identical to SEQ ID NO: 27194
  chr21:43969267-43969311
  hypo

SEQ ID NO: 56544 - DNA, 31 bp, Homo sapiens; identical to SEQ ID NO: 27195
  chr21:43969330-43969361
  hypo

SEQ ID NO: 56545 - DNA, 49 bp, Homo sapiens; identical to SEQ ID NO: 27196
  chr21:43986295-43986344
  hypo

SEQ ID NO: 56546 - DNA, 31 bp, Homo sapiens; identical to SEQ ID NO: 7227
  chr21:44013673-44013704
  hypo

SEQ ID NO: 56547 - DNA, 31 bp, Homo sapiens; identical to SEQ ID NO: 27198
  chr21:44015499-44015530
  hypo

SEQ ID NO: 56548 - DNA, 31 bp, Homo sapiens; identical to SEQ ID NO: 27200
  chr21:44065442-44065473
  hypo

SEQ ID NO: 56549 - DNA, 31 bp, Homo sapiens; identical to SEQ ID NO: 27201
  chr21:44065969-44066000
  hypo

SEQ ID NO: 56550 - DNA, 31 bp, Homo sapiens; identical to SEQ ID NO: 27202
  chr21:44082506-44082537
  hypo

SEQ ID NO: 56551 - DNA, 31 bp, Homo sapiens; identical to SEQ ID NO: 27204
  chr21:44095687-44095718
  hypo

SEQ ID NO: 56552 - DNA, 31 bp, Homo sapiens; identical to SEQ ID NO: 27205
  chr21:44109121-44109152
  hypo

SEQ ID NO: 56553 - DNA, 31 bp, Homo sapiens; identical to SEQ ID NO: 27206
  chr21:44123456-44123487
  hypo

SEQ ID NO: 56554 - DNA, 37 bp, Homo sapiens; identical to SEQ ID NO: 27207
  chr21:44176711-44176748
  hypo

SEQ ID NO: 56555 - DNA, 31 bp, Homo sapiens; identical to SEQ ID NO: 27208
  chr21:44215220-44215251
  hypo

SEQ ID NO: 56556 - DNA, 45 bp, Homo sapiens; identical to SEQ ID NO: 27212
  chr21:44390975-44391020
  hypo

SEQ ID NO: 56557 - DNA, 104 bp, Homo sapiens; identical to SEQ ID NO: 27213
  chr21:44799063-44799167
  hypo

SEQ ID NO: 56558 - DNA, 31 bp, Homo sapiens; identical to SEQ ID NO: 27214
  chr21:44799234-44799265
  hypo

SEQ ID NO: 56559 - DNA, 31 bp, Homo sapiens; identical to SEQ ID NO: 27216
  chr21:44840272-44840303
  hypo

SEQ ID NO: 56560 - DNA, 20 bp, Homo sapiens
  chr21:44881156-44881176
  hypo
cagagtgcttccgggtcgca

SEQ ID NO: 56561 - DNA, 2 bp, Homo sapiens
  chr21:45078775-45078777
  hypo
ca

SEQ ID NO: 56562 - DNA, 34 bp, Homo sapiens
  chr21:45187153-45187187
  hypo
ggacatgggaaccttgcgggcacacacatgcaaa

SEQ ID NO: 56563 - DNA, 14 bp, Homo sapiens
  chr21:45187216-45187230
  hypo
gcacacagggatgc

SEQ ID NO: 56564 - DNA, 135 bp, Homo sapiens; identical to SEQ ID NO: 27229
  chr21:45224199-45224334
  hypo

SEQ ID NO: 56565 - DNA, 31 bp, Homo sapiens; identical to SEQ ID NO: 27230
  chr21:45224336-45224367
  hypo

SEQ ID NO: 56566 - DNA, 50 bp, Homo sapiens; identical to SEQ ID NO: 27231
  chr21:45224390-45224440
  hypo

SEQ ID NO: 56567 - DNA, 37 bp, Homo sapiens; identical to SEQ ID NO: 27232
  chr21:45224466-45224503
  hypo

SEQ ID NO: 56568 - DNA, 50 bp, Homo sapiens; identical to SEQ ID NO: 27233
  chr21:45224507-45224557
  hypo

SEQ ID NO: 56569 - DNA, 45 bp, Homo sapiens; identical to SEQ ID NO: 27234
  chr21:45224563-45224608
  hypo

SEQ ID NO: 56570 - DNA, 73 bp, Homo sapiens; identical to SEQ ID NO: 27235
  chr21:45224661-45224734
  hypo

SEQ ID NO: 56571 - DNA, 31 bp, Homo sapiens; identical to SEQ ID NO: 27236
  chr21:45226070-45226101
  hypo

SEQ ID NO: 56572 - DNA, 31 bp, Homo sapiens; identical to SEQ ID NO: 27237
  chr21:45230171-45230202
  hypo

SEQ ID NO: 56573 - DNA, 31 bp, Homo sapiens; identical to SEQ ID NO: 27241
  chr21:45279018-45279049
  hypo

SEQ ID NO: 56574 - DNA, 51 bp, Homo sapiens; identical to SEQ ID NO: 27242
  chr21:45299400-45299451
  hypo

SEQ ID NO: 56575 - DNA, 2 bp, Homo sapiens
  chr21:45349805-45349807
  hypo
aa

SEQ ID NO: 56576 - DNA, 79 bp, Homo sapiens; identical to SEQ ID NO: 27244
  chr21:45354854-45354933
  hypo

SEQ ID NO: 56577 - DNA, 64 bp, Homo sapiens; identical to SEQ ID NO: 27245
  chr21:45358106-45358170
  hypo

SEQ ID NO: 56578 - DNA, 39 bp, Homo sapiens; identical to SEQ ID NO: 7236
  chr21:45381602-45381641
  hypo

SEQ ID NO: 56579 - DNA, 31 bp, Homo sapiens; identical to SEQ ID NO: 27248
  chr21:45396855-45396886
  hypo

SEQ ID NO: 56580 - DNA, 31 bp, Homo sapiens; identical to SEQ ID NO: 27249
  chr21:45403795-45403826
  hypo

SEQ ID NO: 56581 - DNA, 82 bp, Homo sapiens; identical to SEQ ID NO: 27250
  chr21:45403951-45404033
  hypo

SEQ ID NO: 56582 - DNA, 31 bp, Homo sapiens; identical to SEQ ID NO: 27251
  chr21:45422610-45422641
  hypo

SEQ ID NO: 56583 - DNA, 56 bp, Homo sapiens; identical to SEQ ID NO: 27252
  chr21:45546679-45546735
  hypo

SEQ ID NO: 56584 - DNA, 31 bp, Homo sapiens; identical to SEQ ID NO: 27253
  chr21:45546746-45546777
  hypo

SEQ ID NO: 56585 - DNA, 31 bp, Homo sapiens; identical to SEQ ID NO: 27254
  chr21:45546778-45546809
  hypo

SEQ ID NO: 56586 - DNA, 31 bp, Homo sapiens; identical to SEQ ID NO: 27255
  chr21:45546814-45546845
  hypo

SEQ ID NO: 56587 - DNA, 54 bp, Homo sapiens; identical to SEQ ID NO: 27256
  chr21:45605770-45605824
  hypo

SEQ ID NO: 56588 - DNA, 31 bp, Homo sapiens; identical to SEQ ID NO: 27257
  chr21:45605848-45605879
  hypo

SEQ ID NO: 56589 - DNA, 50 bp, Homo sapiens; identical to SEQ ID NO: 27258
  chr21:45605885-45605935
  hypo

SEQ ID NO: 56590 - DNA, 31 bp, Homo sapiens; identical to SEQ ID NO: 27259
  chr21:45628848-45628879
  hypo

SEQ ID NO: 56591 - DNA, 31 bp, Homo sapiens; identical to SEQ ID NO: 27260
  chr21:45628898-45628929
  hypo

SEQ ID NO: 56592 - DNA, 95 bp, Homo sapiens; identical to SEQ ID NO: 27261
  chr21:45628930-45629025
  hypo

SEQ ID NO: 56593 - DNA, 31 bp, Homo sapiens; identical to SEQ ID NO: 27262
  chr21:45629083-45629114
  hypo

SEQ ID NO: 56594 - DNA, 38 bp, Homo sapiens; identical to SEQ ID NO: 7238
  chr21:45660234-45660272
  hypo

SEQ ID NO: 56595 - DNA, 49 bp, Homo sapiens; identical to SEQ ID NO: 7239
  chr21:45660350-45660399
  hypo

SEQ ID NO: 56596 - DNA, 31 bp, Homo sapiens; identical to SEQ ID NO: 27265
  chr21:45704769-45704800
  hypo

SEQ ID NO: 56597 - DNA, 49 bp, Homo sapiens; identical to SEQ ID NO: 27266
  chr21:45736415-45736464
  hypo

SEQ ID NO: 56598 - DNA, 31 bp, Homo sapiens; identical to SEQ ID NO: 27267
  chr21:45736468-45736499
  hypo

SEQ ID NO: 56599 - DNA, 58 bp, Homo sapiens
  chr21:45750338-45750396
  hypo
gactgaccggcacactcggagaatctgagcagaggagccccgcctgtggacgcgtgtg

SEQ ID NO: 56600 - DNA, 2 bp, Homo sapiens
  chr21:45753622-45753624
  hypo
tt

SEQ ID NO: 56601 - DNA, 130 bp, Homo sapiens; identical to SEQ ID NO: 27272
  chr21:45754348-45754478
  hypo

SEQ ID NO: 56602 - DNA, 31 bp, Homo sapiens; identical to SEQ ID NO: 27273
  chr21:45769038-45769069
  hypo

SEQ ID NO: 56603 - DNA, 31 bp, Homo sapiens; identical to SEQ ID NO: 27274
  chr21:45787688-45787719
  hypo

SEQ ID NO: 56604 - DNA, 31 bp, Homo sapiens; identical to SEQ ID NO: 27275
  chr21:45819155-45819186
  hypo

SEQ ID NO: 56605 - DNA, 31 bp, Homo sapiens; identical to SEQ ID NO: 27276
  chr21:45848002-45848033
  hypo

SEQ ID NO: 56606 - DNA, 31 bp, Homo sapiens; identical to SEQ ID NO: 27277
  chr21:45856840-45856871
  hypo

SEQ ID NO: 56607 - DNA, 22 bp, Homo sapiens
  chr21:45929371-45929393
  hypo
gagggggcgcagaggtgtgggg

SEQ ID NO: 56608 - DNA, 39 bp, Homo sapiens; identical to SEQ ID NO: 27280
  chr21:46186207-46186246
  hypo

SEQ ID NO: 56609 - DNA, 31 bp, Homo sapiens; identical to SEQ ID NO: 27281
  chr21:46193377-46193408
  hypo

SEQ ID NO: 56610 - DNA, 2 bp, Homo sapiens
  chr21:46193413-46193415
  hypo
gc

SEQ ID NO: 56611 - DNA, 9 bp, Homo sapiens
  chr21:46193542-46193551
  hypo
ccatggggt

SEQ ID NO: 56612 - DNA, 31 bp, Homo sapiens; identical to SEQ ID NO: 27285
  chr21:46316854-46316885
  hypo

SEQ ID NO: 56613 - DNA, 31 bp, Homo sapiens; identical to SEQ ID NO: 27286
  chr21:46317320-46317351
  hypo

SEQ ID NO: 56614 - DNA, 31 bp, Homo sapiens; identical to SEQ ID NO: 27287
  chr21:46326979-46327010
  hypo

SEQ ID NO: 56615 - DNA, 31 bp, Homo sapiens; identical to SEQ ID NO: 27288
  chr21:46329306-46329337
  hypo

SEQ ID NO: 56616 - DNA, 45 bp, Homo sapiens; identical to SEQ ID NO: 27289
  chr21:46330653-46330698
  hypo

SEQ ID NO: 56617 - DNA, 31 bp, Homo sapiens; identical to SEQ ID NO: 27291
  chr21:46353948-46353979
  hypo

SEQ ID NO: 56618 - DNA, 45 bp, Homo sapiens; identical to SEQ ID NO: 27292
  chr21:46353983-46354028
  hypo

SEQ ID NO: 56619 - DNA, 51 bp, Homo sapiens; identical to SEQ ID NO: 27293
  chr21:46354068-46354119
  hypo

SEQ ID NO: 56620 - DNA, 47 bp, Homo sapiens; identical to SEQ ID NO: 27294
  chr21:46373207-46373254
  hypo

SEQ ID NO: 56621 - DNA, 43 bp, Homo sapiens; identical to SEQ ID NO: 27295
  chr21:46397986-46398029
  hypo

SEQ ID NO: 56622 - DNA, 141 bp, Homo sapiens; identical to SEQ ID NO: 27296
  chr21:46398054-46398195
  hypo

SEQ ID NO: 56623 - DNA, 40 bp, Homo sapiens; identical to SEQ ID NO: 27297
  chr21:46398204-46398244
  hypo

SEQ ID NO: 56624 - DNA, 31 bp, Homo sapiens; identical to SEQ ID NO: 27298
  chr21:46398246-46398277
  hypo

SEQ ID NO: 56625 - DNA, 35 bp, Homo sapiens; identical to SEQ ID NO: 27299
  chr21:46549425-46549460
  hypo

SEQ ID NO: 56626 - DNA, 31 bp, Homo sapiens; identical to SEQ ID NO: 27301
  chr21:46800405-46800436
  hypo

SEQ ID NO: 56627 - DNA, 31 bp, Homo sapiens; identical to SEQ ID NO: 27302
  chr21:46811547-46811578
  hypo

SEQ ID NO: 56628 - DNA, 58 bp, Homo sapiens; identical to SEQ ID NO: 27303
  chr21:46827541-46827599
  hypo

SEQ ID NO: 56629 - DNA, 31 bp, Homo sapiens; identical to SEQ ID NO: 27304
  chr21:46839493-46839524
  hypo

SEQ ID NO: 56630 - DNA, 38 bp, Homo sapiens; identical to SEQ ID NO: 27305
  chr21:46849578-46849616
  hypo

SEQ ID NO: 56631 - DNA, 38 bp, Homo sapiens; identical to SEQ ID NO: 27306
  chr21:46900440-46900478
  hypo

SEQ ID NO: 56632 - DNA, 79 bp, Homo sapiens; identical to SEQ ID NO: 27307
  chr21:46900584-46900663
  hypo

SEQ ID NO: 56633 - DNA, 37 bp, Homo sapiens; identical to SEQ ID NO: 27308
  chr21:46907666-46907703
  hypo

SEQ ID NO: 56634 - DNA, 31 bp, Homo sapiens; identical to SEQ ID NO: 27309
  chr21:46908632-46908663
  hypo

SEQ ID NO: 56635 - DNA, 36 bp, Homo sapiens; identical to SEQ ID NO: 27310
  chr21:46910556-46910592
  hypo

SEQ ID NO: 56636 - DNA, 35 bp, Homo sapiens; identical to SEQ ID NO: 27311
  chr21:46910626-46910661
  hypo

SEQ ID NO: 56637 - DNA, 31 bp, Homo sapiens; identical to SEQ ID NO: 27312
  chr21:46911595-46911626
  hypo

SEQ ID NO: 56638 - DNA, 44 bp, Homo sapiens; identical to SEQ ID NO: 27313
  chr21:46913027-46913071
  hypo

SEQ ID NO: 56639 - DNA, 35 bp, Homo sapiens; identical to SEQ ID NO: 27314
  chr21:46913098-46913133
  hypo

SEQ ID NO: 56640 - DNA, 40 bp, Homo sapiens; identical to SEQ ID NO: 27315
  chr21:46915160-46915200
  hypo

SEQ ID NO: 56641 - DNA, 31 bp, Homo sapiens; identical to SEQ ID NO: 27316
  chr21:46916196-46916227
  hypo

SEQ ID NO: 56642 - DNA, 88 bp, Homo sapiens; identical to SEQ ID NO: 27317
  chr21:46918335-46918423
  hypo

SEQ ID NO: 56643 - DNA, 2 bp, Homo sapiens
  chr21:46935738-46935740
  hypo
gg

SEQ ID NO: 56644 - DNA, 105 bp, Homo sapiens; identical to SEQ ID NO: 7245
  chr21:46950777-46950882
  hypo

SEQ ID NO: 56645 - DNA, 31 bp, Homo sapiens; identical to SEQ ID NO: 27321
  chr21:46951699-46951730
  hypo

SEQ ID NO: 56646 - DNA, 31 bp, Homo sapiens; identical to SEQ ID NO: 27322
  chr21:46973124-46973155
  hypo

SEQ ID NO: 56647 - DNA, 51 bp, Homo sapiens; identical to SEQ ID NO: 27324
  chr21:47414105-47414156
  hypo

SEQ ID NO: 56648 - DNA, 73 bp, Homo sapiens
  chr21:47426375-47426448
  hypo
attcgcactgcagctgcggccctggcgcgacaagggctggacttggccagcgggacggtccctcacggcgctg

SEQ ID NO: 56649 - DNA, 31 bp, Homo sapiens; identical to SEQ ID NO: 27326
  chr21:47455820-47455851
  hypo

SEQ ID NO: 56650 - DNA, 31 bp, Homo sapiens; identical to SEQ ID NO: 27327
  chr21:47456092-47456123
  hypo

SEQ ID NO: 56651 - DNA, 31 bp, Homo sapiens; identical to SEQ ID NO: 27328
  chr21:47457652-47457683
  hypo

SEQ ID NO: 56652 - DNA, 31 bp, Homo sapiens; identical to SEQ ID NO: 27329
  chr21:47557369-47557400
  hypo

SEQ ID NO: 56653 - DNA, 31 bp, Homo sapiens; identical to SEQ ID NO: 27330
  chr21:47565065-47565096
  hypo

SEQ ID NO: 56654 - DNA, 31 bp, Homo sapiens; identical to SEQ ID NO: 27331
  chr21:47565102-47565133
  hypo

SEQ ID NO: 56655 - DNA, 40 bp, Homo sapiens
  chr21:47565137-47565177
  hypo
gggcccaagcacttgccggggtgagggcggtgctggtggt

SEQ ID NO: 56656 - DNA, 31 bp, Homo sapiens; identical to SEQ ID NO: 27334
  chr21:47569329-47569360
  hypo

SEQ ID NO: 56657 - DNA, 48 bp, Homo sapiens; identical to SEQ ID NO: 27336
  chr21:47602891-47602939
  hypo

SEQ ID NO: 56658 - DNA, 31 bp, Homo sapiens; identical to SEQ ID NO: 27337
  chr21:47627574-47627605
  hypo

SEQ ID NO: 56659 - DNA, 34 bp, Homo sapiens; identical to SEQ ID NO: 27338
  chr21:47627712-47627746
  hypo

SEQ ID NO: 56660 - DNA, 43 bp, Homo sapiens; identical to SEQ ID NO: 27339
  chr21:47634459-47634502
  hypo

SEQ ID NO: 56661 - DNA, 37 bp, Homo sapiens; identical to SEQ ID NO: 27340
  chr21:47634530-47634567
  hypo

SEQ ID NO: 56662 - DNA, 45 bp, Homo sapiens; identical to SEQ ID NO: 27341
  chr21:47689555-47689600
  hypo

SEQ ID NO: 56663 - DNA, 31 bp, Homo sapiens
  chr21:47689608-47689639
  hypo
gcagcctccttggagccgctgccagaatggg

SEQ ID NO: 56664 - DNA, 24 bp, Homo sapiens
  chr21:47689700-47689724
  hypo
tgcactgaacggaatcatgcaggg

SEQ ID NO: 56665 - DNA, 31 bp, Homo sapiens; identical to SEQ ID NO: 27345
  chr21:47771656-47771687
  hypo

SEQ ID NO: 56666 - DNA, 19 bp, Homo sapiens
  chr21:47771742-47771761
  hypo
taccagtggtgctgagcgt

SEQ ID NO: 56667 - DNA, 146 bp, Homo sapiens; identical to SEQ ID NO: 27347
  chr21:47774501-47774647
  hypo

SEQ ID NO: 56668 - DNA, 31 bp, Homo sapiens; identical to SEQ ID NO: 27348
  chr21:47774724-47774755
  hypo

SEQ ID NO: 56669 - DNA, 61 bp, Homo sapiens; identical to SEQ ID NO: 27349
  chr21:47774790-47774851
  hypo

SEQ ID NO: 56670 - DNA, 31 bp, Homo sapiens; identical to SEQ ID NO: 27350
  chr21:47774883-47774914
  hypo

SEQ ID NO: 56671 - DNA, 31 bp, Homo sapiens; identical to SEQ ID NO: 27351
  chr21:47774917-47774948
  hypo

SEQ ID NO: 56672 - DNA, 31 bp, Homo sapiens; identical to SEQ ID NO: 27352
  chr21:47775408-47775439
  hypo

SEQ ID NO: 56673 - DNA, 55 bp, Homo sapiens; identical to SEQ ID NO: 27353
  chr21:47775463-47775518
  hypo

SEQ ID NO: 56674 - DNA, 65 bp, Homo sapiens; identical to SEQ ID NO: 27354
  chr21:47775605-47775670
  hypo

SEQ ID NO: 56675 - DNA, 40 bp, Homo sapiens; identical to SEQ ID NO: 27355
  chr21:47775695-47775735
  hypo

SEQ ID NO: 56676 - DNA, 14 bp, Homo sapiens
  chr21:47799168-47799182
  hypo
ccgtcttcctgggc

SEQ ID NO: 56677 - DNA, 52 bp, Homo sapiens; identical to SEQ ID NO: 40451
  chr21:47799225-47799277
  hypo

SEQ ID NO: 56678 - DNA, 131 bp, Homo sapiens; identical to SEQ ID NO: 27357
  chr21:47805828-47805959
  hypo

SEQ ID NO: 56679 - DNA, 31 bp, Homo sapiens; identical to SEQ ID NO: 27358
  chr21:47833102-47833133
  hypo

SEQ ID NO: 56680 - DNA, 31 bp, Homo sapiens; identical to SEQ ID NO: 27359
  chr21:47833359-47833390
  hypo

SEQ ID NO: 56681 - DNA, 63 bp, Homo sapiens; identical to SEQ ID NO: 27360
  chr21:47833403-47833466
  hypo

SEQ ID NO: 56682 - DNA, 31 bp, Homo sapiens; identical to SEQ ID NO: 27361
  chr21:47833516-47833547
  hypo

SEQ ID NO: 56683 - DNA, 31 bp, Homo sapiens; identical to SEQ ID NO: 27362
  chr21:48018213-48018244
  hypo

SEQ ID NO: 56684 - DNA, 31 bp, Homo sapiens; identical to SEQ ID NO: 27363
  chr21:48018510-48018541
  hypo

SEQ ID NO: 56685 - DNA, 31 bp, Homo sapiens; identical to SEQ ID NO: 27364
  chr22:16216477-16216508
  hypo

SEQ ID NO: 56686 - DNA, 38 bp, Homo sapiens; identical to SEQ ID NO: 27365
  chr22:16216518-16216556
  hypo

SEQ ID NO: 56687 - DNA, 31 bp, Homo sapiens; identical to SEQ ID NO: 27366
  chr22:17970197-17970228
  hypo

SEQ ID NO: 56688 - DNA, 31 bp, Homo sapiens; identical to SEQ ID NO: 27368
  chr22:18084141-18084172
  hypo

SEQ ID NO: 56689 - DNA, 61 bp, Homo sapiens; identical to SEQ ID NO: 27369
  chr22:18084184-18084245
  hypo

SEQ ID NO: 56690 - DNA, 12 bp, Homo sapiens
  chr22:18265465-18265477
  hypo
aggcctgggcag

SEQ ID NO: 56691 - DNA, 52 bp, Homo sapiens; identical to SEQ ID NO: 27373
  chr22:18295720-18295772
  hypo

SEQ ID NO: 56692 - DNA, 31 bp, Homo sapiens; identical to SEQ ID NO: 27374
  chr22:18295775-18295806
  hypo

SEQ ID NO: 56693 - DNA, 31 bp, Homo sapiens; identical to SEQ ID NO: 27375
  chr22:18301739-18301770
  hypo

SEQ ID NO: 56694 - DNA, 31 bp, Homo sapiens; identical to SEQ ID NO: 27376
  chr22:18301995-18302026
  hypo

SEQ ID NO: 56695 - DNA, 45 bp, Homo sapiens; identical to SEQ ID NO: 27378
  chr22:18363712-18363757
  hypo

SEQ ID NO: 56696 - DNA, 40 bp, Homo sapiens; identical to SEQ ID NO: 27379
  chr22:18363819-18363859
  hypo

SEQ ID NO: 56697 - DNA, 31 bp, Homo sapiens; identical to SEQ ID NO: 27380
  chr22:18371276-18371307
  hypo

SEQ ID NO: 56698 - DNA, 31 bp, Homo sapiens; identical to SEQ ID NO: 27381
  chr22:18435777-18435808
  hypo

SEQ ID NO: 56699 - DNA, 31 bp, Homo sapiens; identical to SEQ ID NO: 27382
  chr22:18530298-18530329
  hypo

SEQ ID NO: 56700 - DNA, 2 bp, Homo sapiens
  chr22:18553592-18553594
  hypo
tc

SEQ ID NO: 56701 - DNA, 2 bp, Homo sapiens
  chr22:18553828-18553830
  hypo
ca

SEQ ID NO: 56702 - DNA, 31 bp, Homo sapiens; identical to SEQ ID NO: 27386
  chr22:18620943-18620974
  hypo

SEQ ID NO: 56703 - DNA, 31 bp, Homo sapiens; identical to SEQ ID NO: 27387
  chr22:18641800-18641831
  hypo

SEQ ID NO: 56704 - DNA, 98 bp, Homo sapiens; identical to SEQ ID NO: 27388
  chr22:18951682-18951780
  hypo

SEQ ID NO: 56705 - DNA, 25 bp, Homo sapiens
  chr22:19011962-19011987
  hypo
tgtccaggaccgtgtcactaggcat

SEQ ID NO: 56706 - DNA, 2 bp, Homo sapiens
  chr22:19020498-19020500
  hypo
tg

SEQ ID NO: 56707 - DNA, 31 bp, Homo sapiens; identical to SEQ ID NO: 27391
  chr22:19048398-19048429
  hypo

SEQ ID NO: 56708 - DNA, 57 bp, Homo sapiens; identical to SEQ ID NO: 27392
  chr22:19120093-19120150
  hypo

SEQ ID NO: 56709 - DNA, 31 bp, Homo sapiens; identical to SEQ ID NO: 27393
  chr22:19120154-19120185
  hypo

SEQ ID NO: 56710 - DNA, 37 bp, Homo sapiens; identical to SEQ ID NO: 27394
  chr22:19584222-19584259
  hypo

SEQ ID NO: 56711 - DNA, 109 bp, Homo sapiens; identical to SEQ ID NO: 27395
  chr22:19605267-19605376
  hypo

SEQ ID NO: 56712 - DNA, 31 bp, Homo sapiens; identical to SEQ ID NO: 27396
  chr22:19621108-19621139
  hypo

SEQ ID NO: 56713 - DNA, 31 bp, Homo sapiens; identical to SEQ ID NO: 27397
  chr22:19621145-19621176
  hypo

SEQ ID NO: 56714 - DNA, 31 bp, Homo sapiens; identical to SEQ ID NO: 27398
  chr22:19624102-19624133
  hypo

SEQ ID NO: 56715 - DNA, 31 bp, Homo sapiens; identical to SEQ ID NO: 27399
  chr22:19683861-19683892
  hypo

SEQ ID NO: 56716 - DNA, 31 bp, Homo sapiens; identical to SEQ ID NO: 27400
  chr22:19697756-19697787
  hypo

SEQ ID NO: 56717 - DNA, 37 bp, Homo sapiens; identical to SEQ ID NO: 27404
  chr22:19725675-19725712
  hypo

SEQ ID NO: 56718 - DNA, 24 bp, Homo sapiens
  chr22:19856432-19856456
  hypo
cactgggggcccccaccgtggtgg

SEQ ID NO: 56719 - DNA, 31 bp, Homo sapiens; identical to SEQ ID NO: 27408
  chr22:19856507-19856538
  hypo

SEQ ID NO: 56720 - DNA, 39 bp, Homo sapiens; identical to SEQ ID NO: 27409
  chr22:19856543-19856582
  hypo

SEQ ID NO: 56721 - DNA, 31 bp, Homo sapiens; identical to SEQ ID NO: 27410
  chr22:19870366-19870397
  hypo

SEQ ID NO: 56722 - DNA, 56 bp, Homo sapiens; identical to SEQ ID NO: 27411
  chr22:19870406-19870462
  hypo

SEQ ID NO: 56723 - DNA, 31 bp, Homo sapiens; identical to SEQ ID NO: 27412
  chr22:19870468-19870499
  hypo

SEQ ID NO: 56724 - DNA, 56 bp, Homo sapiens; identical to SEQ ID NO: 27413
  chr22:19870814-19870870
  hypo

SEQ ID NO: 56725 - DNA, 31 bp, Homo sapiens; identical to SEQ ID NO: 27414
  chr22:19882798-19882829
  hypo

SEQ ID NO: 56726 - DNA, 63 bp, Homo sapiens; identical to SEQ ID NO: 27415
  chr22:19882870-19882933
  hypo

SEQ ID NO: 56727 - DNA, 59 bp, Homo sapiens; identical to SEQ ID NO: 27416
  chr22:19891184-19891243
  hypo

SEQ ID NO: 56728 - DNA, 51 bp, Homo sapiens; identical to SEQ ID NO: 27417
  chr22:19891247-19891298
  hypo

SEQ ID NO: 56729 - DNA, 31 bp, Homo sapiens; identical to SEQ ID NO: 27418
  chr22:19899722-19899753
  hypo

SEQ ID NO: 56730 - DNA, 31 bp, Homo sapiens; identical to SEQ ID NO: 27419
  chr22:19963989-19964020
  hypo

SEQ ID NO: 56731 - DNA, 50 bp, Homo sapiens; identical to SEQ ID NO: 27420
  chr22:19966500-19966550
  hypo

SEQ ID NO: 56732 - DNA, 62 bp, Homo sapiens; identical to SEQ ID NO: 27421
  chr22:19966597-19966659
  hypo

SEQ ID NO: 56733 - DNA, 31 bp, Homo sapiens; identical to SEQ ID NO: 27422
  chr22:19967263-19967294
  hypo

SEQ ID NO: 56734 - DNA, 87 bp, Homo sapiens; identical to SEQ ID NO: 27423
  chr22:19967296-19967383
  hypo

SEQ ID NO: 56735 - DNA, 31 bp, Homo sapiens; identical to SEQ ID NO: 27424
  chr22:19967534-19967565
  hypo

SEQ ID NO: 56736 - DNA, 31 bp, Homo sapiens; identical to SEQ ID NO: 27425
  chr22:19969119-19969150
  hypo

SEQ ID NO: 56737 - DNA, 76 bp, Homo sapiens; identical to SEQ ID NO: 27426
  chr22:19978173-19978249
  hypo

SEQ ID NO: 56738 - DNA, 31 bp, Homo sapiens; identical to SEQ ID NO: 27427
  chr22:20019038-20019069
  hypo

SEQ ID NO: 56739 - DNA, 31 bp, Homo sapiens; identical to SEQ ID NO: 27428
  chr22:20087955-20087986
  hypo

SEQ ID NO: 56740 - DNA, 31 bp, Homo sapiens; identical to SEQ ID NO: 27429
  chr22:20123637-20123668
  hypo

SEQ ID NO: 56741 - DNA, 41 bp, Homo sapiens; identical to SEQ ID NO: 27430
  chr22:20123929-20123970
  hypo

SEQ ID NO: 56742 - DNA, 36 bp, Homo sapiens; identical to SEQ ID NO: 27431
  chr22:20126323-20126359
  hypo

SEQ ID NO: 56743 - DNA, 72 bp, Homo sapiens; identical to SEQ ID NO: 27432
  chr22:20126368-20126440
  hypo

SEQ ID NO: 56744 - DNA, 63 bp, Homo sapiens; identical to SEQ ID NO: 27433
  chr22:20126451-20126514
  hypo

SEQ ID NO: 56745 - DNA, 31 bp, Homo sapiens; identical to SEQ ID NO: 27434
  chr22:20200274-20200305
  hypo

SEQ ID NO: 56746 - DNA, 31 bp, Homo sapiens; identical to SEQ ID NO: 27435
  chr22:20243597-20243628
  hypo

SEQ ID NO: 56747 - DNA, 45 bp, Homo sapiens; identical to SEQ ID NO: 27436
  chr22:20248010-20248055
  hypo

SEQ ID NO: 56748 - DNA, 60 bp, Homo sapiens; identical to SEQ ID NO: 27437
  chr22:20248056-20248116
  hypo

SEQ ID NO: 56749 - DNA, 35 bp, Homo sapiens; identical to SEQ ID NO: 27438
  chr22:20248137-20248172
  hypo

SEQ ID NO: 56750 - DNA, 82 bp, Homo sapiens; identical to SEQ ID NO: 7251
  chr22:20255236-20255318
  hypo

SEQ ID NO: 56751 - DNA, 182 bp, Homo sapiens; identical to SEQ ID NO: 7252
  chr22:20255327-20255509
  hypo

SEQ ID NO: 56752 - DNA, 84 bp, Homo sapiens; identical to SEQ ID NO: 7253
  chr22:20255583-20255667
  hypo

SEQ ID NO: 56753 - DNA, 31 bp, Homo sapiens; identical to SEQ ID NO: 27443
  chr22:20258984-20259015
  hypo

SEQ ID NO: 56754 - DNA, 3 bp, Homo sapiens
  chr22:20285991-20285994
  hypo
ttg

SEQ ID NO: 56755 - DNA, 52 bp, Homo sapiens
  chr22:20308709-20308761
  hypo
agtgaataatgacaagcgctcaggccactgccgtggagggcggtccacaacc

SEQ ID NO: 56756 - DNA, 34 bp, Homo sapiens; identical to SEQ ID NO: 27446
  chr22:20760012-20760046
  hypo

SEQ ID NO: 56757 - DNA, 9 bp, Homo sapiens
  chr22:20765458-20765467
  hypo
acaataaga

SEQ ID NO: 56758 - DNA, 14 bp, Homo sapiens
  chr22:20765489-20765503
  hypo
gttcatgacacaga

SEQ ID NO: 56759 - DNA, 31 bp, Homo sapiens; identical to SEQ ID NO: 27448
  chr22:20788840-20788871
  hypo

SEQ ID NO: 56760 - DNA, 31 bp, Homo sapiens; identical to SEQ ID NO: 27450
  chr22:20857333-20857364
  hypo

SEQ ID NO: 56761 - DNA, 31 bp, Homo sapiens; identical to SEQ ID NO: 27452
  chr22:20929390-20929421
  hypo

SEQ ID NO: 56762 - DNA, 113 bp, Homo sapiens; identical to SEQ ID NO: 27453
  chr22:20958607-20958720
  hypo

SEQ ID NO: 56763 - DNA, 31 bp, Homo sapiens; identical to SEQ ID NO: 27454
  chr22:20976181-20976212
  hypo

SEQ ID NO: 56764 - DNA, 51 bp, Homo sapiens; identical to SEQ ID NO: 27455
  chr22:21058304-21058355
  hypo

SEQ ID NO: 56765 - DNA, 31 bp, Homo sapiens; identical to SEQ ID NO: 27456
  chr22:21101700-21101731
  hypo

SEQ ID NO: 56766 - DNA, 49 bp, Homo sapiens; identical to SEQ ID NO: 27457
  chr22:21101923-21101972
  hypo

SEQ ID NO: 56767 - DNA, 2 bp, Homo sapiens
  chr22:21105243-21105245
  hypo
ga

SEQ ID NO: 56768 - DNA, 2 bp, Homo sapiens
  chr22:21150527-21150529
  hypo
tc

SEQ ID NO: 56769 - DNA, 2 bp, Homo sapiens
  chr22:21153866-21153868
  hypo
ga

SEQ ID NO: 56770 - DNA, 24 bp, Homo sapiens
  chr22:21154023-21154047
  hypo
tgggtccaccgtcaatccagcctt

SEQ ID NO: 56771 - DNA, 2 bp, Homo sapiens
  chr22:21214251-21214253
  hypo
ct

SEQ ID NO: 56772 - DNA, 31 bp, Homo sapiens; identical to SEQ ID NO: 27465
  chr22:21331193-21331224
  hypo

SEQ ID NO: 56773 - DNA, 31 bp, Homo sapiens; identical to SEQ ID NO: 27466
  chr22:21348153-21348184
  hypo

SEQ ID NO: 56774 - DNA, 31 bp, Homo sapiens; identical to SEQ ID NO: 27467
  chr22:21385763-21385794
  hypo

SEQ ID NO: 56775 - DNA, 31 bp, Homo sapiens; identical to SEQ ID NO: 27468
  chr22:21408212-21408243
  hypo

SEQ ID NO: 56776 - DNA, 37 bp, Homo sapiens; identical to SEQ ID NO: 27469
  chr22:21983043-21983080
  hypo

SEQ ID NO: 56777 - DNA, 31 bp, Homo sapiens; identical to SEQ ID NO: 27470
  chr22:22044380-22044411
  hypo

SEQ ID NO: 56778 - DNA, 31 bp, Homo sapiens; identical to SEQ ID NO: 7259
  chr22:22221290-22221321
  hypo

SEQ ID NO: 56779 - DNA, 31 bp, Homo sapiens; identical to SEQ ID NO: 7261
  chr22:22307336-22307367
  hypo

SEQ ID NO: 56780 - DNA, 31 bp, Homo sapiens; identical to SEQ ID NO: 27478
  chr22:23446549-23446580
  hypo

SEQ ID NO: 56781 - DNA, 234 bp, Homo sapiens; identical to SEQ ID NO: 7266
  chr22:23523109-23523343
  hypo

SEQ ID NO: 56782 - DNA, 31 bp, Homo sapiens; identical to SEQ ID NO: 27480
  chr22:23737248-23737279
  hypo

SEQ ID NO: 56783 - DNA, 49 bp, Homo sapiens; identical to SEQ ID NO: 27481
  chr22:23737299-23737348
  hypo

SEQ ID NO: 56784 - DNA, 31 bp, Homo sapiens; identical to SEQ ID NO: 27482
  chr22:23793189-23793220
  hypo

SEQ ID NO: 56785 - DNA, 50 bp, Homo sapiens; identical to SEQ ID NO: 27483
  chr22:23877155-23877205
  hypo

SEQ ID NO: 56786 - DNA, 31 bp, Homo sapiens; identical to SEQ ID NO: 27484
  chr22:23877217-23877248
  hypo

SEQ ID NO: 56787 - DNA, 31 bp, Homo sapiens; identical to SEQ ID NO: 27485
  chr22:24061195-24061226
  hypo

SEQ ID NO: 56788 - DNA, 31 bp, Homo sapiens; identical to SEQ ID NO: 27486
  chr22:24133890-24133921
  hypo

SEQ ID NO: 56789 - DNA, 109 bp, Homo sapiens; identical to SEQ ID NO: 27487
  chr22:24159864-24159973
  hypo

SEQ ID NO: 56790 - DNA, 31 bp, Homo sapiens; identical to SEQ ID NO: 27488
  chr22:24205145-24205176
  hypo

SEQ ID NO: 56791 - DNA, 31 bp, Homo sapiens; identical to SEQ ID NO: 27489
  chr22:24212828-24212859
  hypo

SEQ ID NO: 56792 - DNA, 148 bp, Homo sapiens; identical to SEQ ID NO: 7285
  chr22:24552963-24553111
  hypo

SEQ ID NO: 56793 - DNA, 2 bp, Homo sapiens
  chr22:24820073-24820075
  hypo
ct

SEQ ID NO: 56794 - DNA, 31 bp, Homo sapiens; identical to SEQ ID NO: 27499
  chr22:24983097-24983128
  hypo

SEQ ID NO: 56795 - DNA, 92 bp, Homo sapiens; identical to SEQ ID NO: 7291
  chr22:24989195-24989287
  hypo

SEQ ID NO: 56796 - DNA, 31 bp, Homo sapiens; identical to SEQ ID NO: 27501
  chr22:25097060-25097091
  hypo

SEQ ID NO: 56797 - DNA, 31 bp, Homo sapiens; identical to SEQ ID NO: 27502
  chr22:25251163-25251194
  hypo

SEQ ID NO: 56798 - DNA, 31 bp, Homo sapiens; identical to SEQ ID NO: 27504
  chr22:25347731-25347762
  hypo

SEQ ID NO: 56799 - DNA, 68 bp, Homo sapiens; identical to SEQ ID NO: 7294
  chr22:25348311-25348379
  hypo

SEQ ID NO: 56800 - DNA, 55 bp, Homo sapiens; identical to SEQ ID NO: 40476
  chr22:25348388-25348443
  hypo

SEQ ID NO: 56801 - DNA, 198 bp, Homo sapiens; identical to SEQ ID NO: 40477
  chr22:25348485-25348683
  hypo

SEQ ID NO: 56802 - DNA, 184 bp, Homo sapiens; identical to SEQ ID NO: 7296
  chr22:25348802-25348986
  hypo

SEQ ID NO: 56803 - DNA, 58 bp, Homo sapiens; identical to SEQ ID NO: 7297
  chr22:25349110-25349168
  hypo

SEQ ID NO: 56804 - DNA, 31 bp, Homo sapiens; identical to SEQ ID NO: 7298
  chr22:25349197-25349228
  hypo

SEQ ID NO: 56805 - DNA, 2 bp, Homo sapiens
  chr22:25349271-25349273
  hypo
gg

SEQ ID NO: 56806 - DNA, 158 bp, Homo sapiens; identical to SEQ ID NO: 40482
  chr22:25349348-25349506
  hypo

SEQ ID NO: 56807 - DNA, 31 bp, Homo sapiens; identical to SEQ ID NO: 27511
  chr22:25388947-25388978
  hypo

SEQ ID NO: 56808 - DNA, 58 bp, Homo sapiens; identical to SEQ ID NO: 27512
  chr22:25461274-25461332
  hypo

SEQ ID NO: 56809 - DNA, 49 bp, Homo sapiens; identical to SEQ ID NO: 27513
  chr22:25461375-25461424
  hypo

SEQ ID NO: 56810 - DNA, 31 bp, Homo sapiens; identical to SEQ ID NO: 27514
  chr22:25461434-25461465
  hypo

SEQ ID NO: 56811 - DNA, 60 bp, Homo sapiens; identical to SEQ ID NO: 27515
  chr22:25462989-25463049
  hypo

SEQ ID NO: 56812 - DNA, 31 bp, Homo sapiens; identical to SEQ ID NO: 27516
  chr22:25463146-25463177
  hypo

SEQ ID NO: 56813 - DNA, 31 bp, Homo sapiens; identical to SEQ ID NO: 27517
  chr22:25463395-25463426
  hypo

SEQ ID NO: 56814 - DNA, 31 bp, Homo sapiens; identical to SEQ ID NO: 27518
  chr22:25483616-25483647
  hypo

SEQ ID NO: 56815 - DNA, 31 bp, Homo sapiens; identical to SEQ ID NO: 27519
  chr22:25492972-25493003
  hypo

SEQ ID NO: 56816 - DNA, 38 bp, Homo sapiens; identical to SEQ ID NO: 27520
  chr22:25505389-25505427
  hypo

SEQ ID NO: 56817 - DNA, 47 bp, Homo sapiens; identical to SEQ ID NO: 27521
  chr22:25505428-25505475
  hypo

SEQ ID NO: 56818 - DNA, 31 bp, Homo sapiens; identical to SEQ ID NO: 27522
  chr22:25536599-25536630
  hypo

SEQ ID NO: 56819 - DNA, 31 bp, Homo sapiens; identical to SEQ ID NO: 27524
  chr22:25548090-25548121
  hypo

SEQ ID NO: 56820 - DNA, 31 bp, Homo sapiens; identical to SEQ ID NO: 27525
  chr22:25561923-25561954
  hypo

SEQ ID NO: 56821 - DNA, 68 bp, Homo sapiens; identical to SEQ ID NO: 27526
  chr22:25562037-25562105
  hypo

SEQ ID NO: 56822 - DNA, 60 bp, Homo sapiens; identical to SEQ ID NO: 27527
  chr22:25562118-25562178
  hypo

SEQ ID NO: 56823 - DNA, 31 bp, Homo sapiens; identical to SEQ ID NO: 27528
  chr22:25562187-25562218
  hypo

SEQ ID NO: 56824 - DNA, 31 bp, Homo sapiens; identical to SEQ ID NO: 27529
  chr22:25562220-25562251
  hypo

SEQ ID NO: 56825 - DNA, 44 bp, Homo sapiens; identical to SEQ ID NO: 27530
  chr22:25573210-25573254
  hypo

SEQ ID NO: 56826 - DNA, 83 bp, Homo sapiens; identical to SEQ ID NO: 27531
  chr22:25573312-25573395
  hypo

SEQ ID NO: 56827 - DNA, 38 bp, Homo sapiens; identical to SEQ ID NO: 27533
  chr22:25603310-25603348
  hypo

SEQ ID NO: 56828 - DNA, 43 bp, Homo sapiens; identical to SEQ ID NO: 27534
  chr22:25756561-25756604
  hypo

SEQ ID NO: 56829 - DNA, 31 bp, Homo sapiens; identical to SEQ ID NO: 27535
  chr22:25826675-25826706
  hypo

SEQ ID NO: 56830 - DNA, 31 bp, Homo sapiens; identical to SEQ ID NO: 27536
  chr22:26118123-26118154
  hypo

SEQ ID NO: 56831 - DNA, 31 bp, Homo sapiens; identical to SEQ ID NO: 27537
  chr22:26176160-26176191
  hypo

SEQ ID NO: 56832 - DNA, 69 bp, Homo sapiens; identical to SEQ ID NO: 27538
  chr22:27019111-27019180
  hypo

SEQ ID NO: 56833 - DNA, 31 bp, Homo sapiens; identical to SEQ ID NO: 27541
  chr22:27887474-27887505
  hypo

SEQ ID NO: 56834 - DNA, 31 bp, Homo sapiens; identical to SEQ ID NO: 27542
  chr22:27976916-27976947
  hypo

SEQ ID NO: 56835 - DNA, 2 bp, Homo sapiens
  chr22:28371503-28371505
  hypo
aa

SEQ ID NO: 56836 - DNA, 27 bp, Homo sapiens
  chr22:28371724-28371751
  hypo
tgatctcagctgcgtctttagatagcc

SEQ ID NO: 56837 - DNA, 31 bp, Homo sapiens; identical to SEQ ID NO: 7317
  chr22:29279216-29279247
  hypo

SEQ ID NO: 56838 - DNA, 31 bp, Homo sapiens; identical to SEQ ID NO: 27548
  chr22:29435188-29435219
  hypo

SEQ ID NO: 56839 - DNA, 31 bp, Homo sapiens; identical to SEQ ID NO: 27549
  chr22:29435221-29435252
  hypo

SEQ ID NO: 56840 - DNA, 31 bp, Homo sapiens; identical to SEQ ID NO: 27550
  chr22:29435336-29435367
  hypo

SEQ ID NO: 56841 - DNA, 173 bp, Homo sapiens; identical to SEQ ID NO: 7320
  chr22:29468802-29468975
  hypo

SEQ ID NO: 56842 - DNA, 35 bp, Homo sapiens; identical to SEQ ID NO: 7321
  chr22:29469137-29469172
  hypo

SEQ ID NO: 56843 - DNA, 63 bp, Homo sapiens; identical to SEQ ID NO: 7322
  chr22:29469213-29469276
  hypo

SEQ ID NO: 56844 - DNA, 91 bp, Homo sapiens; identical to SEQ ID NO: 27555
  chr22:29482647-29482738
  hypo

SEQ ID NO: 56845 - DNA, 31 bp, Homo sapiens; identical to SEQ ID NO: 27558
  chr22:29533686-29533717
  hypo

SEQ ID NO: 56846 - DNA, 31 bp, Homo sapiens; identical to SEQ ID NO: 27559
  chr22:29534522-29534553
  hypo

SEQ ID NO: 56847 - DNA, 31 bp, Homo sapiens; identical to SEQ ID NO: 27560
  chr22:29607571-29607602
  hypo

SEQ ID NO: 56848 - DNA, 42 bp, Homo sapiens; identical to SEQ ID NO: 27562
  chr22:29627463-29627505
  hypo

SEQ ID NO: 56849 - DNA, 57 bp, Homo sapiens; identical to SEQ ID NO: 27563
  chr22:29686341-29686398
  hypo

SEQ ID NO: 56850 - DNA, 78 bp, Homo sapiens; identical to SEQ ID NO: 27564
  chr22:29686432-29686510
  hypo

SEQ ID NO: 56851 - DNA, 57 bp, Homo sapiens; identical to SEQ ID NO: 7324
  chr22:29702351-29702408
  hypo

SEQ ID NO: 56852 - DNA, 536 bp, Homo sapiens; identical to SEQ ID NO: 7327
  chr22:29702784-29703320
  hypo

SEQ ID NO: 56853 - DNA, 31 bp, Homo sapiens; identical to SEQ ID NO: 27568
  chr22:29714173-29714204
  hypo

SEQ ID NO: 56854 - DNA, 31 bp, Homo sapiens; identical to SEQ ID NO: 27569
  chr22:29714206-29714237
  hypo

SEQ ID NO: 56855 - DNA, 31 bp, Homo sapiens; identical to SEQ ID NO: 27570
  chr22:29714242-29714273
  hypo

SEQ ID NO: 56856 - DNA, 31 bp, Homo sapiens; identical to SEQ ID NO: 27571
  chr22:29714293-29714324
  hypo

SEQ ID NO: 56857 - DNA, 31 bp, Homo sapiens; identical to SEQ ID NO: 27572
  chr22:29845783-29845814
  hypo

SEQ ID NO: 56858 - DNA, 31 bp, Homo sapiens
  chr22:29997159-29997190
  hypo
tgggttcccagtgtcacgcattttctttttc

SEQ ID NO: 56859 - DNA, 31 bp, Homo sapiens; identical to SEQ ID NO: 27578
  chr22:30091070-30091101
  hypo

SEQ ID NO: 56860 - DNA, 2 bp, Homo sapiens
  chr22:30091109-30091111
  hypo
ca

SEQ ID NO: 56861 - DNA, 2 bp, Homo sapiens
  chr22:30158329-30158331
  hypo
cc

SEQ ID NO: 56862 - DNA, 35 bp, Homo sapiens; identical to SEQ ID NO: 27586
  chr22:30431159-30431194
  hypo

SEQ ID NO: 56863 - DNA, 38 bp, Homo sapiens; identical to SEQ ID NO: 27587
  chr22:30624612-30624650
  hypo

SEQ ID NO: 56864 - DNA, 88 bp, Homo sapiens; identical to SEQ ID NO: 27588
  chr22:30624710-30624798
  hypo

SEQ ID NO: 56865 - DNA, 87 bp, Homo sapiens; identical to SEQ ID NO: 27589
  chr22:30656575-30656662
  hypo

SEQ ID NO: 56866 - DNA, 38 bp, Homo sapiens; identical to SEQ ID NO: 27590
  chr22:30656664-30656702
  hypo

SEQ ID NO: 56867 - DNA, 48 bp, Homo sapiens; identical to SEQ ID NO: 27591
  chr22:30656725-30656773
  hypo

SEQ ID NO: 56868 - DNA, 31 bp, Homo sapiens; identical to SEQ ID NO: 27592
  chr22:30681972-30682003
  hypo

SEQ ID NO: 56869 - DNA, 36 bp, Homo sapiens; identical to SEQ ID NO: 27593
  chr22:30682009-30682045
  hypo

SEQ ID NO: 56870 - DNA, 189 bp, Homo sapiens; identical to SEQ ID NO: 7328
  chr22:30792948-30793137
  hypo

SEQ ID NO: 56871 - DNA, 31 bp, Homo sapiens; identical to SEQ ID NO: 27596
  chr22:30934840-30934871
  hypo

SEQ ID NO: 56872 - DNA, 31 bp, Homo sapiens; identical to SEQ ID NO: 27597
  chr22:30951582-30951613
  hypo

SEQ ID NO: 56873 - DNA, 31 bp, Homo sapiens; identical to SEQ ID NO: 7329
  chr22:31002802-31002833
  hypo

SEQ ID NO: 56874 - DNA, 31 bp, Homo sapiens; identical to SEQ ID NO: 27600
  chr22:31049308-31049339
  hypo

SEQ ID NO: 56875 - DNA, 51 bp, Homo sapiens; identical to SEQ ID NO: 27601
  chr22:31059625-31059676
  hypo

SEQ ID NO: 56876 - DNA, 31 bp, Homo sapiens; identical to SEQ ID NO: 27602
  chr22:31069874-31069905
  hypo

SEQ ID NO: 56877 - DNA, 63 bp, Homo sapiens; identical to SEQ ID NO: 27603
  chr22:31078360-31078423
  hypo

SEQ ID NO: 56878 - DNA, 58 bp, Homo sapiens; identical to SEQ ID NO: 27604
  chr22:31078468-31078526
  hypo

SEQ ID NO: 56879 - DNA, 31 bp, Homo sapiens; identical to SEQ ID NO: 27607
  chr22:31169372-31169403
  hypo

SEQ ID NO: 56880 - DNA, 259 bp, Homo sapiens; identical to SEQ ID NO: 40508
  chr22:31198752-31199011
  hypo

SEQ ID NO: 56881 - DNA, 93 bp, Homo sapiens; identical to SEQ ID NO: 7333
  chr22:31199058-31199151
  hypo

SEQ ID NO: 56882 - DNA, 31 bp, Homo sapiens; identical to SEQ ID NO: 27611
  chr22:31220229-31220260
  hypo

SEQ ID NO: 56883 - DNA, 31 bp, Homo sapiens; identical to SEQ ID NO: 27612
  chr22:31225040-31225071
  hypo

SEQ ID NO: 56884 - DNA, 46 bp, Homo sapiens; identical to SEQ ID NO: 27613
  chr22:31250070-31250116
  hypo

SEQ ID NO: 56885 - DNA, 31 bp, Homo sapiens; identical to SEQ ID NO: 27614
  chr22:31260513-31260544
  hypo

SEQ ID NO: 56886 - DNA, 31 bp, Homo sapiens; identical to SEQ ID NO: 27615
  chr22:31260801-31260832
  hypo

SEQ ID NO: 56887 - DNA, 85 bp, Homo sapiens; identical to SEQ ID NO: 27616
  chr22:31260845-31260930
  hypo

SEQ ID NO: 56888 - DNA, 138 bp, Homo sapiens; identical to SEQ ID NO: 27617
  chr22:31264324-31264462
  hypo

SEQ ID NO: 56889 - DNA, 31 bp, Homo sapiens; identical to SEQ ID NO: 27618
  chr22:31264531-31264562
  hypo

SEQ ID NO: 56890 - DNA, 72 bp, Homo sapiens; identical to SEQ ID NO: 27619
  chr22:31266611-31266683
  hypo

SEQ ID NO: 56891 - DNA, 31 bp, Homo sapiens; identical to SEQ ID NO: 27620
  chr22:31266927-31266958
  hypo

SEQ ID NO: 56892 - DNA, 31 bp, Homo sapiens; identical to SEQ ID NO: 27621
  chr22:31271735-31271766
  hypo

SEQ ID NO: 56893 - DNA, 31 bp, Homo sapiens; identical to SEQ ID NO: 27622
  chr22:31276138-31276169
  hypo

SEQ ID NO: 56894 - DNA, 51 bp, Homo sapiens; identical to SEQ ID NO: 27623
  chr22:31279749-31279800
  hypo

SEQ ID NO: 56895 - DNA, 35 bp, Homo sapiens; identical to SEQ ID NO: 27624
  chr22:31279915-31279950
  hypo

SEQ ID NO: 56896 - DNA, 31 bp, Homo sapiens; identical to SEQ ID NO: 27625
  chr22:31365680-31365711
  hypo

SEQ ID NO: 56897 - DNA, 66 bp, Homo sapiens
  chr22:31494667-31494733
  hypo
ggaccaggccagcccacgggccggcagcctggcggcgctcgagaaacggcaggccgagaagaagaa

SEQ ID NO: 56898 - DNA, 31 bp, Homo sapiens; identical to SEQ ID NO: 27629
  chr22:31532734-31532765
  hypo

SEQ ID NO: 56899 - DNA, 31 bp, Homo sapiens; identical to SEQ ID NO: 27630
  chr22:31532982-31533013
  hypo

SEQ ID NO: 56900 - DNA, 31 bp, Homo sapiens; identical to SEQ ID NO: 27631
  chr22:31609769-31609800
  hypo

SEQ ID NO: 56901 - DNA, 45 bp, Homo sapiens; identical to SEQ ID NO: 27632
  chr22:31744072-31744117
  hypo

SEQ ID NO: 56902 - DNA, 30 bp, Homo sapiens; identical to SEQ ID NO: 27633
  chr22:31942753-31942783
  hypo

SEQ ID NO: 56903 - DNA, 72 bp, Homo sapiens; identical to SEQ ID NO: 27634
  chr22:31942825-31942897
  hypo

SEQ ID NO: 56904 - DNA, 31 bp, Homo sapiens; identical to SEQ ID NO: 27635
  chr22:32001194-32001225
  hypo

SEQ ID NO: 56905 - DNA, 16 bp, Homo sapiens
  chr22:32009373-32009389
  hypo
ggaggagaaagaaggc

SEQ ID NO: 56906 - DNA, 31 bp, Homo sapiens; identical to SEQ ID NO: 27637
  chr22:32009429-32009460
  hypo

SEQ ID NO: 56907 - DNA, 9 bp, Homo sapiens
  chr22:32356771-32356780
  hypo
aagagcaaa

SEQ ID NO: 56908 - DNA, 31 bp, Homo sapiens; identical to SEQ ID NO: 27639
  chr22:32914021-32914052
  hypo

SEQ ID NO: 56909 - DNA, 31 bp, Homo sapiens; identical to SEQ ID NO: 27640
  chr22:32914203-32914234
  hypo

SEQ ID NO: 56910 - DNA, 31 bp, Homo sapiens; identical to SEQ ID NO: 27641
  chr22:33215184-33215215
  hypo

SEQ ID NO: 56911 - DNA, 31 bp, Homo sapiens; identical to SEQ ID NO: 27642
  chr22:34061439-34061470
  hypo

SEQ ID NO: 56912 - DNA, 54 bp, Homo sapiens; identical to SEQ ID NO: 27643
  chr22:34242011-34242065
  hypo

SEQ ID NO: 56913 - DNA, 31 bp, Homo sapiens; identical to SEQ ID NO: 27644
  chr22:34242132-34242163
  hypo

SEQ ID NO: 56914 - DNA, 68 bp, Homo sapiens; identical to SEQ ID NO: 7340
  chr22:34316493-34316561
  hypo

SEQ ID NO: 56915 - DNA, 31 bp, Homo sapiens; identical to SEQ ID NO: 27646
  chr22:35730461-35730492
  hypo

SEQ ID NO: 56916 - DNA, 31 bp, Homo sapiens; identical to SEQ ID NO: 27647
  chr22:35742199-35742230
  hypo

SEQ ID NO: 56917 - DNA, 64 bp, Homo sapiens; identical to SEQ ID NO: 27648
  chr22:35742276-35742340
  hypo

SEQ ID NO: 56918 - DNA, 31 bp, Homo sapiens; identical to SEQ ID NO: 27649
  chr22:35742355-35742386
  hypo

SEQ ID NO: 56919 - DNA, 31 bp, Homo sapiens; identical to SEQ ID NO: 7341
  chr22:35746850-35746881
  hypo

SEQ ID NO: 56920 - DNA, 58 bp, Homo sapiens; identical to SEQ ID NO: 27651
  chr22:35758434-35758492
  hypo

SEQ ID NO: 56921 - DNA, 41 bp, Homo sapiens; identical to SEQ ID NO: 7342
  chr22:35768081-35768122
  hypo

SEQ ID NO: 56922 - DNA, 69 bp, Homo sapiens; identical to SEQ ID NO: 7343
  chr22:35768165-35768234
  hypo

SEQ ID NO: 56923 - DNA, 91 bp, Homo sapiens; identical to SEQ ID NO: 7344
  chr22:35777143-35777234
  hypo

SEQ ID NO: 56924 - DNA, 31 bp, Homo sapiens; identical to SEQ ID NO: 27656
  chr22:35804287-35804318
  hypo

SEQ ID NO: 56925 - DNA, 31 bp, Homo sapiens; identical to SEQ ID NO: 27657
  chr22:35842581-35842612
  hypo

SEQ ID NO: 56926 - DNA, 2 bp, Homo sapiens
  chr22:35848323-35848325
  hypo
tg

SEQ ID NO: 56927 - DNA, 31 bp, Homo sapiens; identical to SEQ ID NO: 27660
  chr22:35848706-35848737
  hypo

SEQ ID NO: 56928 - DNA, 31 bp, Homo sapiens; identical to SEQ ID NO: 27661
  chr22:36003113-36003144
  hypo

SEQ ID NO: 56929 - DNA, 58 bp, Homo sapiens; identical to SEQ ID NO: 7348
  chr22:36424336-36424394
  hypo

SEQ ID NO: 56930 - DNA, 40 bp, Homo sapiens; identical to SEQ ID NO: 7349
  chr22:36424418-36424458
  hypo

SEQ ID NO: 56931 - DNA, 52 bp, Homo sapiens; identical to SEQ ID NO: 7350
  chr22:36425194-36425246
  hypo

SEQ ID NO: 56932 - DNA, 44 bp, Homo sapiens; identical to SEQ ID NO: 7351
  chr22:36462013-36462057
  hypo

SEQ ID NO: 56933 - DNA, 67 bp, Homo sapiens; identical to SEQ ID NO: 7352
  chr22:36462100-36462167
  hypo

SEQ ID NO: 56934 - DNA, 31 bp, Homo sapiens; identical to SEQ ID NO: 27667
  chr22:36491796-36491827
  hypo

SEQ ID NO: 56935 - DNA, 31 bp, Homo sapiens; identical to SEQ ID NO: 27668
  chr22:36588478-36588509
  hypo

SEQ ID NO: 56936 - DNA, 2 bp, Homo sapiens
  chr22:36860908-36860910
  hypo
gc

SEQ ID NO: 56937 - DNA, 55 bp, Homo sapiens; identical to SEQ ID NO: 27672
  chr22:36885621-36885676
  hypo

SEQ ID NO: 56938 - DNA, 31 bp, Homo sapiens; identical to SEQ ID NO: 27673
  chr22:36885678-36885709
  hypo

SEQ ID NO: 56939 - DNA, 62 bp, Homo sapiens; identical to SEQ ID NO: 27674
  chr22:36885731-36885793
  hypo

SEQ ID NO: 56940 - DNA, 36 bp, Homo sapiens; identical to SEQ ID NO: 27677
  chr22:36907686-36907722
  hypo

SEQ ID NO: 56941 - DNA, 31 bp, Homo sapiens; identical to SEQ ID NO: 27678
  chr22:37121761-37121792
  hypo

SEQ ID NO: 56942 - DNA, 31 bp, Homo sapiens; identical to SEQ ID NO: 27680
  chr22:37367592-37367623
  hypo

SEQ ID NO: 56943 - DNA, 60 bp, Homo sapiens; identical to SEQ ID NO: 27681
  chr22:37367643-37367703
  hypo

SEQ ID NO: 56944 - DNA, 112 bp, Homo sapiens; identical to SEQ ID NO: 7356
  chr22:37414959-37415071
  hypo

SEQ ID NO: 56945 - DNA, 37 bp, Homo sapiens; identical to SEQ ID NO: 7357
  chr22:37415083-37415120
  hypo

SEQ ID NO: 56946 - DNA, 37 bp, Homo sapiens; identical to SEQ ID NO: 7358
  chr22:37415245-37415282
  hypo

SEQ ID NO: 56947 - DNA, 63 bp, Homo sapiens; identical to SEQ ID NO: 27685
  chr22:37509139-37509202
  hypo

SEQ ID NO: 56948 - DNA, 31 bp, Homo sapiens; identical to SEQ ID NO: 27686
  chr22:37509251-37509282
  hypo

SEQ ID NO: 56949 - DNA, 31 bp, Homo sapiens; identical to SEQ ID NO: 27687
  chr22:37902175-37902206
  hypo

SEQ ID NO: 56950 - DNA, 37 bp, Homo sapiens; identical to SEQ ID NO: 27688
  chr22:37902354-37902391
  hypo

SEQ ID NO: 56951 - DNA, 66 bp, Homo sapiens; identical to SEQ ID NO: 7360
  chr22:37915036-37915102
  hypo

SEQ ID NO: 56952 - DNA, 42 bp, Homo sapiens; identical to SEQ ID NO: 7361
  chr22:37915114-37915156
  hypo

SEQ ID NO: 56953 - DNA, 56 bp, Homo sapiens; identical to SEQ ID NO: 7362
  chr22:37915160-37915216
  hypo

SEQ ID NO: 56954 - DNA, 84 bp, Homo sapiens; identical to SEQ ID NO: 7363
  chr22:37915222-37915306
  hypo

SEQ ID NO: 56955 - DNA, 31 bp, Homo sapiens; identical to SEQ ID NO: 7364
  chr22:37915402-37915433
  hypo

SEQ ID NO: 56956 - DNA, 107 bp, Homo sapiens; identical to SEQ ID NO: 7365
  chr22:37956435-37956542
  hypo

SEQ ID NO: 56957 - DNA, 396 bp, Homo sapiens; identical to SEQ ID NO: 7366
  chr22:37956635-37957031
  hypo

SEQ ID NO: 56958 - DNA, 31 bp, Homo sapiens; identical to SEQ ID NO: 27698
  chr22:38021053-38021084
  hypo

SEQ ID NO: 56959 - DNA, 31 bp, Homo sapiens; identical to SEQ ID NO: 27700
  chr22:38064659-38064690
  hypo

SEQ ID NO: 56960 - DNA, 31 bp, Homo sapiens; identical to SEQ ID NO: 27701
  chr22:38208854-38208885
  hypo

SEQ ID NO: 56961 - DNA, 31 bp, Homo sapiens; identical to SEQ ID NO: 27702
  chr22:38208910-38208941
  hypo

SEQ ID NO: 56962 - DNA, 57 bp, Homo sapiens; identical to SEQ ID NO: 27703
  chr22:38209274-38209331
  hypo

SEQ ID NO: 56963 - DNA, 31 bp, Homo sapiens; identical to SEQ ID NO: 27704
  chr22:38209351-38209382
  hypo

SEQ ID NO: 56964 - DNA, 31 bp, Homo sapiens; identical to SEQ ID NO: 27705
  chr22:38209392-38209423
  hypo

SEQ ID NO: 56965 - DNA, 31 bp, Homo sapiens; identical to SEQ ID NO: 27706
  chr22:38209433-38209464
  hypo

SEQ ID NO: 56966 - DNA, 127 bp, Homo sapiens; identical to SEQ ID NO: 27707
  chr22:38209473-38209600
  hypo

SEQ ID NO: 56967 - DNA, 57 bp, Homo sapiens; identical to SEQ ID NO: 27708
  chr22:38209606-38209663
  hypo

SEQ ID NO: 56968 - DNA, 66 bp, Homo sapiens; identical to SEQ ID NO: 27709
  chr22:38211828-38211894
  hypo

SEQ ID NO: 56969 - DNA, 31 bp, Homo sapiens; identical to SEQ ID NO: 27710
  chr22:38212284-38212315
  hypo

SEQ ID NO: 56970 - DNA, 58 bp, Homo sapiens; identical to SEQ ID NO: 27711
  chr22:38329054-38329112
  hypo

SEQ ID NO: 56971 - DNA, 31 bp, Homo sapiens; identical to SEQ ID NO: 27712
  chr22:38424122-38424153
  hypo

SEQ ID NO: 56972 - DNA, 31 bp, Homo sapiens; identical to SEQ ID NO: 27713
  chr22:38424178-38424209
  hypo

SEQ ID NO: 56973 - DNA, 56 bp, Homo sapiens; identical to SEQ ID NO: 27714
  chr22:38424263-38424319
  hypo

SEQ ID NO: 56974 - DNA, 35 bp, Homo sapiens; identical to SEQ ID NO: 27715
  chr22:38486387-38486422
  hypo

SEQ ID NO: 56975 - DNA, 41 bp, Homo sapiens; identical to SEQ ID NO: 27716
  chr22:38507181-38507222
  hypo

SEQ ID NO: 56976 - DNA, 31 bp, Homo sapiens; identical to SEQ ID NO: 27717
  chr22:38507270-38507301
  hypo

SEQ ID NO: 56977 - DNA, 44 bp, Homo sapiens; identical to SEQ ID NO: 27718
  chr22:38512226-38512270
  hypo

SEQ ID NO: 56978 - DNA, 31 bp, Homo sapiens; identical to SEQ ID NO: 27719
  chr22:38512317-38512348
  hypo

SEQ ID NO: 56979 - DNA, 31 bp, Homo sapiens; identical to SEQ ID NO: 7374
  chr22:38578022-38578053
  hypo

SEQ ID NO: 56980 - DNA, 50 bp, Homo sapiens; identical to SEQ ID NO: 7375
  chr22:38578102-38578152
  hypo

SEQ ID NO: 56981 - DNA, 7 bp, Homo sapiens
  chr22:38578708-38578715
  hypo
caccacg

SEQ ID NO: 56982 - DNA, 31 bp, Homo sapiens; identical to SEQ ID NO: 27725
  chr22:38595405-38595436
  hypo

SEQ ID NO: 56983 - DNA, 31 bp, Homo sapiens; identical to SEQ ID NO: 27726
  chr22:38618659-38618690
  hypo

SEQ ID NO: 56984 - DNA, 31 bp, Homo sapiens; identical to SEQ ID NO: 27727
  chr22:38618695-38618726
  hypo

SEQ ID NO: 56985 - DNA, 31 bp, Homo sapiens; identical to SEQ ID NO: 27728
  chr22:38723520-38723551
  hypo

SEQ ID NO: 56986 - DNA, 31 bp, Homo sapiens; identical to SEQ ID NO: 27729
  chr22:38776947-38776978
  hypo

SEQ ID NO: 56987 - DNA, 60 bp, Homo sapiens; identical to SEQ ID NO: 27730
  chr22:38827316-38827376
  hypo

SEQ ID NO: 56988 - DNA, 31 bp, Homo sapiens; identical to SEQ ID NO: 27731
  chr22:38827391-38827422
  hypo

SEQ ID NO: 56989 - DNA, 31 bp, Homo sapiens; identical to SEQ ID NO: 27732
  chr22:38827444-38827475
  hypo

SEQ ID NO: 56990 - DNA, 2 bp, Homo sapiens
  chr22:38864954-38864956
  hypo
aa

SEQ ID NO: 56991 - DNA, 35 bp, Homo sapiens; identical to SEQ ID NO: 27734
  chr22:38885380-38885415
  hypo

SEQ ID NO: 56992 - DNA, 31 bp, Homo sapiens; identical to SEQ ID NO: 27735
  chr22:38894491-38894522
  hypo

SEQ ID NO: 56993 - DNA, 31 bp, Homo sapiens; identical to SEQ ID NO: 7379
  chr22:38966130-38966161
  hypo

SEQ ID NO: 56994 - DNA, 31 bp, Homo sapiens; identical to SEQ ID NO: 27737
  chr22:38995554-38995585
  hypo

SEQ ID NO: 56995 - DNA, 50 bp, Homo sapiens; identical to SEQ ID NO: 27738
  chr22:38995589-38995639
  hypo

SEQ ID NO: 56996 - DNA, 31 bp, Homo sapiens; identical to SEQ ID NO: 27739
  chr22:39026304-39026335
  hypo

SEQ ID NO: 56997 - DNA, 31 bp, Homo sapiens; identical to SEQ ID NO: 27740
  chr22:39105317-39105348
  hypo

SEQ ID NO: 56998 - DNA, 31 bp, Homo sapiens; identical to SEQ ID NO: 27741
  chr22:39122030-39122061
  hypo

SEQ ID NO: 56999 - DNA, 31 bp, Homo sapiens; identical to SEQ ID NO: 27742
  chr22:39122076-39122107
  hypo

SEQ ID NO: 57000 - DNA, 53 bp, Homo sapiens; identical to SEQ ID NO: 27743
  chr22:39122132-39122185
  hypo

SEQ ID NO: 57001 - DNA, 31 bp, Homo sapiens; identical to SEQ ID NO: 27744
  chr22:39132263-39132294
  hypo

SEQ ID NO: 57002 - DNA, 43 bp, Homo sapiens; identical to SEQ ID NO: 27745
  chr22:39175178-39175221
  hypo

SEQ ID NO: 57003 - DNA, 31 bp, Homo sapiens; identical to SEQ ID NO: 27746
  chr22:39530872-39530903
  hypo

SEQ ID NO: 57004 - DNA, 52 bp, Homo sapiens; identical to SEQ ID NO: 27747
  chr22:39530912-39530964
  hypo

SEQ ID NO: 57005 - DNA, 1 bp, Homo sapiens
  chr22:39530973-39530974
  hypo
g

SEQ ID NO: 57006 - DNA, 40 bp, Homo sapiens; identical to SEQ ID NO: 27749
  chr22:39571320-39571360
  hypo

SEQ ID NO: 57007 - DNA, 48 bp, Homo sapiens; identical to SEQ ID NO: 7381
  chr22:39638592-39638640
  hypo

SEQ ID NO: 57008 - DNA, 49 bp, Homo sapiens; identical to SEQ ID NO: 27751
  chr22:39690670-39690719
  hypo

SEQ ID NO: 57009 - DNA, 31 bp, Homo sapiens; identical to SEQ ID NO: 27752
  chr22:39690774-39690805
  hypo

SEQ ID NO: 57010 - DNA, 70 bp, Homo sapiens; identical to SEQ ID NO: 27753
  chr22:39690811-39690881
  hypo

SEQ ID NO: 57011 - DNA, 31 bp, Homo sapiens; identical to SEQ ID NO: 27754
  chr22:39755184-39755215
  hypo

SEQ ID NO: 57012 - DNA, 75 bp, Homo sapiens; identical to SEQ ID NO: 27755
  chr22:39755261-39755336
  hypo

SEQ ID NO: 57013 - DNA, 31 bp, Homo sapiens; identical to SEQ ID NO: 27756
  chr22:39756396-39756427
  hypo

SEQ ID NO: 57014 - DNA, 77 bp, Homo sapiens; identical to SEQ ID NO: 27757
  chr22:39756557-39756634
  hypo

SEQ ID NO: 57015 - DNA, 47 bp, Homo sapiens; identical to SEQ ID NO: 27758
  chr22:39773594-39773641
  hypo

SEQ ID NO: 57016 - DNA, 66 bp, Homo sapiens; identical to SEQ ID NO: 27759
  chr22:39773665-39773731
  hypo

SEQ ID NO: 57017 - DNA, 60 bp, Homo sapiens; identical to SEQ ID NO: 27760
  chr22:39778979-39779039
  hypo

SEQ ID NO: 57018 - DNA, 31 bp, Homo sapiens; identical to SEQ ID NO: 27761
  chr22:39779047-39779078
  hypo

SEQ ID NO: 57019 - DNA, 210 bp, Homo sapiens; identical to SEQ ID NO: 40552
  chr22:39853690-39853900
  hypo

SEQ ID NO: 57020 - DNA, 97 bp, Homo sapiens; identical to SEQ ID NO: 40553
  chr22:39853934-39854031
  hypo

SEQ ID NO: 57021 - DNA, 31 bp, Homo sapiens; identical to SEQ ID NO: 27763
  chr22:39872974-39873005
  hypo

SEQ ID NO: 57022 - DNA, 2 bp, Homo sapiens
  chr22:39877225-39877227
  hypo
ga

SEQ ID NO: 57023 - DNA, 42 bp, Homo sapiens; identical to SEQ ID NO: 27768
  chr22:39907958-39908000
  hypo

SEQ ID NO: 57024 - DNA, 31 bp, Homo sapiens; identical to SEQ ID NO: 27769
  chr22:39908007-39908038
  hypo

SEQ ID NO: 57025 - DNA, 36 bp, Homo sapiens; identical to SEQ ID NO: 27770
  chr22:39908232-39908268
  hypo

SEQ ID NO: 57026 - DNA, 37 bp, Homo sapiens; identical to SEQ ID NO: 27771
  chr22:39908285-39908322
  hypo

SEQ ID NO: 57027 - DNA, 31 bp, Homo sapiens; identical to SEQ ID NO: 27772
  chr22:39984783-39984814
  hypo

SEQ ID NO: 57028 - DNA, 31 bp, Homo sapiens; identical to SEQ ID NO: 27773
  chr22:40033277-40033308
  hypo

SEQ ID NO: 57029 - DNA, 74 bp, Homo sapiens; identical to SEQ ID NO: 27774
  chr22:40033408-40033482
  hypo

SEQ ID NO: 57030 - DNA, 31 bp, Homo sapiens; identical to SEQ ID NO: 27775
  chr22:40083964-40083995
  hypo

SEQ ID NO: 57031 - DNA, 54 bp, Homo sapiens; identical to SEQ ID NO: 27776
  chr22:40084044-40084098
  hypo

SEQ ID NO: 57032 - DNA, 31 bp, Homo sapiens; identical to SEQ ID NO: 27777
  chr22:40084100-40084131
  hypo

SEQ ID NO: 57033 - DNA, 31 bp, Homo sapiens; identical to SEQ ID NO: 27779
  chr22:40607392-40607423
  hypo

SEQ ID NO: 57034 - DNA, 31 bp, Homo sapiens; identical to SEQ ID NO: 27780
  chr22:40616086-40616117
  hypo

SEQ ID NO: 57035 - DNA, 31 bp, Homo sapiens; identical to SEQ ID NO: 27781
  chr22:40912132-40912163
  hypo

SEQ ID NO: 57036 - DNA, 58 bp, Homo sapiens; identical to SEQ ID NO: 27782
  chr22:41034464-41034522
  hypo

SEQ ID NO: 57037 - DNA, 31 bp, Homo sapiens; identical to SEQ ID NO: 27786
  chr22:41464151-41464182
  hypo

SEQ ID NO: 57038 - DNA, 37 bp, Homo sapiens; identical to SEQ ID NO: 27788
  chr22:41639287-41639324
  hypo

SEQ ID NO: 57039 - DNA, 31 bp, Homo sapiens; identical to SEQ ID NO: 27789
  chr22:41664702-41664733
  hypo

SEQ ID NO: 57040 - DNA, 80 bp, Homo sapiens; identical to SEQ ID NO: 27791
  chr22:41667942-41668022
  hypo

SEQ ID NO: 57041 - DNA, 21 bp, Homo sapiens
  chr22:41668077-41668098
  hypo
cagcctcagagctgcacgcag

SEQ ID NO: 57042 - DNA, 31 bp, Homo sapiens; identical to SEQ ID NO: 27794
  chr22:41676124-41676155
  hypo

SEQ ID NO: 57043 - DNA, 31 bp, Homo sapiens; identical to SEQ ID NO: 27795
  chr22:41676163-41676194
  hypo

SEQ ID NO: 57044 - DNA, 31 bp, Homo sapiens; identical to SEQ ID NO: 27796
  chr22:41768560-41768591
  hypo

SEQ ID NO: 57045 - DNA, 46 bp, Homo sapiens; identical to SEQ ID NO: 27797
  chr22:41768603-41768649
  hypo

SEQ ID NO: 57046 - DNA, 31 bp, Homo sapiens; identical to SEQ ID NO: 7390
  chr22:42084265-42084296
  hypo

SEQ ID NO: 57047 - DNA, 31 bp, Homo sapiens; identical to SEQ ID NO: 7391
  chr22:42229857-42229888
  hypo

SEQ ID NO: 57048 - DNA, 37 bp, Homo sapiens; identical to SEQ ID NO: 27803
  chr22:42329320-42329357
  hypo

SEQ ID NO: 57049 - DNA, 30 bp, Homo sapiens
  chr22:42667140-42667170
  hypo
caagagccctctgggccgggggcagcccaa

SEQ ID NO: 57050 - DNA, 31 bp, Homo sapiens; identical to SEQ ID NO: 7398
  chr22:42670149-42670180
  hypo

SEQ ID NO: 57051 - DNA, 59 bp, Homo sapiens; identical to SEQ ID NO: 27809
  chr22:42706986-42707045
  hypo

SEQ ID NO: 57052 - DNA, 31 bp, Homo sapiens; identical to SEQ ID NO: 27810
  chr22:42713565-42713596
  hypo

SEQ ID NO: 57053 - DNA, 31 bp, Homo sapiens; identical to SEQ ID NO: 27811
  chr22:42713628-42713659
  hypo

SEQ ID NO: 57054 - DNA, 31 bp, Homo sapiens; identical to SEQ ID NO: 27812
  chr22:42733978-42734009
  hypo

SEQ ID NO: 57055 - DNA, 31 bp, Homo sapiens; identical to SEQ ID NO: 27813
  chr22:42734071-42734102
  hypo

SEQ ID NO: 57056 - DNA, 46 bp, Homo sapiens; identical to SEQ ID NO: 27814
  chr22:42734123-42734169
  hypo

SEQ ID NO: 57057 - DNA, 59 bp, Homo sapiens; identical to SEQ ID NO: 27815
  chr22:42744708-42744767
  hypo

SEQ ID NO: 57058 - DNA, 59 bp, Homo sapiens; identical to SEQ ID NO: 27816
  chr22:42744775-42744834
  hypo

SEQ ID NO: 57059 - DNA, 31 bp, Homo sapiens; identical to SEQ ID NO: 27817
  chr22:42744870-42744901
  hypo

SEQ ID NO: 57060 - DNA, 132 bp, Homo sapiens; identical to SEQ ID NO: 7401
  chr22:42765053-42765185
  hypo

SEQ ID NO: 57061 - DNA, 61 bp, Homo sapiens; identical to SEQ ID NO: 7402
  chr22:42765320-42765381
  hypo

SEQ ID NO: 57062 - DNA, 35 bp, Homo sapiens; identical to SEQ ID NO: 27821
  chr22:42822799-42822834
  hypo

SEQ ID NO: 57063 - DNA, 31 bp, Homo sapiens; identical to SEQ ID NO: 27822
  chr22:42822841-42822872
  hypo

SEQ ID NO: 57064 - DNA, 31 bp, Homo sapiens; identical to SEQ ID NO: 27823
  chr22:42822900-42822931
  hypo

SEQ ID NO: 57065 - DNA, 31 bp, Homo sapiens; identical to SEQ ID NO: 27824
  chr22:42822969-42823000
  hypo

SEQ ID NO: 57066 - DNA, 2 bp, Homo sapiens
  chr22:42916272-42916274
  hypo
cc

SEQ ID NO: 57067 - DNA, 31 bp, Homo sapiens; identical to SEQ ID NO: 27826
  chr22:42918548-42918579
  hypo

SEQ ID NO: 57068 - DNA, 31 bp, Homo sapiens; identical to SEQ ID NO: 27827
  chr22:42956684-42956715
  hypo

SEQ ID NO: 57069 - DNA, 31 bp, Homo sapiens; identical to SEQ ID NO: 27828
  chr22:42995219-42995250
  hypo

SEQ ID NO: 57070 - DNA, 2 bp, Homo sapiens
  chr22:42995704-42995706
  hypo
at

SEQ ID NO: 57071 - DNA, 31 bp, Homo sapiens; identical to SEQ ID NO: 27830
  chr22:43008439-43008470
  hypo

SEQ ID NO: 57072 - DNA, 31 bp, Homo sapiens; identical to SEQ ID NO: 27831
  chr22:43088995-43089026
  hypo

SEQ ID NO: 57073 - DNA, 31 bp, Homo sapiens; identical to SEQ ID NO: 27832
  chr22:43096260-43096291
  hypo

SEQ ID NO: 57074 - DNA, 31 bp, Homo sapiens; identical to SEQ ID NO: 27833
  chr22:43138071-43138102
  hypo

SEQ ID NO: 57075 - DNA, 40 bp, Homo sapiens; identical to SEQ ID NO: 27835
  chr22:43298925-43298965
  hypo

SEQ ID NO: 57076 - DNA, 86 bp, Homo sapiens; identical to SEQ ID NO: 27836
  chr22:43298976-43299062
  hypo

SEQ ID NO: 57077 - DNA, 31 bp, Homo sapiens; identical to SEQ ID NO: 27837
  chr22:43351378-43351409
  hypo

SEQ ID NO: 57078 - DNA, 31 bp, Homo sapiens; identical to SEQ ID NO: 27838
  chr22:43390395-43390426
  hypo

SEQ ID NO: 57079 - DNA, 2 bp, Homo sapiens
  chr22:43434408-43434410
  hypo
ca

SEQ ID NO: 57080 - DNA, 35 bp, Homo sapiens; identical to SEQ ID NO: 27840
  chr22:43437049-43437084
  hypo

SEQ ID NO: 57081 - DNA, 31 bp, Homo sapiens; identical to SEQ ID NO: 27841
  chr22:43517577-43517608
  hypo

SEQ ID NO: 57082 - DNA, 31 bp, Homo sapiens; identical to SEQ ID NO: 27842
  chr22:43567693-43567724
  hypo

SEQ ID NO: 57083 - DNA, 45 bp, Homo sapiens; identical to SEQ ID NO: 27843
  chr22:43567928-43567973
  hypo

SEQ ID NO: 57084 - DNA, 2 bp, Homo sapiens
  chr22:43570246-43570248
  hypo
ct

SEQ ID NO: 57085 - DNA, 2 bp, Homo sapiens
  chr22:43581590-43581592
  hypo
gg

SEQ ID NO: 57086 - DNA, 47 bp, Homo sapiens; identical to SEQ ID NO: 27846
  chr22:43581710-43581757
  hypo

SEQ ID NO: 57087 - DNA, 31 bp, Homo sapiens; identical to SEQ ID NO: 27847
  chr22:43596547-43596578
  hypo

SEQ ID NO: 57088 - DNA, 2 bp, Homo sapiens
  chr22:43689395-43689397
  hypo
gc

SEQ ID NO: 57089 - DNA, 31 bp, Homo sapiens; identical to SEQ ID NO: 27850
  chr22:43874752-43874783
  hypo

SEQ ID NO: 57090 - DNA, 49 bp, Homo sapiens; identical to SEQ ID NO: 27851
  chr22:44026050-44026099
  hypo

SEQ ID NO: 57091 - DNA, 31 bp, Homo sapiens; identical to SEQ ID NO: 27852
  chr22:44232852-44232883
  hypo

SEQ ID NO: 57092 - DNA, 46 bp, Homo sapiens; identical to SEQ ID NO: 27853
  chr22:44322830-44322876
  hypo

SEQ ID NO: 57093 - DNA, 81 bp, Homo sapiens; identical to SEQ ID NO: 27854
  chr22:44322893-44322974
  hypo

SEQ ID NO: 57094 - DNA, 50 bp, Homo sapiens; identical to SEQ ID NO: 27855
  chr22:44322988-44323038
  hypo

SEQ ID NO: 57095 - DNA, 31 bp, Homo sapiens; identical to SEQ ID NO: 27856
  chr22:44402182-44402213
  hypo

SEQ ID NO: 57096 - DNA, 31 bp, Homo sapiens; identical to SEQ ID NO: 7405
  chr22:44420412-44420443
  hypo

SEQ ID NO: 57097 - DNA, 31 bp, Homo sapiens; identical to SEQ ID NO: 27858
  chr22:44755575-44755606
  hypo

SEQ ID NO: 57098 - DNA, 31 bp, Homo sapiens; identical to SEQ ID NO: 27860
  chr22:45069631-45069662
  hypo

SEQ ID NO: 57099 - DNA, 50 bp, Homo sapiens; identical to SEQ ID NO: 27861
  chr22:45074548-45074598
  hypo

SEQ ID NO: 57100 - DNA, 31 bp, Homo sapiens; identical to SEQ ID NO: 27862
  chr22:45074794-45074825
  hypo

SEQ ID NO: 57101 - DNA, 104 bp, Homo sapiens; identical to SEQ ID NO: 7408
  chr22:45097904-45098008
  hypo

SEQ ID NO: 57102 - DNA, 295 bp, Homo sapiens; identical to SEQ ID NO: 40571
  chr22:45098036-45098331
  hypo

SEQ ID NO: 57103 - DNA, 31 bp, Homo sapiens; identical to SEQ ID NO: 27865
  chr22:45113076-45113107
  hypo

SEQ ID NO: 57104 - DNA, 33 bp, Homo sapiens; identical to SEQ ID NO: 27866
  chr22:45113348-45113381
  hypo

SEQ ID NO: 57105 - DNA, 38 bp, Homo sapiens; identical to SEQ ID NO: 27867
  chr22:45121860-45121898
  hypo

SEQ ID NO: 57106 - DNA, 41 bp, Homo sapiens; identical to SEQ ID NO: 27868
  chr22:45122234-45122275
  hypo

SEQ ID NO: 57107 - DNA, 31 bp, Homo sapiens; identical to SEQ ID NO: 27869
  chr22:45122367-45122398
  hypo

SEQ ID NO: 57108 - DNA, 31 bp, Homo sapiens; identical to SEQ ID NO: 27870
  chr22:45123030-45123061
  hypo

SEQ ID NO: 57109 - DNA, 98 bp, Homo sapiens; identical to SEQ ID NO: 27871
  chr22:45123131-45123229
  hypo

SEQ ID NO: 57110 - DNA, 80 bp, Homo sapiens; identical to SEQ ID NO: 27872
  chr22:45123231-45123311
  hypo

SEQ ID NO: 57111 - DNA, 44 bp, Homo sapiens; identical to SEQ ID NO: 27873
  chr22:45123856-45123900
  hypo

SEQ ID NO: 57112 - DNA, 31 bp, Homo sapiens; identical to SEQ ID NO: 27874
  chr22:45123955-45123986
  hypo

SEQ ID NO: 57113 - DNA, 43 bp, Homo sapiens; identical to SEQ ID NO: 27877
  chr22:45175292-45175335
  hypo

SEQ ID NO: 57114 - DNA, 31 bp, Homo sapiens; identical to SEQ ID NO: 27878
  chr22:45175810-45175841
  hypo

SEQ ID NO: 57115 - DNA, 31 bp, Homo sapiens; identical to SEQ ID NO: 27879
  chr22:45181175-45181206
  hypo

SEQ ID NO: 57116 - DNA, 31 bp, Homo sapiens; identical to SEQ ID NO: 27880
  chr22:45181255-45181286
  hypo

SEQ ID NO: 57117 - DNA, 58 bp, Homo sapiens; identical to SEQ ID NO: 27881
  chr22:45181317-45181375
  hypo

SEQ ID NO: 57118 - DNA, 31 bp, Homo sapiens; identical to SEQ ID NO: 27882
  chr22:45210719-45210750
  hypo

SEQ ID NO: 57119 - DNA, 31 bp, Homo sapiens; identical to SEQ ID NO: 27883
  chr22:45220425-45220456
  hypo

SEQ ID NO: 57120 - DNA, 31 bp, Homo sapiens; identical to SEQ ID NO: 27884
  chr22:45221873-45221904
  hypo

SEQ ID NO: 57121 - DNA, 65 bp, Homo sapiens; identical to SEQ ID NO: 27885
  chr22:45242865-45242930
  hypo

SEQ ID NO: 57122 - DNA, 78 bp, Homo sapiens; identical to SEQ ID NO: 27886
  chr22:45242971-45243049
  hypo

SEQ ID NO: 57123 - DNA, 31 bp, Homo sapiens; identical to SEQ ID NO: 27887
  chr22:45395493-45395524
  hypo

SEQ ID NO: 57124 - DNA, 31 bp, Homo sapiens; identical to SEQ ID NO: 27888
  chr22:45593440-45593471
  hypo

SEQ ID NO: 57125 - DNA, 31 bp, Homo sapiens; identical to SEQ ID NO: 27889
  chr22:45593486-45593517
  hypo

SEQ ID NO: 57126 - DNA, 2 bp, Homo sapiens
  chr22:45593642-45593644
  hypo
gc

SEQ ID NO: 57127 - DNA, 35 bp, Homo sapiens; identical to SEQ ID NO: 27891
  chr22:45593856-45593891
  hypo

SEQ ID NO: 57128 - DNA, 31 bp, Homo sapiens; identical to SEQ ID NO: 27892
  chr22:45593921-45593952
  hypo

SEQ ID NO: 57129 - DNA, 31 bp, Homo sapiens; identical to SEQ ID NO: 27893
  chr22:45593956-45593987
  hypo

SEQ ID NO: 57130 - DNA, 31 bp, Homo sapiens; identical to SEQ ID NO: 27894
  chr22:45604144-45604175
  hypo

SEQ ID NO: 57131 - DNA, 2 bp, Homo sapiens
  chr22:45604183-45604185
  hypo
ga

SEQ ID NO: 57132 - DNA, 27 bp, Homo sapiens
  chr22:45604387-45604414
  hypo
ggcagaacccaccgactccacatgcag

SEQ ID NO: 57133 - DNA, 35 bp, Homo sapiens; identical to SEQ ID NO: 27898
  chr22:45604421-45604456
  hypo

SEQ ID NO: 57134 - DNA, 30 bp, Homo sapiens; identical to SEQ ID NO: 27899
  chr22:45639340-45639370
  hypo

SEQ ID NO: 57135 - DNA, 31 bp, Homo sapiens; identical to SEQ ID NO: 27900
  chr22:45653546-45653577
  hypo

SEQ ID NO: 57136 - DNA, 39 bp, Homo sapiens; identical to SEQ ID NO: 27901
  chr22:45653626-45653665
  hypo

SEQ ID NO: 57137 - DNA, 31 bp, Homo sapiens; identical to SEQ ID NO: 27902
  chr22:45695618-45695649
  hypo

SEQ ID NO: 57138 - DNA, 31 bp, Homo sapiens; identical to SEQ ID NO: 27903
  chr22:45821510-45821541
  hypo

SEQ ID NO: 57139 - DNA, 31 bp, Homo sapiens; identical to SEQ ID NO: 27904
  chr22:45821689-45821720
  hypo

SEQ ID NO: 57140 - DNA, 31 bp, Homo sapiens; identical to SEQ ID NO: 27905
  chr22:45821721-45821752
  hypo

SEQ ID NO: 57141 - DNA, 75 bp, Homo sapiens; identical to SEQ ID NO: 27906
  chr22:45821873-45821948
  hypo

SEQ ID NO: 57142 - DNA, 31 bp, Homo sapiens; identical to SEQ ID NO: 27907
  chr22:45822397-45822428
  hypo

SEQ ID NO: 57143 - DNA, 54 bp, Homo sapiens; identical to SEQ ID NO: 27908
  chr22:45822441-45822495
  hypo

SEQ ID NO: 57144 - DNA, 37 bp, Homo sapiens; identical to SEQ ID NO: 27909
  chr22:45822510-45822547
  hypo

SEQ ID NO: 57145 - DNA, 73 bp, Homo sapiens; identical to SEQ ID NO: 27910
  chr22:45826805-45826878
  hypo

SEQ ID NO: 57146 - DNA, 31 bp, Homo sapiens; identical to SEQ ID NO: 27911
  chr22:45882359-45882390
  hypo

SEQ ID NO: 57147 - DNA, 31 bp, Homo sapiens; identical to SEQ ID NO: 27913
  chr22:45971082-45971113
  hypo

SEQ ID NO: 57148 - DNA, 31 bp, Homo sapiens; identical to SEQ ID NO: 27914
  chr22:45994947-45994978
  hypo

SEQ ID NO: 57149 - DNA, 31 bp, Homo sapiens; identical to SEQ ID NO: 27915
  chr22:46023052-46023083
  hypo

SEQ ID NO: 57150 - DNA, 31 bp, Homo sapiens; identical to SEQ ID NO: 27917
  chr22:46051604-46051635
  hypo

SEQ ID NO: 57151 - DNA, 31 bp, Homo sapiens; identical to SEQ ID NO: 27918
  chr22:46051687-46051718
  hypo

SEQ ID NO: 57152 - DNA, 35 bp, Homo sapiens; identical to SEQ ID NO: 27919
  chr22:46153005-46153040
  hypo

SEQ ID NO: 57153 - DNA, 43 bp, Homo sapiens; identical to SEQ ID NO: 27920
  chr22:46312228-46312271
  hypo

SEQ ID NO: 57154 - DNA, 43 bp, Homo sapiens; identical to SEQ ID NO: 27920
  chr22:46312299-46312342
  hypo

SEQ ID NO: 57155 - DNA, 61 bp, Homo sapiens; identical to SEQ ID NO: 27922
  chr22:46312349-46312410
  hypo

SEQ ID NO: 57156 - DNA, 31 bp, Homo sapiens; identical to SEQ ID NO: 27923
  chr22:46396013-46396044
  hypo

SEQ ID NO: 57157 - DNA, 31 bp, Homo sapiens; identical to SEQ ID NO: 27924
  chr22:46399902-46399933
  hypo

SEQ ID NO: 57158 - DNA, 31 bp, Homo sapiens; identical to SEQ ID NO: 7421
  chr22:46466169-46466200
  hypo

SEQ ID NO: 57159 - DNA, 59 bp, Homo sapiens; identical to SEQ ID NO: 27926
  chr22:46499692-46499751
  hypo

SEQ ID NO: 57160 - DNA, 31 bp, Homo sapiens; identical to SEQ ID NO: 27927
  chr22:46678246-46678277
  hypo

SEQ ID NO: 57161 - DNA, 31 bp, Homo sapiens; identical to SEQ ID NO: 27928
  chr22:46678310-46678341
  hypo

SEQ ID NO: 57162 - DNA, 43 bp, Homo sapiens; identical to SEQ ID NO: 27929
  chr22:46755415-46755458
  hypo

SEQ ID NO: 57163 - DNA, 61 bp, Homo sapiens; identical to SEQ ID NO: 27930
  chr22:46785284-46785345
  hypo

SEQ ID NO: 57164 - DNA, 31 bp, Homo sapiens; identical to SEQ ID NO: 27931
  chr22:46790966-46790997
  hypo

SEQ ID NO: 57165 - DNA, 31 bp, Homo sapiens; identical to SEQ ID NO: 27932
  chr22:46791034-46791065
  hypo

SEQ ID NO: 57166 - DNA, 31 bp, Homo sapiens; identical to SEQ ID NO: 27933
  chr22:46794794-46794825
  hypo

SEQ ID NO: 57167 - DNA, 43 bp, Homo sapiens; identical to SEQ ID NO: 27935
  chr22:46805976-46806019
  hypo

SEQ ID NO: 57168 - DNA, 36 bp, Homo sapiens; identical to SEQ ID NO: 27936
  chr22:46806030-46806066
  hypo

SEQ ID NO: 57169 - DNA, 31 bp, Homo sapiens; identical to SEQ ID NO: 27937
  chr22:46807447-46807478
  hypo

SEQ ID NO: 57170 - DNA, 31 bp, Homo sapiens; identical to SEQ ID NO: 27938
  chr22:46838111-46838142
  hypo

SEQ ID NO: 57171 - DNA, 58 bp, Homo sapiens; identical to SEQ ID NO: 27939
  chr22:46838169-46838227
  hypo

SEQ ID NO: 57172 - DNA, 44 bp, Homo sapiens; identical to SEQ ID NO: 27940
  chr22:46838259-46838303
  hypo

SEQ ID NO: 57173 - DNA, 31 bp, Homo sapiens; identical to SEQ ID NO: 27941
  chr22:46857660-46857691
  hypo

SEQ ID NO: 57174 - DNA, 40 bp, Homo sapiens; identical to SEQ ID NO: 27942
  chr22:46860031-46860071
  hypo

SEQ ID NO: 57175 - DNA, 31 bp, Homo sapiens; identical to SEQ ID NO: 27943
  chr22:46905650-46905681
  hypo

SEQ ID NO: 57176 - DNA, 31 bp, Homo sapiens; identical to SEQ ID NO: 27944
  chr22:46905688-46905719
  hypo

SEQ ID NO: 57177 - DNA, 31 bp, Homo sapiens; identical to SEQ ID NO: 27945
  chr22:46930768-46930799
  hypo

SEQ ID NO: 57178 - DNA, 31 bp, Homo sapiens; identical to SEQ ID NO: 27946
  chr22:46931121-46931152
  hypo

SEQ ID NO: 57179 - DNA, 49 bp, Homo sapiens; identical to SEQ ID NO: 27947
  chr22:46931594-46931643
  hypo

SEQ ID NO: 57180 - DNA, 48 bp, Homo sapiens
  chr22:46932128-46932176
  hypo
gcggtccagtacgctgtccgtgctcacggcgcccgtggcagagtcgat

SEQ ID NO: 57181 - DNA, 2 bp, Homo sapiens
  chr22:47005072-47005074
  hypo
cc

SEQ ID NO: 57182 - DNA, 59 bp, Homo sapiens; identical to SEQ ID NO: 27951
  chr22:47022882-47022941
  hypo

SEQ ID NO: 57183 - DNA, 90 bp, Homo sapiens; identical to SEQ ID NO: 27953
  chr22:47069563-47069653
  hypo

SEQ ID NO: 57184 - DNA, 47 bp, Homo sapiens; identical to SEQ ID NO: 27954
  chr22:47075348-47075395
  hypo

SEQ ID NO: 57185 - DNA, 31 bp, Homo sapiens; identical to SEQ ID NO: 27955
  chr22:47139210-47139241
  hypo

SEQ ID NO: 57186 - DNA, 31 bp, Homo sapiens; identical to SEQ ID NO: 27956
  chr22:47139265-47139296
  hypo

SEQ ID NO: 57187 - DNA, 31 bp, Homo sapiens; identical to SEQ ID NO: 27957
  chr22:47172071-47172102
  hypo

SEQ ID NO: 57188 - DNA, 63 bp, Homo sapiens; identical to SEQ ID NO: 27958
  chr22:47172171-47172234
  hypo

SEQ ID NO: 57189 - DNA, 31 bp, Homo sapiens; identical to SEQ ID NO: 27959
  chr22:47172249-47172280
  hypo

SEQ ID NO: 57190 - DNA, 37 bp, Homo sapiens; identical to SEQ ID NO: 27960
  chr22:47172318-47172355
  hypo

SEQ ID NO: 57191 - DNA, 53 bp, Homo sapiens; identical to SEQ ID NO: 27961
  chr22:47197490-47197543
  hypo

SEQ ID NO: 57192 - DNA, 57 bp, Homo sapiens; identical to SEQ ID NO: 27962
  chr22:47327900-47327957
  hypo

SEQ ID NO: 57193 - DNA, 31 bp, Homo sapiens; identical to SEQ ID NO: 27963
  chr22:47418700-47418731
  hypo

SEQ ID NO: 57194 - DNA, 54 bp, Homo sapiens; identical to SEQ ID NO: 27964
  chr22:47441117-47441171
  hypo

SEQ ID NO: 57195 - DNA, 31 bp, Homo sapiens; identical to SEQ ID NO: 27965
  chr22:47455003-47455034
  hypo

SEQ ID NO: 57196 - DNA, 59 bp, Homo sapiens; identical to SEQ ID NO: 27966
  chr22:47455055-47455114
  hypo

SEQ ID NO: 57197 - DNA, 63 bp, Homo sapiens; identical to SEQ ID NO: 27967
  chr22:47455155-47455218
  hypo

SEQ ID NO: 57198 - DNA, 50 bp, Homo sapiens; identical to SEQ ID NO: 27968
  chr22:47511003-47511053
  hypo

SEQ ID NO: 57199 - DNA, 31 bp, Homo sapiens; identical to SEQ ID NO: 27969
  chr22:47525963-47525994
  hypo

SEQ ID NO: 57200 - DNA, 31 bp, Homo sapiens; identical to SEQ ID NO: 27970
  chr22:47526090-47526121
  hypo

SEQ ID NO: 57201 - DNA, 42 bp, Homo sapiens; identical to SEQ ID NO: 27971
  chr22:47540297-47540339
  hypo

SEQ ID NO: 57202 - DNA, 31 bp, Homo sapiens; identical to SEQ ID NO: 27972
  chr22:47540352-47540383
  hypo

SEQ ID NO: 57203 - DNA, 27 bp, Homo sapiens
  chr22:47584841-47584868
  hypo
aggctgggaccagtgacggccagccag

SEQ ID NO: 57204 - DNA, 31 bp, Homo sapiens; identical to SEQ ID NO: 27974
  chr22:48025085-48025116
  hypo

SEQ ID NO: 57205 - DNA, 2 bp, Homo sapiens
  chr22:50119415-50119417
  hypo
aa

SEQ ID NO: 57206 - DNA, 53 bp, Homo sapiens; identical to SEQ ID NO: 7428
  chr22:50170509-50170562
  hypo

SEQ ID NO: 57207 - DNA, 2 bp, Homo sapiens
  chr22:50170582-50170584
  hypo
ac

SEQ ID NO: 57208 - DNA, 31 bp, Homo sapiens; identical to SEQ ID NO: 27984
  chr22:50187008-50187039
  hypo

SEQ ID NO: 57209 - DNA, 37 bp, Homo sapiens; identical to SEQ ID NO: 27985
  chr22:50187089-50187126
  hypo

SEQ ID NO: 57210 - DNA, 41 bp, Homo sapiens; identical to SEQ ID NO: 27986
  chr22:50187130-50187171
  hypo

SEQ ID NO: 57211 - DNA, 51 bp, Homo sapiens; identical to SEQ ID NO: 27987
  chr22:50191514-50191565
  hypo

SEQ ID NO: 57212 - DNA, 31 bp, Homo sapiens; identical to SEQ ID NO: 27988
  chr22:50191690-50191721
  hypo

SEQ ID NO: 57213 - DNA, 31 bp, Homo sapiens; identical to SEQ ID NO: 27989
  chr22:50228902-50228933
  hypo

SEQ ID NO: 57214 - DNA, 99 bp, Homo sapiens; identical to SEQ ID NO: 7430
  chr22:50246600-50246699
  hypo

SEQ ID NO: 57215 - DNA, 79 bp, Homo sapiens; identical to SEQ ID NO: 27991
  chr22:50305617-50305696
  hypo

SEQ ID NO: 57216 - DNA, 109 bp, Homo sapiens; identical to SEQ ID NO: 27992
  chr22:50433173-50433282
  hypo

SEQ ID NO: 57217 - DNA, 31 bp, Homo sapiens; identical to SEQ ID NO: 27993
  chr22:50433332-50433363
  hypo

SEQ ID NO: 57218 - DNA, 6 bp, Homo sapiens
  chr22:50467045-50467051
  hypo
tgaaga

SEQ ID NO: 57219 - DNA, 31 bp, Homo sapiens; identical to SEQ ID NO: 27997
  chr22:50601379-50601410
  hypo

SEQ ID NO: 57220 - DNA, 31 bp, Homo sapiens; identical to SEQ ID NO: 27998
  chr22:50601431-50601462
  hypo

SEQ ID NO: 57221 - DNA, 81 bp, Homo sapiens; identical to SEQ ID NO: 27999
  chr22:50601497-50601578
  hypo

SEQ ID NO: 57222 - DNA, 100 bp, Homo sapiens; identical to SEQ ID NO: 28001
  chr22:50626941-50627041
  hypo

SEQ ID NO: 57223 - DNA, 31 bp, Homo sapiens; identical to SEQ ID NO: 28002
  chr22:50627042-50627073
  hypo

SEQ ID NO: 57224 - DNA, 31 bp, Homo sapiens; identical to SEQ ID NO: 28003
  chr22:50628014-50628045
  hypo

SEQ ID NO: 57225 - DNA, 40 bp, Homo sapiens; identical to SEQ ID NO: 28005
  chr22:50695753-50695793
  hypo

SEQ ID NO: 57226 - DNA, 17 bp, Homo sapiens
  chr22:50721365-50721382
  hypo
cccgaccaggctggccc

SEQ ID NO: 57227 - DNA, 42 bp, Homo sapiens; identical to SEQ ID NO: 28007
  chr22:50721953-50721995
  hypo

SEQ ID NO: 57228 - DNA, 31 bp, Homo sapiens; identical to SEQ ID NO: 7433
  chr22:50745644-50745675
  hypo

SEQ ID NO: 57229 - DNA, 31 bp, Homo sapiens; identical to SEQ ID NO: 7434
  chr22:50745698-50745729
  hypo

SEQ ID NO: 57230 - DNA, 31 bp, Homo sapiens; identical to SEQ ID NO: 7435
  chr22:50765138-50765169
  hypo

SEQ ID NO: 57231 - DNA, 73 bp, Homo sapiens; identical to SEQ ID NO: 28011
  chr22:50874674-50874747
  hypo

SEQ ID NO: 57232 - DNA, 31 bp, Homo sapiens; identical to SEQ ID NO: 28012
  chr22:50877968-50877999
  hypo

SEQ ID NO: 57233 - DNA, 31 bp, Homo sapiens; identical to SEQ ID NO: 28013
  chr22:50878183-50878214
  hypo

SEQ ID NO: 57234 - DNA, 31 bp, Homo sapiens; identical to SEQ ID NO: 28014
  chr22:50882625-50882656
  hypo

SEQ ID NO: 57235 - DNA, 72 bp, Homo sapiens; identical to SEQ ID NO: 28015
  chr22:50882669-50882741
  hypo

SEQ ID NO: 57236 - DNA, 50 bp, Homo sapiens; identical to SEQ ID NO: 28016
  chr22:50884058-50884108
  hypo

SEQ ID NO: 57237 - DNA, 31 bp, Homo sapiens; identical to SEQ ID NO: 28017
  chr22:50884135-50884166
  hypo

SEQ ID NO: 57238 - DNA, 31 bp, Homo sapiens; identical to SEQ ID NO: 28018
  chr22:50884177-50884208
  hypo

SEQ ID NO: 57239 - DNA, 31 bp, Homo sapiens; identical to SEQ ID NO: 28019
  chr22:50884225-50884256
  hypo

SEQ ID NO: 57240 - DNA, 81 bp, Homo sapiens; identical to SEQ ID NO: 7436
  chr22:50920027-50920108
  hypo

SEQ ID NO: 57241 - DNA, 31 bp, Homo sapiens; identical to SEQ ID NO: 28027
  chr22:50926292-50926323
  hypo

SEQ ID NO: 57242 - DNA, 9 bp, Homo sapiens
  chr22:50927879-50927888
  hypo
gtgggggga

SEQ ID NO: 57243 - DNA, 2 bp, Homo sapiens
  chr22:50939072-50939074
  hypo
cc

SEQ ID NO: 57244 - DNA, 33 bp, Homo sapiens
  chr22:50939111-50939144
  hypo
gtgtggccttgaaaacaccgtgctgagtgaaag

SEQ ID NO: 57245 - DNA, 49 bp, Homo sapiens; identical to SEQ ID NO: 28030
  chr22:50942718-50942767
  hypo

SEQ ID NO: 57246 - DNA, 205 bp, Homo sapiens; identical to SEQ ID NO: 7438
  chr22:50970576-50970781
  hypo

SEQ ID NO: 57247 - DNA, 86 bp, Homo sapiens; identical to SEQ ID NO: 7439
  chr22:50970820-50970906
  hypo

SEQ ID NO: 57248 - DNA, 75 bp, Homo sapiens; identical to SEQ ID NO: 7440
  chr22:50970908-50970983
  hypo

SEQ ID NO: 57249 - DNA, 31 bp, Homo sapiens; identical to SEQ ID NO: 7441
  chr22:50970986-50971017
  hypo

SEQ ID NO: 57250 - DNA, 31 bp, Homo sapiens; identical to SEQ ID NO: 28035
  chr22:51117959-51117990
  hypo

SEQ ID NO: 57251 - DNA, 31 bp, Homo sapiens; identical to SEQ ID NO: 28036
  chr22:51149170-51149201
  hypo

SEQ ID NO: 57252 - DNA, 31 bp, Homo sapiens; identical to SEQ ID NO: 28037
  chr22:51149219-51149250
  hypo

SEQ ID NO: 57253 - DNA, 171 bp, Homo sapiens; identical to SEQ ID NO: 28038
  chr22:51149269-51149440
  hypo

SEQ ID NO: 57254 - DNA, 42 bp, Homo sapiens; identical to SEQ ID NO: 28039
  chr22:51160331-51160373
  hypo

SEQ ID NO: 57255 - DNA, 31 bp, Homo sapiens; identical to SEQ ID NO: 28040
  chr22:51160377-51160408
  hypo

SEQ ID NO: 57256 - DNA, 82 bp, Homo sapiens; identical to SEQ ID NO: 28041
  chr22:51160506-51160588
  hypo

SEQ ID NO: 57257 - DNA, 52 bp, Homo sapiens; identical to SEQ ID NO: 40603
  chrX:2846756-2846808
  hypo

SEQ ID NO: 57258 - DNA, 68 bp, Homo sapiens; identical to SEQ ID NO: 28043
  chrX:9214967-9215035
  hypo

SEQ ID NO: 57259 - DNA, 31 bp, Homo sapiens; identical to SEQ ID NO: 28044
  chrX:9215050-9215081
  hypo

SEQ ID NO: 57260 - DNA, 36 bp, Homo sapiens; identical to SEQ ID NO: 28045
  chrX:10085736-10085772
  hypo

SEQ ID NO: 57261 - DNA, 26 bp, Homo sapiens
  chrX:13740816-13740842
  hypo
ggaactttctgcgaggacagaaatgt

SEQ ID NO: 57262 - DNA, 31 bp, Homo sapiens; identical to SEQ ID NO: 28047
  chrX:20135283-20135314
  hypo

SEQ ID NO: 57263 - DNA, 20 bp, Homo sapiens
  chrX:20160917-20160937
  hypo
gccggttagctcataacgca

SEQ ID NO: 57264 - DNA, 31 bp, Homo sapiens; identical to SEQ ID NO: 28049
  chrX:21958399-21958430
  hypo

SEQ ID NO: 57265 - DNA, 10 bp, Homo sapiens
  chrX:23825265-23825275
  hypo
gacggcagag

SEQ ID NO: 57266 - DNA, 31 bp, Homo sapiens; identical to SEQ ID NO: 7448
  chrX:27999797-27999828
  hypo

SEQ ID NO: 57267 - DNA, 31 bp, Homo sapiens; identical to SEQ ID NO: 7449
  chrX:27999837-27999868
  hypo

SEQ ID NO: 57268 - DNA, 31 bp, Homo sapiens; identical to SEQ ID NO: 28053
  chrX:44225041-44225072
  hypo

SEQ ID NO: 57269 - DNA, 31 bp, Homo sapiens; identical to SEQ ID NO: 28054
  chrX:44596042-44596073
  hypo

SEQ ID NO: 57270 - DNA, 37 bp, Homo sapiens; identical to SEQ ID NO: 28055
  chrX:44760626-44760663
  hypo

SEQ ID NO: 57271 - DNA, 31 bp, Homo sapiens; identical to SEQ ID NO: 28056
  chrX:44922873-44922904
  hypo

SEQ ID NO: 57272 - DNA, 23 bp, Homo sapiens
  chrX:44922940-44922963
  hypo
gtggaagtaatggaaacgtgcct

SEQ ID NO: 57273 - DNA, 31 bp, Homo sapiens
  chrX:44923014-44923045
  hypo
agcagcgcagaggagccgtggaaaaaccaac

SEQ ID NO: 57274 - DNA, 34 bp, Homo sapiens; identical to SEQ ID NO: 28058
  chrX:70442912-70442946
  hypo

SEQ ID NO: 57275 - DNA, 31 bp, Homo sapiens; identical to SEQ ID NO: 28059
  chrX:71529505-71529536
  hypo

SEQ ID NO: 57276 - DNA, 52 bp, Homo sapiens; identical to SEQ ID NO: 28061
  chrX:107070115-107070167
  hypo

SEQ ID NO: 57277 - DNA, 2 bp, Homo sapiens
  chrX:150560242-150560244
  hypo
cc

SEQ ID NO: 57278 - DNA, 28 bp, Homo sapiens
  chrX:150560273-150560301
  hypo
cagctctaggtcccgcccctttgcgttg

SEQ ID NO: 57279 - DNA, 41 bp, Homo sapiens; identical to SEQ ID NO: 28063
  chrY:5077816-5077857
  hypo

SEQ ID NO: 57280 - DNA, 62 bp, Homo sapiens; identical to SEQ ID NO: 28064
  chrY:6790936-6790998
  hypo

SEQ ID NO: 57281 - DNA, 33 bp, Homo sapiens; identical to SEQ ID NO: 28065
  chrY:7413995-7414028
  hypo

SEQ ID NO: 57282 - DNA, 80 bp, Homo sapiens; identical to SEQ ID NO: 28066
  chrY:7525417-7525497
  hypo

SEQ ID NO: 57283 - DNA, 31 bp, Homo sapiens; identical to SEQ ID NO: 28067
  chrY:8147741-8147772
  hypo

SEQ ID NO: 57284 - DNA, 91 bp, Homo sapiens; identical to SEQ ID NO: 28068
  chrY:8147819-8147910
  hypo

SEQ ID NO: 57285 - DNA, 31 bp, Homo sapiens; identical to SEQ ID NO: 28069
  chrY:10034277-10034308
  hypo

SEQ ID NO: 57286 - DNA, 31 bp, Homo sapiens; identical to SEQ ID NO: 28070
  chrY:14513074-14513105
  hypo

SEQ ID NO: 57287 - DNA, 31 bp, Homo sapiens; identical to SEQ ID NO: 28071
  chrY:14656910-14656941
  hypo

SEQ ID NO: 57288 - DNA, 31 bp, Homo sapiens; identical to SEQ ID NO: 28072
  chrY:18547039-18547070
  hypo

SEQ ID NO: 57289 - DNA, 31 bp, Homo sapiens; identical to SEQ ID NO: 28073
  chrY:21186957-21186988
  hypo

SEQ ID NO: 57290 - DNA, 31 bp, Homo sapiens; identical to SEQ ID NO: 28074
  chrY:21208476-21208507
  hypo

SEQ ID NO: 57291 - DNA, 89 bp, Homo sapiens; identical to SEQ ID NO: 28075
  chrY:21208604-21208693
  hypo

SEQ ID NO: 57292 - DNA, 50 bp, Homo sapiens; identical to SEQ ID NO: 28076
  chrY:21208699-21208749
  hypo

SEQ ID NO: 57293 - DNA, 34 bp, Homo sapiens; identical to SEQ ID NO: 28077
  chrY:21208767-21208801
  hypo

SEQ ID NO: 57294 - DNA, 31 bp, Homo sapiens; identical to SEQ ID NO: 28078
  chrY:21210285-21210316
  hypo

SEQ ID NO: 57295 - DNA, 76 bp, Homo sapiens; identical to SEQ ID NO: 28079
  chrY:21226201-21226277
  hypo

SEQ ID NO: 57296 - DNA, 31 bp, Homo sapiens; identical to SEQ ID NO: 28080
  chrY:21226323-21226354
  hypo

SEQ ID NO: 57297 - DNA, 31 bp, Homo sapiens; identical to SEQ ID NO: 28081
  chrY:21238027-21238058
  hypo

SEQ ID NO: 57298 - DNA, 31 bp, Homo sapiens; identical to SEQ ID NO: 28084
  AC133920.2_61082-76843:11716-11747
  hypo

SEQ ID NO: 57299 - DNA, 31 bp, Homo sapiens; identical to SEQ ID NO: 28085
  AC153808.1_1-20788:1300-1331
  hypo

SEQ ID NO: 57300 - DNA, 83 bp, Homo sapiens; identical to SEQ ID NO: 28086
  AC153808.1_1-20788:1384-1467
  hypo

SEQ ID NO: 57301 - DNA, 31 bp, Homo sapiens; identical to SEQ ID NO: 28087
  AC153808.1_1-20788:9793-9824
  hypo

SEQ ID NO: 57302 - DNA, 31 bp, Homo sapiens; identical to SEQ ID NO: 28088
  AC153808.1_1-20788:20323-20354
  hypo

SEQ ID NO: 57303 - DNA, 34 bp, Homo sapiens; identical to SEQ ID NO: 28089
  AC153808.1_1-20788:20357-20391
  hypo

SEQ ID NO: 57304 - DNA, 52 bp, Homo sapiens; identical to SEQ ID NO: 28090
  AC153808.1_1-20788:20460-20512
  hypo

SEQ ID NO: 57305 - DNA, 19 bp, Homo sapiens
  AEKP01153556.1_1-5252:1037-1056
  hypo
cagccgattccagggcacc

SEQ ID NO: 57306 - DNA, 75 bp, Homo sapiens; identical to SEQ ID NO: 28093
  AEKP01160137.1_1408-4031:1581-1656
  hypo

SEQ ID NO: 57307 - DNA, 31 bp, Homo sapiens; identical to SEQ ID NO: 28094
  AEKP01166227.1_44013-111583:41309-41340
  hypo

SEQ ID NO: 57308 - DNA, 31 bp, Homo sapiens; identical to SEQ ID NO: 28095
  AEKP01166227.1_44013-111583:41342-41373
  hypo

SEQ ID NO: 57309 - DNA, 31 bp, Homo sapiens; identical to SEQ ID NO: 28096
  AEKP01166227.1_44013-111583:41395-41426
  hypo

SEQ ID NO: 57310 - DNA, 31 bp, Homo sapiens; identical to SEQ ID NO: 28097
  AEKP01166227.1_44013-111583:53193-53224
  hypo

SEQ ID NO: 57311 - DNA, 31 bp, Homo sapiens; identical to SEQ ID NO: 28098
  AEKP01166227.1_44013-111583:53245-53276
  hypo

SEQ ID NO: 57312 - DNA, 31 bp, Homo sapiens; identical to SEQ ID NO: 28099
  AEKP01166227.1_44013-111583:53296-53327
  hypo

SEQ ID NO: 57313 - DNA, 31 bp, Homo sapiens; identical to SEQ ID NO: 28100
  AEKP01166227.1_44013-111583:53329-53360
  hypo

SEQ ID NO: 57314 - DNA, 31 bp, Homo sapiens; identical to SEQ ID NO: 28101
  AEKP01172922.1_98-3151:2029-2060
  hypo

SEQ ID NO: 57315 - DNA, 31 bp, Homo sapiens; identical to SEQ ID NO: 28102
  AEKP01172922.1_98-3151:2079-2110
  hypo

SEQ ID NO: 57316 - DNA, 49 bp, Homo sapiens; identical to SEQ ID NO: 28104
  AEKP01184864.1_3582-5885:475-524
  hypo

SEQ ID NO: 57317 - DNA, 31 bp, Homo sapiens; identical to SEQ ID NO: 28105
  AEKP01184864.1_3582-5885:552-583
  hypo

SEQ ID NO: 57318 - DNA, 31 bp, Homo sapiens; identical to SEQ ID NO: 28106
  AEKP01184864.1_3582-5885:596-627
  hypo

SEQ ID NO: 57319 - DNA, 36 bp, Homo sapiens; identical to SEQ ID NO: 28107
  AEKP01209288.1_3835-9918:5049-5085
  hypo

SEQ ID NO: 57320 - DNA, 100 bp, Homo sapiens; identical to SEQ ID NO: 28108
  AL162252.17_162460-176678:8536-8636
  hypo

SEQ ID NO: 57321 - DNA, 31 bp, Homo sapiens; identical to SEQ ID NO: 28109
  CR856017.2_11887-39781:16722-16753
  hypo

SEQ ID NO: 57322 - DNA, 113 bp, Homo sapiens; identical to SEQ ID NO: 28110
  FP565324.3_2001-29640:15326-15439
  hypo

SEQ ID NO: 57323 - DNA, 31 bp, Homo sapiens; identical to SEQ ID NO: 28114
  GL000212.1:65199-65230
  hypo

SEQ ID NO: 57324 - DNA, 31 bp, Homo sapiens; identical to SEQ ID NO: 28116
  GL339450.1:72631-72662
  hypo

SEQ ID NO: 57325 - DNA, 63 bp, Homo sapiens; identical to SEQ ID NO: 28117
  GL383535.1:198018-198081
  hypo

SEQ ID NO: 57326 - DNA, 45 bp, Homo sapiens; identical to SEQ ID NO: 28119
  JH806600.1:5064465-5064510
  hypo

SEQ ID NO: 57327 - DNA, 31 bp, Homo sapiens; identical to SEQ ID NO: 28120
  KB021645.1:514668-514699
  hypo

SEQ ID NO: 57328 - DNA, 31 bp, Homo sapiens; identical to SEQ ID NO: 28121
  NW_001838014.1_249000-295694:12764-12795
  hypo

SEQ ID NO: 57329 - DNA, 113 bp, Homo sapiens; identical to SEQ ID NO: 7464
  NW_001838402.2_289580-297926:6068-6181
  hypo

SEQ ID NO: 57330 - DNA, 31 bp, Homo sapiens; identical to SEQ ID NO: 28124
  NW_001839593.1_106153-129919:23228-23259
  hypo

SEQ ID NO: 57331 - DNA, 31 bp, Homo sapiens; identical to SEQ ID NO: 28125
  NW_001840273.1_1-3087:1013-1044
  hypo

SEQ ID NO: 57332 - DNA, 31 bp, Homo sapiens; identical to SEQ ID NO: 28126
  NW_001840866.1_38854-140524:82622-82653
  hypo

SEQ ID NO: 57333 - DNA, 31 bp, Homo sapiens; identical to SEQ ID NO: 28127
  NW_001840954.1_1-14936:6734-6765
  hypo

SEQ ID NO: 57334 - DNA, 59 bp, Homo sapiens; identical to SEQ ID NO: 28128
  NW_001841138.1_67124-102688:28425-28484
  hypo

SEQ ID NO: 57335 - DNA, 79 bp, Homo sapiens; identical to SEQ ID NO: 28129
  NW_001842432.1_1-179261:39823-39902
  hypo

SEQ ID NO: 57336 - DNA, 31 bp, Homo sapiens; identical to SEQ ID NO: 28130
  NW_001842432.1_1-179261:39971-40002
  hypo
